United States Patent Application Publication US 2025/0304934 A1 - sequence listing, part 2

SEQ ID NO: 143 - DNA, 20645 bp, Tetradesmus sp.
  source 1..20645: mol_type = other DNA
tctcatctggcagtgcacgcttcataggcaggtggcgccactgcagatgacggtctacttcatggcaacgccgcagcaaatgatctgtgctgatctcatattcatctaacatatcatgcaagaccttagtgcgctgcactgcatctctgatgctagtgaagtatgcgtgctcttggtactctacatagttaggtggctgacaaatgtagcgcgtctgcatgtagccctcagccaagatcgcagcacacttgcgagcttgttcatccggcagctttggctcatgcccgccgccccagatggtgcgcagtgtaaaagaggtctgcagctttgtcatgttgtaccgcatgaaccggctgacatcccgaatgtgccccggctcgcatggtgtgaatctgctgctccactgctcctcaaacatggcaacagccgcggctggaacatgtggcagcacagcattgtgcatgaacatgcacttcactgcacaaaggcgtgcctgcagctgcacttctggggtgtcatgcatggcgcctgcaaaaatgcgcacgcgcacagcaacagagatggcaagggcgcagttgcagttagtaacagatgggcaacataacttttcactgtgaagttcatactgcaacatcctgcaaacttgttatttcctcactgccctcgtgattgttagcacgaaagctgatggtctgctgtttgcgaggaattaatcatatgcaaacagaatcagtttgagccacgcttgtgccacagcagagctaagaggagaaagtatgttacactcccattctggacgccccgccgcgcctaatacagacggtgtggggctctgcttgcacccccaaacactgatctgatatatatgtgttctatgtagaaagcatgaagcagctgcagaggccgtgtctgagagcacctcacagtgtacaactgttacaccaccagtaaccgctgagcactgctgctgcaggcgttctagaccacttcaagtagcacaaacttctgtgttgtccagctcctcctacctgctggtgctgctgctccctcgcagtgctgtccgtgatactgttgttgagctaggtgttggccaccagcacagtgtattcgtgtgctcctgtggaaagttcgcaagagaggagaaatcaagggccggttttagacattttgaggccaggtatgtgcgtgcagatgttgtgctgctagtaaaacagcagcagcaggcagtggtgtgtacaacattgctgtagcccccaggcagtgctggtttcaggaattggtatgaactgagcagaatcgatttgcatggtgtgctggctagcatagcatgccgtgctaacagtcacgagggcagtgcaagtgttacctgtcacatccttccaagcctcacacccacagaccctgtatcgtcagttcggacgcctagtaatgcaattgatgtgcatttgattttttggtgcgtttggccttccgtgaagcacattggcgttaatagagccctgggggtgggaaacatttccccccgatttgcgctcacacgcgccagggaccgcctgctagcaccatttcatgctgctgtaatggcgttcaactgggcacgaagcttcgtacattcggcttatggcccgttcggcctttgctggggactagtgcacgtcggcagctagctgtctcacgccataatagcaatcatcgtagccccatgcatgtcacaaaagatccattacacaacattgcaggcttcacccacgcctacgagaagcaatcaaagggcgagggctcacccttcacggtgcaccgtacactgtcagactacgccacaaaccaccagctgtgtgcagcagcaaataatgcctgcatgcaccagctggcccccacgctagcagcaacaaagctgctaaacacacatgccaagtctcagttgccagaagtgctgccagcctcccttgccattggtgctggcgcagttgaatgccactgctgttgtgaacactgtgttgacaaaggccagcatgaaacatcagtgcagcacacactggcccaccctacccttcggcattactcacaccgcgcctctacctccctctcaatgtcaatagggtgaaatgcatcacttcaaggatataatgatgagatgccaccacgtgtacgtcactgtgacatgtcaccactgccaagatatgggtgtcatgtagctctgatgtcggtgctgtgtgtgagagaggaggtgagaggggtctgacgcagctggggacactttcttgcggtgatgcagcttggcaaaaaaagtttggataaccccctctcacccctggcatacccacaacttgtccaaattctctgcttcactccaaatccaacgcacagctgatgggtgctgtctataatcaacatgttgaggcagcagcagtctggggagaggtagagcaggtggcctgggccaggtggcaggtggcctgggccaggcggcaagtgcgctaaagccaggtggcaagtggctgaagccaggtggcaggtggcctagacgaggtcgcctgccagccacccgcctgacctggcatacccacaacttgtccaaaatctctgcttcactccaaatccaacgcacagctgatgggtgctgtctataatcaacaatgcttgattccagtgtaaaccctaaaacacaagagctgcgctgccgccaccatgcacagctcaacctcggacatgcatgctgctcagcacagccctactagtagtcagtgttaccacccccgcgtgcgatgcaaactgccttcctggcggcaatgctgttcatcaggttttggcacatggacagcggcatggaggcccaaatggcctgcgctgcttcccacattgcctccaggctagcatactgttgtgcatacaactgctgcttgagccaagcccatgcattctcaatggggttcgggtctggagagtatggcggccaatctgcaatgatgtgtatgtctttgaggctcatgaatgctgcagtgctcttagccctgtgcggactagcaccatcaagcaagtacacccactcatgcacacccgctgcactgaaaatcacctcagcatcaggttgcaactcctcccacagcacatcttggaactcctctgcacccacacgtgtgtgctgcacaaccgccttcagctttttgttgtaactgccgtatttcttggggtgcccagtgctgccagtgacgcggatgagacgggtgacgccatacttggttgcaccaccatacacatgcaactgcttgcccttaataggcttgcaggcaactggcttggtgcccttcttgacccacttcttgcaccagcgcggggtggagctcagagtgaggatgatgctgtcgatggcaatgatgcggtcactgtcatgctgctgctagcagaacacaatgcgtctcttcttagttgcgctggtcaagatgggctgctgctgcactggcgccaagtccaacgcattcttggctgctctgagcacgcttttagtgcagatgctgctagctatggtgccttgctgcttgagtgctgctgatgcttttgctgctgactgatgctccagtactgttgttgctactgcttccacctggactgcattgagcgccttagggcggcctgaacgtggtaaagcagacacggatcctcgctcgttgtacttgtttagctgtgcctgcacgtatcgagtgggataaccgagagctcgtgctgctgctgccacgttccacttcttggctttgagggcagcaagagtagtctggcgtttgatgtcaagttcagcagcagtgcgtctcttagtcattttgtcaatgtgcaacttctgagctagcttgctgctgtgtcaagcgacccagaagaacaacagcagcagcagccgaacaggcaatgtcacaaataaactaacctttgtcacgcatttgcgccaaatagcgaggtttaacataaagaatacatcataacaagcacgttaacgtagccggtgcgagctgtagtcaccgcttcacgatgtactggcctcacattgtcccctggtgacaggtgctgcagtgtaggcagccaggctgaaacctgcattggagtcacccagagggcattgcctgtaaaatcaaaatgctgtatacctgagcacgtgacttgcaattataagactttctcgtcgattttcagcgattttagcagcacagagcttacatccaagccatgtactgctgcagtgaagttgacatactgaactggctgctttggcctaatcaggcctgctgctgctgccacactgcaggcaggcaagaactgagcactggctagcaaaacccacacactaggtgccaacatactcgaagactggaggcagattctttcagcaagggggtgaaaatagaatggaactgttgagatacagctggtttagcacctagttcagtccagctcaatgatgcagcatgatggttactgctcaacaagcagtcacctgttactctgtatgcactatctgtatgtgcatcaaccagagtactccacactgttctggatatgtgtggaggtgtgtagagtgtactagaatgcacactactagacagcactagtaagtgctggaccgatcaggattgttctggaaccttctgcaggtttccagtactgtactgcttagggtatttaatggaccacttctggtggacattggtaacagagtttgatcaaagctatcattcacaagcactcagtgcactacattctaataggttatgagcccatttacacgcaccactgtgctgtgaggaactctcgttcaggatttgccctgtacagtgctaactgcggaccatagcaggcgcagcaagtcagaggcaggaatctaagataaacttagacattgaaagttcttgtcctgtttggcagacaggcctacagagacttcggcgcacatcacagcaggaacttcattacaagttcggagatacgatggcgcctacagaacagtgcaaatttggttttgccaagctcggagatgataattactccacgtggaaagcccaaatgcggggcttgctggcaaccaaggactgtgactcggctctcacaaacgcagaggacgttcacagcaacaaagcaaaaggcctaatgattatgtgcgtagaggaacagcatcttcagaccatcgaaagtgctgctaacgcaatggaggcctggacagcactggaaaacctttatcagcagacaagtacagcaaatttactgcagctgaagcgacagctcaacactctggagaaaagaacctctgagaccatcacacagtatattgccagggcacgcaatattgccaatcagatacgtgcagctactggtcaggatgtgagtgcagcagacatggctttggcagtgctgggcggcctgccatcagagtacagcatggtcaagactgtcatcgataatatggcagatgtaccaactacagcagttattcaagcgaagctgctgttggtggagaagcagctgccagctttggatggtgacacagcatactacaccagggttgaccaagcaaggcgtccaaacaggcaaactgggcaaggcaggcagcagggtggaggtattaccaacaagacctgctaaaactgtcacaagaaaggacacttcaagcgggattgccgcaagcgcatggcagatgaaagggatggccggcgcagtggctgcaggcaagatgccccacccggtgacattgacctcatggctgtcagcaacagcagcaccaggttcaatacaactgactgggtactggactcaggagcaacacgacacctcacaggcaacaaggacctcctgatcaacgcgcaaggcccattgctgaagaacttacaatcacctttggcaacaacagtacaggcacagcaacagcagttggagatgtagtgctgctggacacatgctcagcagacaggaagctggttttgcgcaatgtactgtatgtacctgcagcaaagacagcaaacatgttgtccatcagcactgcacgcaaggcaggagctcgctttgtcattgacagtgatggatgcaagctgtattatggccaggagttgctggtgacagcgcaggagagggatggcctttacatcatcagcagcaagaacgccaaggcacagcatgagtcagcaatgcttgcacacaccaaggagacggcccaggaatggcaccagcgctacgcacatcttggatacagcaatatggccagactggtgaaggagaacatggtgaaaggcatcaacgtttctgctgaggagttcttggcagcaaacaaggaggcatgtgagacatgcgccaagtccaagcaggcccgccagcctttcaacagcagtgacacagagattgatgagccactggcgctggttcactcagacctgtgtgggcccatgaagcaacagtcattgggtggcaaactatatctggcgaccttcttggatgactactcaggcttgtcagtgatcaagctgctgaagcacaagtcaaagatggcagcagctatgaaggaggtcttcacaatgctggcgaaccaatctggcagcagggtcaaggcgctgcggactgacaacggcacagagtatgtcaatgctgctgtaagcgcctaccttaaaaccaaaggcatcatacatcagacaactatgacctacacgccacagcagaatggcaaggcagagcggttgaaccgcacgctcatggagaaggtcagagcaatgctgtctgagggaaagctgagcaacagcttgtggggcgaagcagcacacacagccaacaccatacgcaacagggcaccagttgctgggaaggacaagacaccgtgggagctgttctttggcatcaagccagatgtgtctttcttgcgtccatttggtaccaaggcgtttgtgctcattccaaaggagaagcgcagcagcaagctgtcgagcgtcagcacaactggcacacttgtgggttatgcaccaggactgaatggctacagggttctggtaaacaaaaacaaggtggtgagcagcagggatgtggtctttagtccacctgcacaggctggaagcagtacaccactgcaagcaactacagcaagtgatgacactggtgaagaaggcagtccacctccccttgaccaggccagcgatgataaggaagatgatggtgatgatggtggcaacagtgacaacgatggtggtgatgatgatgagccacctgcaccagtcctgcggcgcagcacaaggacaacagctggcaagccaccaggccgttatgctggcagtacagcaccaacaccacagaatgcagcacttgcaggaggcagcagcggcaccaacattgttgctatgatggctgcaatcaaggaacccttgacgtacgaggaggcactggcatcagagcatgcagaacaatggcagcaggctatggatgacgagattgcgtcactggcagccaaccagacatggtcacttgaagagactccaccatgtgtcaatcccatcccagtgaagtgggtcttcaaaatcaagcgtgacaacacattgacatcaagacagccttcctctatggcgagctgcaggagaacgtctacatacaacaacccaagggttatgcagagggcagctcaaacatggcctgtcacctacgcaaggcaatatacggtctaaagcaagctccaagggtctggcatgagagacttcaccgtgagctagagctgtatggcttcaaggcgtcaacagcagatcccagcctttacgtctgccatgacaaggagtcaacccacctacctgctcatctacgttgatgacattctgattgccagcaagtcaacagctgcagtcaacaatgtcaagaaatgtctaatgagcagctttgaggcaagggaccttaaagacgcacagcattaccttggcatcaagattacaagagaccgtgggagtggtacactgtggctgtcccaagagctgatggcaacagaactggttgctaagtatggcctggaggatggcaagacaaaagcagtaccactgagcccagctataaagctgaccaaggatgaaggtgaaactctggacaaggagaggtacccctacagtcagctggtaggaagcctgatgtacctgtcagtgagcacaaggccggacatcgcatacacagtgggagcactggcgcgctacatgagctgtccaacaactgtacactggatagcagcaaagggagtgctgcgctaattggcaggaaccacaaactatcgtttgaagtttgggggcagcagcatggagctagttggttactgtgatgccgacgatgctggagatctggacaccaggcgctctactactggttatgtgttcatcatgaacggagcagcaatctcttggcagagcaagcggcagccaactgtggcagcatctacaacagaagcagagtacatggctgcagcagcagcagtgaaggagggcttatggctaaggaagctcttggctgactttggtatcagcattaccacagttagcatactggcagacaaccagtcagcgatcaaattgctgcgcaacccgatttcatctctacgcagcaagcacattgatgttgtgcatcactttgcacgtgagagggtgatgcggcgagaagtggcgtttgtgtataccgccacagacaagatgattgctgatgttatgacgaaggccctgcccagggttcagcatatgtactgctgcagtggcatgggcgttgtttaggcacattgtactgcatattatctggactgcgtgggagtgttgagatacagctggtttagcacctagttcagtccagctcaatgatgcagcatgatggttactgctcaacaagcagtcacctgttactctgtatgcactatatgtatgtgcatcaaccagagtactccacactgttctggatatgtgtggaggtgtgtagagtgtactagaatgcacactactagacagcactagtaagtgctggaccgatcaggattgttctggaaccttctgcaggtttctagtactgtactgcttagggtatttaatggaccacttctggtggacattggtaacagagtttgatcaaagctatcattcacaagcactcagtgcactacattctaataggaaccacattgcatcatttcagcaccaacacagtggccatagtgcaagccctcaatttcctgcaaactgcagcagcagcattttgtgactaaacagccaaatgaatggcaggcacctctctgaggcagacaggtcaggccacatgttgcattgatgccacaattgcagctgcaccttgtcacattcagaaatcagccatctccaatgtttggttcaaagagatgtagatggggcatgactcaaacagcgacagtcgaatgcagcctgaggggggccatactcctaccacgcgacacaaagcacgacctgctgcagcgcctggagtcactggtcttggctgtctccaagctcatgcggcgcggcagcctgctggcgctacttcactacacgcggctgctgggcgacggccaggacagggctgcagacgctatcacgctgtggacagacaccgggtggcgccaggtcatgacgatcgggctgccaaccttcagcatcaggaaattggaggaccctgagatgcgcgtcacatacgagatgtacaagcacatgttccctgccgatgatgaccctgacctgagccacatgccaacaggtacagccaacacgctgacccatgcagccacccaactgcgcacaacattcacaaacctgtgggtgccgctcgtaccccgcctcaagcgactgtgccgtgcctggcggcggaaacgtaagcaggaacaagtggccaggagcgatgatccgagcatcttggacctggtgcgggcgattgagacaggggcagactatgccatggagaagaagatgcatgcagcggctgtggagtttgtgactgaggtcaggcggcggctggggctgcctgatgcaggtgccaagctgacggagtcctatgccaagcgcaaccagcagcagatgctgctgtttctggcctggctgcagcgtcgcgtggaggcgttgggtggaaagggtgtccggctttgccctgtcttcagcgtgcggcgccagcatgtgcagatcgactgcaccacgctgctgcacatgctgagcggcatgcgcctggtgccagagcacctggtaaagcagagggcgaggcaacggactgggagggcgtgctggatctggtagccggcgtgtttgagccgccctgccctgctaagcagaaggggaagctgcagtggtggggctccttgtcaacagatggcgtcgcagccagctttgtgtacgcagacacaaggccagtctcaaagaagggcaccaaaactgcaacagcagcagcagtcaccagcagcagcagaagcaaagggaccacgggcgctaccaccccagcactgcctcctccccacgacttggctgttgtgggcatcgaccctggcaggtgcacgatcgtgcacgccgcgacccaggtgcagggcacccgcacgctggagtggacgctgccccgcaagcgctaccgcctaaagtccgggctggcacaggcgaggccaaggagcggcgttgggacacggccatgattggtggctcctggaaacagatgaaccagcagggcggagcactgcgcagcagctctcttcagcagctgacccagcacattgcggcgtacaacagcgtggctgaggagtggtggacatccgccatgcagcgcaagcgggccaagctccgcttccgcacttatggcggccgcaagcgctgcttggaccgcttcttctcaggcttggagcgggacgtgtcggcagccgagcccaacaagcgcctggccattgcctatggtgccgccacgttcagcccctccgttactggcaagcccgccacgcccacaactgctgcctatagagcggcactgcgcctgcggagctctggtgcaattgtggaaaagcagaacgagtgccgcacctcaaagcagtgttgtcactgtcatggagatgtggaggcttgctggcagagcgtacggctgcagttgggaccagcaccagacacggacgctgctggtgctggcccctgcccatcacagctcagtgccagaattcaggtggagacctgtcacggacccacggtgccaaaggctggcgcctacctgagggggttgctcttctgcccacagtgcagcaagttcctcgaccgtgacaggtcagcagcgctcaacattcgcttcttgtttacacaaacacagctgctgggttgctctatgcccacacagtttgtggctcgtcgcaagcaaaagaagcagaagaagcgcaaccaggccagctgaaacaagctggtatacagagggccatgtccacttttgatccggccatgttgtagatgtgcgtgtgtgtgtgtgtgagaccacggccagagagaatgcattctctgcagctgccatcctatctgtcatcacagcacatgcacaaaaagcatcctgacactgctgctggcaatgatgatcatggctggccttccatctgactgtctacctgacatgcatacctaggtctctctcactctcctgctcacctgtccgatcatgatccgcatctcctgcggtgcacagggattgctaccactgcagcactgctgccaggctgtgcagggggtgctgctgctgcagtgctgctgctgttgcgttgccgcttgggtgtgcgctcggcgtcggtgccctgcaggcaggtcacaagggggcatggcacggatgttgtttgacaatgtatacatcccatatgatgcaggtcactggcgcagttgcaggtgtctgtaaaggagctagcattcgcacactgctagcagcaaacgctgcaagtgacatgacaatcacacatgagccagttctacagctgccgctactgccccctgcagccaatgttgccttgtcacctacgtcatctaccttgcgcttgtgggcagccttgcgcctgatcttgttggtagccccgcgcatggcatcaccctggacagagcagcagcacaccatgagtacagcaacaggtaagaaagcaccacgtgacctggtggtgtgccagcacagtcagtaaagctgctctgcatatacatcccaagacacaaacacacaggatgcaggtcactggcacggatgcaggtgctccagtacgtgtgctgtttgacaatggtgcagacactactgctttctgtcaaagacctggcattttcacgctgccagagtttgctgaactcagttgcaaaataccatgaccggcacttgccattcctctctacttttgccgctgctctgtcgcacctgcagctggagctcgcgtgctagaccagtatttagcagctccctggccttgtcatcagcaccaacgccagccagccacgcctcgctggccaggtctgcagcagcagcgcagctaccgaacatggcatagcggctgctacacagcaccacgctacaggcttggaagccgggctgttcgcacagcaggttacacagctgctgcgactccactggcaccctttgcagtggtttgtgcgtgcgcttgctgtagaacttcagcgagtcaggcaggggggcattgctgacatccagatgtgcgcgccgctgaaggccggagctatcgcgctcggcggcctcaatgctgcggatggtggtgttgaagaggccctgggtcaagtgacggtctgggccatcctggtacagcgcttgagggcattcgaggacaatgttgctgcctgcaacaagctggttgagtgccgtgcagctgctgcactcccagtcatcgtcagggatgcaggcaatccccaagcatgccatgtgaagtccttggaagcatccctcacatatcagcatggtttcagggctgtcctgactgccgcatgctgtgcagcttgtgttggggtcaataggctcccctacagttccctctcggttttccatagcactgcaatgatagccagcagtagcaaattacaccggttggtggtggagcagctgttgtgcaggctgggttgcagcagtacagcagcagcaggttgtgtggtgagaacactggttgatgggtcgctgctgcagcgaagctgcgccgcttgtaatctatcatgtagctgattgcaaagcatagctgtcacagagttgctaagaagcccaggcactgcagacacgtctgatgccttgatgacaagctggcatgttgcacagttgagtgaatcttgcattccatgagcgtgtggaacattgcgcatgtgtgcgtgccaggaatggcagtgcctggagtctgctgctgctgctgctgctgcaacagtctcgcgctatcagctagggcaggcaagcattgcaccattagggatgagcagatcattgcaagtgcattagaggctagtgcattgcatggctgctggggcaaacgacaaacaaaactgtccgaatggctgaagcagccagccgacgcccgcactcccacaactattgcaactccgaatgttcatccgcatccgaatgaacttgcctcattgccagagcagtatggtaggaggcggaaggccagaatggtgggttgtttcgctgcagcaccggagactggttgttttacagtgtgtgtcgtctactgcgaacgtgcactgatggtggaaacagtcgagaggggcggacaggcaaggaaataggcgagcgcagccaaggatcaagatgctcttggattgtccttggacataatctgtgcacttttcagcaacacccaaacaacttgctggatccctactgaatgtgttcaaaaatagccaaaaccgtagtccgatgctctttagagagctttgcggcgaggcagccaaactagtgcacagcctctttagagagacttttctgggtctccaatctctaagggttgctgttgtgcgccgcacctgcacgccatcgccctgcacagctgtcgcgtctggcggcggcagcagcagctctggccctgccccagccaccagcccgcgcttggccacgtcaagcgcttcgtgcatgaacacaaagccggtgcgcttgatcgagaaacgcacgttgaacttgcggcctggcacgaagcgtggaagcgcttgctgaatgcagcagcacctgcgtgagcattcatggtgcagcagtgtacgcagacacagcaagagacatacagagagttggccagaacatgtgcggggtggagaggggttgcagctcagccattcatgccaaacacaggcaggctctgctgcttgcttcctacactgcaggtggagcctgaggcacactgcttttcctggacactgtgttgtacacaaagatgacactgtcatgacactgttgttccagttgatagtatcagttccagccgtacctgctccttttggacctgccacacaaagccctggtactcctggctgctgctgccctgctccgacacatacagcgcatcgccacgcatgactgacagccgggcctctgcaagaccaggcaccagcaggcctagtagcttgccattgcctcctggtgtcagtgttgcgccttcgatgtcgtaggctcgcacatctgtctcctgctgcagctcttcaaggtgcagcagcaggtgcagctgcacccatacgcacaagaaaaagcaaggcgcaaggcaccaacagcagcaatatcttcactcactaacagcagcattggcagcgatttgtagtgttggttgtaacaaaatgagcagcatctgatgcagcagcacgtacacctgcagacaggcaagccgctgatgaaacagacactactgagagcattacccatgcatccacaacagccaagccacaccatgagcctaaggtaacctcactgaggcggcgcgtgacaacttagcaacacagcatttggccatgcgctcgtgaaagtgtctgtgcatttgcggctcagctcgcaccttgttgaggtggcttgtcacgtcgctcttgccctggtactgctgcagctgcagctccagctgctctgcattgccgtcagccaccagctgccgcagcctgcagcagcagaagaggcaagatcagcaaaacacgcaccagcagtagcaggaagaacagggctgcagctgactgcaccctatgggagttcttttcattgtagactgcagatctgcacacgctgtagtcccgccagacatgcatcatcacagtgcaagcgccgatccatgtcacccaactgcaggacgccagcaccagcagcaggctgctaagcacgtcaacagcgctccagcactagcaaggcggtcgtcgccacagcagcagcagcaccagcagcatgctgctaagcacgcttgggcacctgctccagcaaggcgctgctcatcaagagggcaccttgtggttcctagcaagacggtcgtcgcgacagcgcccgcagcacgtcacaaacacgactgggcactagcaacagcaagctgctcacctggagggcaccttgtggtcccttggtgacttctgccaagcgaccttgctgcgcgtctccttctcgcctggctcaattgctgctgctgggccccgcggcagccgccggtgcttcttggtgtatggcgcgctcgctgagatgtctggaatgctggtgtccccaaagaatgggtcgcactcaatgcgcagctcacgcgctatgacaaagcctgcagaacaagttgcaattcagaccagtgaacagtgtgtggccagcagatgtccatcactagatgtctacaagcgtggagcagatgactactgcagccctcccgtccacaaccatctcagagagatattggaaggcacgcaaccgatcgtctgatgttggttgtgccacaagcagcctgctgcacatatacttagtgcggctgctggtagtaacagtctcacacctctcacctgggaactcaaagatcagcagtgaccgccgtgctgcggcaccacctccacctgcaggttcagcgtctgcccggcatgtaggtgccaaccttccaacggcaagtccggcagcaccgccgcctcccgcagcggccgcagctgtgcagagcggcaaatgcacgtacgcagcagcacacaacgtggatctgtttaagctaagaaatgtttgttgttgaggccagacacacatttcatcttgcctagatctgccagctctgagaattgaagccgtggcagctgcatgcacaagtcagtggatgcctacgcctgaacgatgagcgctaaggcagatgagagggggcattctccctacagctgctggtcgcacctggtacaccctgctgagcagctgcatgctgctgccaatgttctccacactcatcggcagcttgatgggctgccctgcctgcaaaacagcggcagcaacagcaacgacaatcagccagcgcccctacaacactcaggtgtcccgtacgcggttgtgtcaacagcattgtccacgtgcatctgcgcaaggggtgcatacaatagtggcgtgcaccgccagccaattataccgcaggaagaaagctggtcactattatgtgatacagcaccttcacaatgtataatacacgcacctgggtcgccagcccttctggcagctctgacacacggactccctccttgttggcgtgcaggctgcctgatgaccgcagctgctgagcaagcagcgtcacgcggtgcctgctgccgcgcatgtggctttccagcgcattgacgtttgggaagctcaagttgcaggtagagcagtagaagtagccgccagcattgttggcggacgtggcagggagctgtgagccctgctgacaaatgcaaccattgtgttgggcacatgtttcgaatactgcgtacacaagaaggcacaggtcctgcagctagggctgctcagtgcttcaggttgagggtcatacataaacatatgtggtaaggtatgaagctgatgcactctagtttggattcagcacgtgacaaatttgcaacgctttaaagcactcacggagcagtacgcaaagcacaccaccatcaccagccttcttttgttgtccttgtacattgcatattctgcaggccggcttctgaccactgctttgattgttgcaaagctgcacttcagtgatgctctgattgtgtgaagtggaatgccatttggaaggcttgcacccagtagctcaaacagctgcagcagcttagctgcaagctcctcatctgaagaggctggcatgtctgatcacggctgttgaacgcctaggagaacgcagattctatgagtgtgggagctaatagcaccggacagcttcaagcacaccaatttcgagctcgagagtctagccagactctataggccgagcatcgtagctgtacaggcgtcttactgcattgtgctgggtgctatgttgatactggtgaatacattatatttgttcttggtgtatgccagtgacttgaaaatggtaaacagccaaccaccgtgcttatccgtgccagcagccgtgcccagaaggtgtaccgtcgaacccgcgctgtaactagcaccggccaaagggatgatacagtgcgatcatacaaaatccattctgttttatcgacaaacaccggattagagcaactcagcatgcctgcaccgtgccgatgtgtcgaaaatcgagttcctttgcaccggcaactgcagctcatgagctgatcatgcatgttcacgcagacatcatggccagggaggctatgctttcattcagcaaacaatacgcatatgagcgtggcgagcgcattctgcagctggtatggtaccaggcaccggtgccgcagagtctgaatgcatgggccaaacagcctgtgactggctagcctggtactctgtggcatggcgtgctgttccgtcacaagcgactatacacttgtacagaaatgccagcacacttgctacttcaactcataaacaagccagactggcaatagaaaagcagcagcactctagcaggaaagcaagcaggtcacccaatcccccaccggcccccaccgggacaaaatgcatgaggatcatcatcatcatactacccactcaagccatagcatcaccgccatcggccccacgcggtcacccaacccctgcatgcatggctgcacacgcaagccttgcagcagctgcggcactgcaggctgcagcgtaattttgtagcatgtgcatcatgcaatgcatggcctattccacaaagaacacagcagtgtggctggcgccgctgcagtggatgcacgccaagccatgcatgcgtcagcagttgacatttcgaaccattgccccccggctacgcatcctgaacgcatgcatcatgccaatcagcttggcgtgcatccactggagctgcatcatgatcatcatagtagatcgcatacactgtctgtggcaggtgggtgcagtcacaaagtgcctgggcagcaggtcaggcttggaacctaccatccaactgtcgtgtgacacaggtcatgaaacattactgtgcaaacagcagcgctaagcagcagtgctacaggtcaacctgtaacacaacacaaacgctcctgcataccacaccaacaggcatggtgcatcgtgcacagcagctgtgatagctgttcatcgactgcagcatgctgtcccaaccaactgaccgtcagggagtgtacagggagtggctccgccgaagcacccatctggcgcacatgcaagccgcacatagcgttgatccatgctgatcacatgcaatcctgcatccttgtcgtaagttatgcttagcacagcccgtacgctgctcagcagtaagcatgctcaaaacttgtgttggcatatgcagagcgtgcacaagttgctgctctcagggcaaccagcggcaccactgcaaagcaacatgctgcaaagcatgacacaccacacaacctgaccaacgcatgacgttgcaaagcagctgcagcaagctctaagccaagcctgctgtcactatgcttgtgtatgccacacactatcaacaaccagacaactagaacaccaccgacatggctagctacgatgctgctgcttacagcagcagcactgctgccagcagcaggggtgcaccaagcaatgaactcacagccaagctcattgcagagcttgttgcgttctttgcactggtgccgttcccgctgactgtctcattccctgctgcagtagcgttcccatctgtgccgttgtcagttgcgttcttgccgaacacctctgacacagttgcgttcttgcttttcttcttcccgctgtctgcagtgaagctatcgaggaactccagagttgactttggcactagcaccgcatcaatcttgtgcaggtagctgctgccagccaccacatctgcgctggtgattgttgcctcatcaccgtctgagttaggcttcaggataatgtgcattgagggatcaacgccgctgatgcgagctgcaatgactgcctgctcacgcatgatgcgctccgtcactttgcgtgcagccctgcaagagcagcagcagcgcatgagcagcaggcggtgagttggcactcataacctacttcacgcatgatgcagctgaagctgaattatctgctgaactgtctgctgatgccacctcaagctgcttttggtgagttgcggctgtcgaaagcccctctcatgcgtcagacctgccaaaaccctttctctactgacagcgcttagtgcaagtagtctactcacttctttgagacgtggatcatcacggtctctccgttgtacattgtcagcgtcatgttgtccctcagctggccggctcgcagcgctttgcctggcagcacgtggtacttgagcaggttggccagctgcttcttgttgccagtgatggcggtggcgttgccggcatagtagttcgacatggtatcgatggtgtaccaggcctgtgtgggtgaaagcagcaaacatgcggcgagtgggtgtgggtaatgtatgagctggaagggacatggtgagagggtaacgctgctgagcattgcactgaggcgcaacagcgaatgcgtacactgcaagtcatgagttctacactgtgcatcgagctgacaatgacatgcaagatacccttgcaatgcgtgcgagaagctgcttacaatccaactgtcatctcagatccaaccgctgctagcggatggttgctggccaagccgcacaactcacatcatctgagggtgcaaacagcgttgcaactgtcttggagttgctcaggtagctgctaagacctgcgtcaccaatggcactgtacagcgttgacatgtcctcaacgctgccaactgcctcctctaggctcttgaaaaacataaccttgtcagcctgctgcaggttgagctgcaagcaggaaacatagacacacgcaccacagcatgatcaatcaatggtatcccagtatgggagtgcggcatttagagttggtgctggcagtacttgtgagtcaccaatggtgacaggaagagaggatccagcagcacgcatgtaacttgaacaacatccaccatgcggcaactgcgcaacacacaactcacagactggcatgcatggtagcgctgctgctgtcacgttgttcgtgctgctgctgctgctgctgccatcaggtttt

SEQ ID NO: 144 - DNA, 20645 bp, Tetradesmus sp.
  source 1..20645: mol_type = other DNA
tgctgtgtgcggatctctggctgaggttcaggctgtggctgcaacagtttatgaatacagttgtaagtggcggttcaagctgaatagcttgaagtctgctgtcatgcatgtctcaccagctagacagcccagccagttggctgattctggcattgtttggaatggtgtgcctgtgcctgttgtatcagagtactgctaccttggcctgtggttcaacaatgcctgcaactggaatacgcactttgagaagatgttggcaaaagtgcatcgtgtgaagggtgggctcatgccagtttggaagggccggctcatcagcgtggaagtaaagcgtatcattctgcttacatgcgttcgcccgattgttgaatatggcagtgaggtctggtttccgtcaactgcaaggcaactgcaacagattgacaaagtgcagactgacatcatcaagtgctcaatgcgttgtggcaaggagcgcccttgcacttcacttgttctggctgaatggggtgtgaagccattgcacatgtggcttcatcagagggcgatggagtattactttagggttcagcgtatgcagaactgtcggttgccacatcaggtgttttcagctgagtggaagcgccctagtggtgctgttgcggtgacaccttggcataagtatgtgcagagtttgctttgcaagtatggtgtggatgttgaggcggcggctgatcgagctaatgcgtgcaagaatcacatcaaccgtcaggtcaggaagctgcatgcagacacaattgtttgtgaatcactgcagcactctactttgagccgttacatcacgcatgtgcacgcatgtgtggtctgggtggtctaccttacaccgaaaatagagagaataatcagtctgctttccgcctccccagtggctgaggcgcggttgccgatgccgaaagttatggcttacaaggattgattattattatcacgcatgtgcaccctacacatgctgatgccatgcgttttaaaagggctaggccctttttgtgttctggtgcgccaacgcgtgggattgagtgatgcgtgttcgaatgggctgtctttgcgtgcatgagcgtacccgtcgttatggcggcagcagagctgattccaacacagcatgtcctgcttgtggtcagggtgttgagtctttgtcacatctgatgtttgattgtcccgctacttctgctcagagggatactatgcttgatgaaattcggtctgttttgcgtgatgttgctggcggcgctgaaaaattgcgcaatgtgttgtcgttgactgatgcatccaccaagttgttgcgttttgtttctgatgatatttggggtagtaggggggtgtgccgagtgatatctaggagcattgctgagtatcttgtccaagcttgggatgtgcgtaataattgcaaacacaatggagcagtgctccctctttcttccgctcctgaggggcgcggggccgatggcgttgatgctatggcttaatgggtaacatgatgatgatgatgatgatgatgatgatgatgatgatgatgatgatgatgatgatgatgatgatgatgatgatgatgatgaattacatctgatgatgccatgcttatgaagatgatttaaggaaatgttgatcaatgctgtactacaggctgcagttgtatctttatcttttttgggtaacgagctcatgatgcatgtgcgtttgggttgctttctagtgataatgatcattgccagtatgccatagccattgggttgttttcagcgcgaggcacctgggatcacagctctttaccagggctgtcagctgagccgccaatctgggtgctgggtctcagcgggatgctggcgcagttccaggccacactaggcacaggcttcagtgccgtttactatcactgcaagggctatatggactttggcatgcctggagatgcagatggagatgagatgaaaagcaccagaagaggcagcagtgcacctacacgctgagggaagggcctacgataggaaacagcagccgaaccctacgagtgttacaatgtatgacgacaccgaacaacagacttggcagctggtatgtactgcgtggttgaatcgctctctgtaagcgttgcctcgttgctagcacatcgacagcagctatccatcaagcattgcctcgttgctagcacatatcgacagcagctgtccatcattagattgcatgcattcacgcctcggcgaagtttttgtagaaaagtgattgggaaacactcagtgctgcgcttgcgcatccgcagcttcagtccaaggagttcaggaggtgcgacgaggcttctaccattgctccttaattccacggagtagcaacacaataacacgttccaacatccattcatggatgttagtgcgccgtgcctcggccatacagcaggagccgagttggcaggggtgtccgccatgcagcaggagctggaaagcattcaagctgagctggcaggccataaggctcggttagaggaggtcagagctggcattcacgatgcgaaagcgtccaacaaccgcgacgagttggaaaagctgcaggcgctggagctggagttgctgggggtcatcagagagttgcaagccaaagagaacaggctgagcagccagtctggtgagtcatgagaatctcagggaggccttgtgtacagcagcaggaaccccagtttggttggtgcaggcagtgttgctggcagctctgcatgtcggtacgcagtaacacagagcatgctaggcgctcttgaagccaatgcacgctgaccgacaaggcgtttccactgttctaaatcagtcggatgactgggaagctgtagcattagacaagctttcaaatgcgccactgaaactagctgcagatgcgctgactcaatcagggtgtccatcaggctgtacacagggtcattatgcgctgcgtgcagcgtgggtgaagaatgtctattgtttgccaccagaaccatagaatttggcaacagctcagcaggtggttggatcttggagatgcgagcaatcctggggttgcacaccttgctcacaacaggcatgcttgccagtggaagaggattgctgctgcatttgaagcagctgtgaaaccaagcagaagcagtcttagccattacaagtgctgcatgcatcaccacatgcaacatgccagccatggttgctcaactttggtgctcactcaagggtgtgcagcagcacgctgcatggcccctggtggacaacccggtgttgctatgttttttcctatggtgctgtagcaagtgctttgctgcatgcatgcaaccccttcaatgcacacgatgcctgcttgtgtccgtgttgatgatgcatgctgcggtgtggaatgcatgccccctccacgctttgcttccccaccccaccccacccttttttgaccgacatcgtgcatcttgtgttgtattccttgtgaaactgcaacaccctcctgcatgctcctgtgtgctgcatgccactgtgctttcatgctgcaagcttctttgtttgaccttttgctgaacctggccctgcccgtgtgtttttgcatgtgctcttcacggctcccacctggctttttctttcaacccacagcagcagcaggtgagtcgtgcgtgtgcttgcaatggtgattgtggcaagcctgccaaaccagcattgcttgctgctgtgtgtggagcagccgtgcaaccccatgcaacagcatggctcattgtcaggagtacaacctgcacctcattatgcagcatgctagctgtcatgcatgtctgctaatcatcagcatcagccgtggaaccccatgcagtagcagccctggtggtcaggcgcacggaattcaccaccacctgcagcatgctcactaccaatatcatgcgtgcctgaccactgtgctgcgtgcttatcatcgctgtctttggcagggctcctctcagcaaaggagtacatcatgcagccgctgcctcgcatgctgcaccgcacctcagaccgcgcatcctcatccatgacacaaccacgccacgcccgcacgtttgacggcatagaggagatgcccggctttgtcaacaaagtgaatgagtttgtgcacaggctgcctgaaggccccaagaagtacaacaaactggtgattgcagaaaggcacatgttgtggttgggatggttggttcctggcttgattggctggctgctagtaaagcaatttgcttgtgaaagttgcatcaataacacacatcaaagcagaggttggtcctggtgatgctggcaacctgcaagcctcaaagtaatgttcttcttgggtgtgcgctgagagcacagccttaccaagtggtgtgtgtatgtgtgtgcacgcacaaaggtgtgcttgcttgcatgcgtgcgcgtgtgtgctcgtgtggtacaagacatcacatgtttgtgcggtatgcccatgcccttgacacttccctcccgcctcccatgtccgcctgcctcgcacccaggtctaccgggcgaccgcgacccaaggcgagccagaggtcatgttacatggtgctgcagacgagagctatgtgcgagcttgtctgattcgtgccgtggagggcgtgagcgaggtggcagctgacctgggcattggtgggtgggtttgcatggccaccagaggcagttgtttgccatgatgctgtgtaccatgctgtccggtcgtgtgccactgctggagcggcggctgctcatgctcgtgttcctgcttatatccttgctgtgagtcaattgttgaagagcgactcacgcatgcaaccaacacttatcccctgacctgctcactctgacctacaggcacagaatatgttgatggtggcagcggtcggtcagcctcattcagtgatatgctggtgcgcaagagtggcacatctgtgtatgcggatgcctcgaggctggtccttggtgtgtttgaagtcaaaggcagctggcagctgaagctggatggcaacatgtccctgcaggctgcactggctgatgagaacctggggccatctgtggccaaggtcatccagcaggtgagcgctggggcccgctggtatgtggcctttcactttccctcagtggtcaacgagggcaggaaggaggtgggagggagggggagaggacgcagggagcgatatgcacagatgttggtgtatggcggcttaccgctaggctgggtgtcgcctttccttgctgctcacatggtatgcgccgcatggtactgcatcacaacacctgctgcaggcttatggagatgcggtcatggatgaggccccactgctgctggtcagcaactggcacaccaccttcctgttcagccgccgccttgatgatgtgcgaaacaagacactgcaggtgtcgcagtgggcctgggacagcacagatgtgccccctttgggtgcattcctgtatgttttgcaccgagcgcaccagctgtggcacaatgacgccaagcagcagctgccaaggaccggtgttcctgtcacgccccgatctggatacgaggtgcagctgggcagcaggcaggtgcagctgggcactcactttggtgggtggcgaccagcaccttcacgcagccagccaccccgcaccagcatcacatggcagccctttcaggcaggtggtgagggtgacgctgctgaggagctccacagtgacaccagcagcttgctgttgccaatctacagcagtagcagcagcagcagccacaacagtagcagcgatgatggtgctggccagtttgatgcagtggcttgggcagaaggtgttgctagctggagttcagctgcagtggcagttgaagctctgccagttctatccagctgcacagactgcagcagcatgtgtttgagcagcagcagcagtcgccgtgtcttcaaggtaaatttacaggcagttcagggggcagggcatggcgccgacggggcggggaacaccaagcatgcatacatcatcatcatcatcatcatgttacattaagccatagcatcaacgccatcggcccaagcatgcatacaagcatatcagggagtggcagcaagcagttgcaacattgggttgtgtgtgcctgacattgcttcaggagcatctgagatgggatgggacgtgcctagctgggccactttgcctgttccagtttgtgtggcccggccatcaaggcttatgctgtctatttcacactgcattgcagggcttggtagatggatcgcctgccgcattcaagacattcaatgtcaaggaccaccacgccatgtcggcgtttgtggcagaggcttcagcctatgtgatgcttcaggcaaagtggggagtatgcatgcccaagctgctggcgctgggtcggctgccacacagcggcgtgcctgtgctggcactgagcttgggcgagcccttgagcacgcagctgctgaagcagcatggcactgctgctaaagcatgcctgaagggtcttcacaaagctgggtttgcacacggtgatgtgcgtgccagcaacttcctactgattgatggcaaagttgttgtgtgcgaccttgagacatgttgtgcagctgatgggcaggcttgtgatcaggacttgtaccggctggattgcttactgaatagcagcagttgagcagctgcaatagtagcaggggtggtagtggcgcgttgtgcttgtaactctctggctggaggcagttttgggatggcaaggcgggttcagcatcagggttcagcactctggcccacactgagtgcctctattgcatccctgtgtgcctctattgcattgcctctattgcatgactgtctgcctccattgcactaaatgtgcatctgttgcacacagctagcccctgatagcatctattgcattgagctagcatctaatgcatgagtttaagcagctttcgcattgagttgaggggctgaaactgccacatcttgtctcaatctgcacatgccctccgtgtcggaatcacgtctatgaaagtctgtgaagtgcaatgagaaatcacctactacaccacaaacagccttacaatataaccgaggggcgtggcacagcgctagtttctctgcatgctctatcctcgtcaccagcacccacatcattccgacggcccgctgtagcgcgatttgcccaccaggcgagcgttgaatctataaagtgaatgcatgccagtatgtttgtggtgacgcatgtgtagcatcgccactggaggtgcagcactacagctcttgggcaagctgccagtggatctcactcaaaccagcaaatgcaacatcagcagagcagcgccaataccttgcaaatgcagtctgtcccttttgacggggacagcctgcttaggctcacatccgccctgcaaggcgcagtgccgtatttcactagcatacaggcgcaaggcagagtggagcggtttgatctacacagcctgccggaagcacagtttgggctctacaacagcaagcagcgcttatacaccagcgcttatacactatcatgaatgcacgaatcgccactggaggtgcagcactgtgctaaagccaggtggcaagtggctaaagccaggtggcaggtggcctagacaaggtcgcctgccagccacctgcctgacctggcatacccacaacttgtccaaaatctctgcttccctccaaatccaacgcacagctgatgggtgctgtctataatcaacaatgcttgattccagtgtaaaccctaaaacacaagagctgcgctgccgccaccatgcacagctcaacctcggacatgcatgctgctcagcacagccctactagtagtcagtgttaccacccccgcgtgcgatgcaaactgccttcctggcggcaatgctgttcatcaggttttggcacatggacagcggcatggaggcccaaatggcctgcgctgcttcccacattgcctccaggctagcatactgctgtgcatacaactgctgcttgagccaagcccatgcattctcaatggggttcaggtctggagagtatggcggccagtctgcaatgatgcgtatgtctttgaggctcatgaatgctgcagtgctcttagccctgtgcggactagcaccatcaagcaagtacacccactcatgcgcatccgctgcactgaaaatcacctcagcatcaggctgcaactcctcccacagcacatcctggaactcctctgcacccacacctgtgtgctgcaccttcaccttcagcttcttgttgtaactgaagtatttcttggggtgcccagtgctgccagtgacgcggatgagacgggtgacgccatacttggttacaccaccatacacatgcaactgcttgcccttaataggcttgcaggcaactggcttggtgcccttcttgacccacttcttgcaccggcgcggggtggagctcagagtgaggatgatgctgttgatggcaatgatgcggtaactgtcatgctgctgctggcagaacgcaacgcgtctcttcttagttgcgctggtcaagatgggctgctgctgcactggcgccaagtccaacgcattcttggctgccctgagcacggttttagtgcagatgctgctagctatggtgccttgctgcttgagtgctgctgatgcttttgctgctgactgatgctccagtactgttgttgctactgcttccacctggactgcattgagcgccttagggcggcctgaacgtggtaaagcagacacggatcctcgctcgttgtacttgtttagctgtgcctgcacgtatcgagtgggataaccgagagctcgtgctgctgctgccacgttccacttcttggctttgagggcagcgagagtagtctggcgtttgatttcaagttcagcagcagtgcgtctcttagccattttgtcaatgtgcaacttctgagctagcttgctgctgtgtcaagcgacccagaagaacaacagcagcagcagctgaacaggcagtgtcacaaataaactaacctttgtcacgcatttgcgccaaatagcgaggtttaacataaagaatacatcataacaagcacgttaacgtagccggtgcgagctgtagtcaccgcttcacgatgtgctggcctcacattgtcccctggtgacaggtgctgcaggcagccaggctgaaacctgcattggagtcacccagagggcattgcctcatcatcatcatcatcatcatcatgttacccattaagccatagcatcaacgccatcggcccagcgggcattgcctgtaaaatcaaaatgctgtatacctgagcacgtgacttgcaattataagactttctcgtcgattgtcagcgattttagcagcacagagcttacatccaagccatgtactgctgcagtgaagttgacatactgaactggctgctttggcctaatcaggcctgctgctgctgccacactgcaggcaggcaagaactgagcactggctggcaaaacccacacactaggtgccaacatactcgaagactggaggcagattctttcagcaagggggtgaaagtagaatggaaccacattgcatcatttcagcaccaacacagtggccatagtgcaagccctcaatttcctgcaaactgcagcagcagcattttgtgactaaacagccaaatgaatggcaggcacctctctgaggcagacaggtcaggccacatgttgcattgatgccacaattgcagctgcaccttgtcacattcagaaatcagccatctccaatgtttggttcaaagagatgtagatggggcatgactcaaacagcgacagtcgaatgcagcctgaggggggccatactcctaccaggcgacacaaagcacgacgtgctgcagcgcctggagtcactggtcttggctgtctccaagctgatgcggcgcggcagcctgctaggggcagactatgccatggagaagtgtacaagaagaagatgcatgcagcggctgtggagtttgtgactgaggtcaggcggcggctggggctgcctgatgcaggtgccaagctgacggagtcctatgccaagcgcaaccagcagcagatgctgctgtttctggcctggctgcagcgtcgcgtggaggcgttgggtggaaagggtgtccggctttgccctgtcttcagcgtgcggcgccagcatgtgcagatcgactgcaccacgctgctgcacatgctgagcggcatgcgcctggtgccagagcacctggtaaagcagagggcgaggcaacggactgggagggcgtgctggatctggtagccggcgtgtttgagccgccctgccctgctaagcagaaggggaagctgcagtggtggggctccttgtcaacagatggcgtcgcagccagctttgtgtacgcagacacaaggccagtctcaaagaagggcaccaaaactgcaacagcagcagcagtcaccagcagcagcagaagcaaagggaccacgggcgctaccaccccagcactgcctcctccccacgacttggctgttgtgggcatcgaccctggcaggtgcacgatcgtgcacgccgcgacccaggtgcagggcacccgcacgctggagtggacgctgccccgcaagcgctaccgcctaaagtccgggctggcacaggcgaggccaaggagcggcgttgggacacggccatgattggtggcgcctggaaacagatgaaccagcagggcggagcactgcgcagcagctctcttcagcagctgacccagcacattgcggcgtacaacagcgtggctgaggagtggtgggcatccgccatgcagcgcaagcgggccaagctccgcttccgcacctatggcggccgcaagcgctgcttggaccgcttcttctcaggcttggagcgggacgtgtcggcagccgagcccaacaagcgcctggccattgcctatggtgccgccacgttcagcccctccggtactggcaagcccgccacgcccacaactgctgcctatagagcggcactgcgcctgcggagctctggtgcaattgtggagaagcagaacgagtgccgcacctcaaagcagtgttgtcactgtcatggagatgtggaggcttgctggcagagcgtacggctgcagttgggaccagcaccagacacggacgctgctggtgctggcccctgcccatcacagctcagtgccagaattcaggtggagaccagtcacggacccacggtgccaaaggctggcgcctacctgagggggttgctcttctgcccacagtgcagcaagttcctcaaccgtgacaggtcagcagcgctcaacattcgcttcttgtttacacaaacacagctgctgggttgctctatgcccacacagtttgtggctcgtcgcaagcaaaagaagcagaagaagcgcaaccaggccagctgaaacaagctggtatacagagggccatgtccacttttgatccggccatgctgtagatgtgtgtgtgtgtgagaccacggccagagagaatgcattctctgcagctgccatcctatctgtcatcacagcacatgcacaaaaagcatcctgacaccgctgctggcaatgatgatcatggctggccttccatctgactgtctacctgacatgcatacctaggtctctctcgctctcgtgctcacctgtccgatcatgatccgcatctcctgcggtgggtatgctgctgctgcagcactgctgccaggctgcacaaggattgctgctgctgcagtgctgctgccaggctgcacagggattgctgctgctgcagcgctgctgccaggctgtgaagggattgctactactgcagcactgctgccaggctgtgcagggggtgctgctgctgcagtgctgctgctgttgcgttgccgcttgggtgtgcgctcggcgtcggtgccctgcaggcaggtcacaagggggcatggcacggatgttgtttgacaatgtatacatcccatatgatgcatgtcactggcgcagttgcaggtgtctgtaaaggagctagcattcgcacactgctagcagcaaacgctgcaagtgacatgaaaatcacacatgagccagttctacagctgccgctactgccccctgcagcccatgttgccttgtcacctacgtcatctaccttgcgcttgtgggcagccttgcgcctgatcttgttggtagccccgcgcatggcatcaccctggacagagcagcagcacaccatgagtacagcaacaggtaagaaagcaccacgtgacctggtggtgtgccagcacagtcagtaaagctgctctgcatatacatcccaagacacaaacacacaggatgcaggtcactggcacggatgcaggtgctccagtacgtgtgctgtttgacaatggtgcagacactactgctttctgtcaaagacctggcatttgcacgctgccagagtttgctgaactcagttgcaaaataccatgaccggcaattgccattcctctctacttctgccgctgctctgtcgcacctgcagctggagctcgcgtgctagaccagtatttagcagctccctggccttgtcatcagcaccaacgccagccagccacgcctcgctggccaggtctgcagcagcagcgcagctaccgaacatggcatagcggctgctacacagcaccacgctacaggcttggaagccgggttgttcgcacagcaggttacacagctgctgcgactccactggcaccctttgcagtggtttgtgcgtgcgcttgctgtagaacttcagcgagtcaggcatgggggcattgctgacatccagatgtgcgcgccgctgaaggccggagctatcgcgctcggcggcctcaatgctgcggatggtggtgttgaagaggccctgggtcaagtgacggtctgggccatcctggtacagcgcttgagggcattcgaggacaatgttgctgcctgcaacaagctggttgagtgccgtgcagctgctgcactcccagtcatcgtcagggatgcaggcaatccccaagcatgccatgtgaagtccttggaagcatccctcacatatcagcatggtttcagggctgtcctgactgccgcatgctgtgcagcttgtgttggggtcaataggctcccctacagttccctctcggttttccatagcactgcaatgatagccagcagtagcaaattacaccggttggtggtggagcagctgttgtgcaggctgggttgcagcagtacagcagcagcaggtggtgtggtgagaacactcgttgatgggtcgctgctgcagcgaagctgcgccgcttgtaatctatcatgtagctgattgcaaagcatagctgtcacagagttgctaagcagcccaggcactgcagacacgtctgatgccttgatgacaagctggcatgttgcacagttgagtgaatcttgcattccatgagcgtgtggaacattgcgcatgtgtgcgtgccaggaatggcagtgcctggagtctgctgctgctgctgctgctgcaacagtctcacgctatcagctagggcaggcaagcattgcaccattagggatgagcagatcattgcaagtgcattagatgctagtgcattgcatggctgctggggcaaacgacaaacaaaactgtccgaatggctgaagcagccagccgacgcccgcactcccacaactattgcaactccgaatgtttatccgcatccgaatgaacttgcctcgttgccagagcaatatggcaggaggcggaaggccagaatggtgggttgtttcgctgcagcaccggagactggttgttttaccgtgtgtgtcgtctactgcgaacgtgcactgatggtggaaacagtcgagaggggcggacaggcgaggaaatagtcgagcgcagccaaggatcaagatgctcttggattgtccttggacataatctgtgcacttttcagcaacacccaaacaacttgctggatccctactgaatgtgttcaaaaatagccaaaaccgtagtccgatgctctttagagagctttgcggcgaggcagccaaactagtgcacagcctctttaaagagagacttttctgggtctccaatctctaagggttgacagcaggggctgaatggctgttctgatagtagcagcgacagcggcagcagcatgttatttttatgtccgctttattaaggtttaaaggacagattactatgggcagcagcagcagcagccatttttgcagcaatgaatgagtgcagcagtatcggtagttaatagcattagaactgtcagctagctaatgatagctaatgctagataacgctagataatgctagataatattatgcttttgagtgctgctctttggctgttcaattgcaattagtgacaggtgccacaccatgcaactggttggtgtggagtacagcagtacctgctgggaacgcgcatgtgcgtgtatcgtactgcaaaagtacgtgtcagtgcaagcagcagtggggattgtgggctcagcagaggtgtcaccagcacaggcaggctgacatcctgttacataccacgcagcattgacagcatacttgagcgacgatggagcaacgttgcagtagttgttatgggcctgatgatggctaccaagccgaaaccggtagtcctgtaatcaactcattgcgttcgtttgctccctggccagtgtggttgttgcaagcttcaaaccttatccgacaatcactgcacttgctggggttcaaccccaaccgcacacccaccacgtgtggaacactggacaccacatccgtgcagatctggccagcataccccagcaaactgccgttgaacacagcaactctgtgcatgtgcggcagcacacacgcaacggctcccagccaaaggcaccacatgcagcagcccacaccagccacgccagcactggacatgcaccaaacacgtcagtgtatgtgagcttgccatccatgataatacgatcactcattgtcccatcacggttttggtcaggccgagggttacggttgaacttggtgcgcagcccaaacacctgcactgacacaatcttgccgtcctcccaagccagatcacataaaccaaacggcaagatggggtggtttttccacctgctgtcataagcatctacacgatcccgcgtaaggcacataggcctccaacccaagtagttcagcatactgagcgtcatgcgtgcaaaggcaggccatgcagcattcttcaactggcaatgcccataagccgcccattgcagcaacagctgcaggcctgcatccaccaacacatcatcccacgcgcttttggtgttgcgcacagtgcggcactcaggaaagaagtcgcagtgcacatccaacacacgctggatgatatcacgctgagaggcatgcagtcgcagcaccatgccgacacctccaccaacagtgccaactgccatgaaaatcagcacatgcgacagcatcctcatgtaagactccaacgtgctatcagacacagcagtgcggcggccactgtacgtgtaaaagtgccatgcaatgtccgcccatactgctgcagtcagtgcaggatgcgtccaacgctggtcaaacatgcagtgcagcagcaggaagtcaaagaacatcctgatgacctgcaggtacttcatccagctcttcacattcgctccaggacgctcataccggtggcggtcaccgcgattgcggccgctatggcaggcagcaacaccgcgagcgatcaaatgagcctcccgctccgcaacagcaaagcgctccctgcaggagccacacgcagcaacagcagcagcagcagcaacagcagcagcagcagcagtcagcagcagacaaccaagcatctcaggcatgcacaaaaacttccatgccagacaacaaggcagggctgcacagccaaaacagcgcctgagcgcgcgctgtgtatctggtgagcaacaagctagccgcaccactgcatggtgtgcaacgcagggcacacatgtaaatgtacctcacagcatctcgcacctgcctatgcgtcgaccgtacttgggcaggtgcatgcttcctaactttgcaatgccctaaaggtctattggcaacagagcagcagcagcagcagcagcagcagcagcacacacgcacaaccttggcacaacaatctactgctacaagcaatgtgctacagtgcctcgcagcttgcattcccctcactgtgtgaactcatcaagtcacgcacatctgcagagcagcacccaggagtagcacgcaccaagcagagctggcagcgagctgtagcaaacgcgcaccactattgcagctggcaagtccctctgctaaactccagcaggcaccggcagccagcatgcatggacgccctgcacagcacaaatcagtgacacctcagagtcagacatctgcgcatgctgccttgtacatgcccaccagtggagttgctggcacaaagcacacgctggtaacagcacccacttgcacaccccactgcaggcactgctgcagcagcatgcattactagttcagccccgttgcaaacattgtgtacgggttcaagcacactgctgctgctgctcttgctgctgctgctcctgctgctgctggtgtacgtgctgtatgggctccatgggccaagcctgctgatctcaacacgacagatgaaacgatacagttcctctgtgttctgcatttgcacgcagtgctgctgctgctactgctgctgctgccggtgcgttacccgctgctgtggcaaccgcggatgctcgctgatgcatcagcagaaactaccgcttccgctgtacctcacagcccctcgcacctgcctatgcgtcgaccgtacttgggcaggcgcatgcttcctaactttgcaatgccctaaaggtctattggctgttgctcgcctgcgccaccaccagctgtcttttttgctgcatgcatgccacgtggcttgcaagtgctgctcagctggatgccctgaagcacgtgcttgatactcgctgctgctgctggcgctgctgcagccgctggctttgatgccttgctgctgcgtgctgccttgtgccgtggccgctttctgccagcaccaacaatcggcagctccttctgctgctgctcatcttcctcctcctcctccccctcctgtgctgctgccgctgctgctgccgcctgctccccctgcccatctaccaagccctctgcgtcttctgcctgctgctcttcaagcacctgctgcatcgctgccttgcccctgcgccgcttgcgtggagcagccgctgctgccgccgcctgcccatccaccaagccctctgcgtcttctgcctgctgctcttcaaatacctgctgcatcgctgcctggcccctgcgccgcttgttgttgggtggcgcagccgctgctgccgcagcagcagatgctgcgcagccagcagttacgcctgcagcagcggcagcagcagagacgcccagcactgcaacgtcctctgtgtgaccactcagcacgtgctccagtgtggtctgctttgcatactgctgttctagcatggcctgcagcgccgcagcctgctgtggatccgtgtgtgctatgaactcaaagcctgtccatttcagacaattgctgcttactgcctgaaggagggtagctgggtctgcatatggaaacattgtgcagaggcaggcgtgccagtcgctggcagctgctacgctgtactctccagtcaccccattcagctgcgcataccatttccactgcagagagtaatccgggttcatcactgcaagcagcagcaggttgcagggatttggttagggcaatgcagcaactgcttatgatgtacaaagttgcatatggtgccttccattcacctgaaggatccataggtgtagctgctgcaactgatgacagctgcagctagtgctgcatcaggtcgccagaatagcccgatcctacgcaggtgcaccgaccattggttagcaatttaaatacaagggggcacaggtgctatagagcgacgagaagcgagatattgcggactttgtgcatgttctgagaatagctaacagccgcggtgctgtcggtcagtttccgttaacggatggggatttgataccagccaaatttgacacacatgcatccacactggcctccgtcagccatttttgcctgacattgaggggcttaaggctgcccttatgatcaaaagccatcagtctactgacagtgacagtcttatggctgtggtgataagctatgcattaaactgtccgatagcgttaagcgttatgccttatcccttcttcttttctactcccggagaacgcgtttaagcacttgcgttgggtcccagcttgccacacttcaagtagcactcagtgctgcttgactgttttgatgcatgcggggtgctctgctttgtggctgttttgatgctctgctttgtgactgttttgatgctctgcttagtgactgttttgatgcatgcggggtgctctgcttttgcagttgtaatgcttatagatccttgatcaacagtgcgccatcaatggttgtgtttatcgttgtttaatactggtttgggttgcattctgccgtctcatcgtacataacatggtgcaccttgtataatcaaagtaactcgttgcccggtaacccggcccggattacccggtaatggcatctcgctgtggcactcgtactataggtgaaatgcttggtaacataattatttttgttctcctatgaggatactctcttcagtcggcactggcatggtaggctccagtgcatcgcacaccccagtaactgcccgattactgctgcgatcaggcaaccctgttaaagctgtcacgtgagcatgattcacagatcaagctcaagcgtgcgaacaaacactccagtcagcacgaggcggtaagagcgtaagaaagacccgacaaatcacaaaccacactacgccaattcagcacagtcagagccaagagcaagtgacagacagtaaacatcatgtttgaggcaaaggtcaaaagaggaaaacctgcagctagtctccggccccagcctcaacgtgtagcctgtacagcaacttgttcatgtgctgaccaggaccgtggctgctggtggtgtttggctgtcctgcaggaaccctgctgatgtgagagggcgcatgatgacgttcacatatgtcagcgccatcagtggcatctgcgcatggagcttcctggcggtgcagagagcatcttccagcgcatgtcggtgagtattataactgccttgcagtctttggtttttgctcatgcctggaggtgcctgtgccgaaagatgtgtggcagcttctggttaggctgtctccatggcgctgggtgtgcactttttatcactattctgctgacgtcaacagcatgcacctattagcccataaccagctcttcgcattgatcctccttgcatattttgccccctcctcgcgcccatttcttcatgcttgcaggtcagctacgcagtgttgaccttctacttcctgatgccgtttgttttcatgagcatcttcacgagtgacaagcgcttctttgcagcagacacagcagcgcgcctgtaccaccccgcgcagtactacctttccaaggtcactgtcacactgccgttcaacatcatcgtggccatcgtgttccacctggtgtgttacggcatggcagggatgcggcactctgcagttgcaatggcagcgagcggcctgatctgcgtgcttactggcctgatcggcatgcaggtgggtagctttgtctgttcctgcaggcccattgtgtgtccaatcgacattgtgccggtgtttagcttctgtgcttgcttctgtagctacattcatgtatactaacgcctgcctacttacagctggctgtttgatgctaaagatttcttactgcttctgttttgcctgcaggcggtctactgctgcgctatcatggccagcagccaagacttggcctttgtctacgccattggctggacagccctcaacctgctggtcaacccttacatgtcattgtttgaccagcacagtttgggctggggctggtcatggctgcactttttcagcccctgcagctttgcttggcagggtctggtgtacatcgagttcaacgggcgaggctttgacggcaacttgggagcaggaacggaggcgattggactcatcccatgtgagtacacacgcgtatctgatgtcatcttcacggtggtagatacgcgttatcatctttcacagtgctgttgatgtgctgctagatagctgtagcagcagtgtcgtgcatatggtatgacagcaacatcagcagcttccaaggcaccctgttccagcatctacgcttgcaggaacccagccagcactgtgtttgccgtcctgtaggctctgtggaatgagcctaccagtatgcagcaatctgtaaacacaaccgcactgacccgctgctacgtctgctgctgccttcctctgcgctgttacctgtttgtatctgcagcgctgattcccagtaccagctcattcaacgtgctgcgtaccaacctgaacaacctcggccgcctctcaacgggcggccagtgtgtggccagtggcaacgccattgttgagatgtatacgatgggcctgggctattggccgcttgtcggcatcttgattggctttta

SEQ ID NO: 145 - DNA, 15671 bp, unidentified
  misc_feature 1..15671: note = Fanzor polypeptide
  variation 6249: note = n is any nucleotide
  variation 10050: note = n is any nucleotide
  variation 11855: note = n is any nucleotide
  variation 13033: note = n is any nucleotide
  variation 13430: note = n is any nucleotide
  source 1..15671: mol_type = other DNA
cagagttccccgttggttcttcatcagcatcgtgttcatgttcaggttcctatacagcaacattttttaaaaattgcagctgtttaaagaagatgtattcacttttacgtgatccaccgccagatccagacttaacatttttttggcggccaatttcccttgtgaagcagccgcggatactcttccactttctttgtaatgcaacagctgaaagtaaattttaagttagattttttttttgcaggtatcttgcaacaggttgtacatttatggaactatattacaactacagactcggttatacaacaatatgtacaatagtaagagaagtgtgtgacgctatatgcaaacatcaaggacaatttataatattacccacaacaggaaatgactgggaaagcattgcaagaggatttaaaaaaaacaccaatttcccgcatggcattggtgccattgacggaaaacacatcagaataatccagccagtaaattccggatcactatactacaactataaacattacttttcaattgttttactcgcaatatgtgatgctaattataatttcacgtatatagatattggaatttttaaggaaagctcattttacactaacctcataagcaattctttaagtatccctgaggccaaaccactgatagaaaatggtgagaatattccatatacaattgtaggagatgaagctttcggactacatgaaaacctcatgagaccttacggaggacaaagtcaaagtcaaagtcaaaacgtttatttcaattaggccattaaacggcacttttgaacgtcatcgttaacagttcagtaaaataataatgtaacattaataaagtgactctactgtccattcggaaaagtagattcttatggagaagaacggacaagaaactccatagttactctttttaaataatgattttacaaaatttggtatacaacaattaatttaatactatgtgaggacgatgcacccagagaactaaactaactaaacaaagtatcaccagcagaggtaaacttattaatttcctaaagaaatttaggtaaattgtactcacatatttacaaacattggaaccattaattaaacaagtgtgtgagtcaacggaaaaataaaaacacaaaaaaagaaacagtatatctataaagttaatacattaatcaaccagtttgaccttcacccttgattgtcctatggagcaggaccagcatgtttccaagcattcttatcctgaatgtaatcttctaatttgtaatatgcttgttcacaaagtgtacttttaacatgagatttaaattttctttcatttagttctaatatgtcagaaggtattttgttgtaacatttaacacaataccccatgaaagaagtgtggactttagctaatctaaaaaatggttgatctaatttgtctttcaatctcagttacaagcaaagaatttttaactatcgtttatctagagcacgccgttatatcgagtgcacatttggtatattatccaataagtggaggatattccacaggccactgaatgttaatatagatttagcaaagaagattgttaagacaagttgtattttgcataattttgtacgttctagagatggctattcatatgacgatactttggtagtaacggggttcgaacctgctacagatcagaatcgtaatagaggagggagaacagctttaacagttcgagacaaacttgcagactattttgttaatcataacccactaccatggcaagatagaaatgtataagtttaacaaaatataaacaaaacattgcacttacatagttcctttttttctgcatttgtcatgtcttctttttctttaaaaatgttcaccatttcatcccaacatttaattttcaagttgcggtcagaatactctttcaatccgttgttccataaacacggccgattttcaatttctatgataaatctctcagtatcgaacgacattttgctctcagtacgacgtgcgttcaacgcggcgactggctggcgactgagtgagtgacggagcatacaaacacgtgcaaacaactggcggcgttgccaggtagccagcgtcaccagtcgccgcatgcggagcggtcgactctggctactctggctacttggcaacgccgccagtcggtcgccaagtgaattagccgtcatacatctcagtatgaactacacttgcgagcaaaagtatggaatcacttacttggaattgattccgcgcgatcttgagtacttaataactagttaagaataataaaaatggtaccattttaaaggttaaactgttaactttaaattgataccaaattcatttaaatcccaccggtattcaaggagctatcccagattaagtgaaggagttaggaaaacataaggataatggaaaaattataaaagaagaaaacaacaaaaattaattaataaaaaatttatttggccttaaaattgagtttcaatattttgtgttccctcccctcgccctaataactgctcgaagacggttcttcattgacctaatcagcttctgaatcgattcttgcgggataccctcccactcctcaatcaataccgatttcagctcattcacacttgaaggagcaggatttctggaacgaaccctcctcttcagttcatcccacacgtgctcaatgggattcaagtccgggctgagcgctggccagtccaatgtggcgataccgacttcttcgaggtattcagttgtggcacgggaagtgtgacaacgagcgttatcgtgcataaggaggaagtcagcaccgatatatcccgcataaggaacgacatgttccagcagaatatcggaaatgtagcggtctgaagttagaccacctcctcgtcccccgccaggcacgaaaacaagctccgttttaccgtcgaaagaaatgccggcccacatcatacaagaaccgcccccataagccactgtctcagcgaaacagcactgcgcatatcgctccccaggccgtctgtagacccgaccccttcggtcgctgccgtgtaaacacattctgcactcgtcggagaacaggactcgcctccattgctcaacctcccaatcaagatgggagcgagcaaattgaaggcgtgcttgtcgatgacctgccgtcaatttcgggcctgtggcaggcctttttggagtcaaattagcttgcttcagtcttcgacgaactgtccactcgctggcagctaccccacgaacatttctgagctcctgttggacgtcgacaccagtcaaatgtcgatttcggagagaggttgacacgataaaacggtcatccctctccgatgtgcaccggcgccgtccagatcttggtctcgggataaagccaccagtctcccgaaagcgtttataaactttcgaaacacaggactggcttatgtggagctgacgtgcgacagcccgctggctgagcccttcttgcaatagggcaacgatttgtgctgcttctgtaggtgtagtatccattgtcgtccaagttcaagggtcacaagtagcggagatgtgtaccggtcaacgtgtgaaagccgactgataaagaaaatccgataacacgtgcttttatagggggtctataggccgcaagtcgtgacgtatcaaacaattaaaacatatctttttccttacttcggcacgtaatccgggatagcttcttaaatactagcgtgatttgaatgaatttggtatcaatttaaagttaacagttaaacctttaaaatggtgccatttttattattattaacaaattatttactactcaagatcgcgcggaaccaatttcaagtaagtgattccatacttttgctcgcgagtgtagttggcaacgtcgctggccacgtccccatggcatctcggtgaggtatggcccttacagatcctcctccataagcaacagtttcctcgatgcaacactgagaataactttctccagggcgaatcagtagtatcatcagaatcatcatctaatttgcaacacctcagacaaacaaagttacactcatcatcagagtcgaaattgacctggtgagattttggtacacatttttggtgataacgtccttcacataatgaacagtgttgaggacagcggacaaatccagtaatgaaaaggcacacgatcactactaagatttattatcagtatatccacagattaaaactattacatttactattattatcatttattacaactattattcactagtttcgggttaggataactacagttcaatattatttctatacaaacctagtgcactctttcgtgtctggaagcgaacagaacgttaccatagaaaatgtgggcggaaacaattcgctttaaaaccaacatccggttccagaagtttctagaatgttcgaacagtttcttatagtgctgccccgtagtgtcgagaggcgagtactacgacagtcattcataattattacaatacccattcacaaaatagcgcctccagtgtcgagaagcgggcatcagtcgatatttatgcgtaagccattcattgataccgggcgccctctagtgatgaatattacaaacaaagatgtctcaacctcctgctcccgctacgtgacaacagaggacgctacttgtatatcagtcacatttctcccgccgtgtacatacaataatgtacataatttataccactagtgactggtatacacttcacaatatcaataattgaatgcaattaacaattcaatgacttataaagataacaatttagtacatacatatacatctatagagttaagggtagccactccagaatccttgctctgctatatattagatcaaattgaaataaaaaattctcctcctggtagcagaatcctggagtgacgcccagaaaaagagacacatatataagaacttattctactttaaataagtgtctacaaatacaaaacatacatgataacgacttagtttctactggtatgacgacgagacgtttaacaggacggcgcattacaccactcttggtcttgacatcgacgactcttacgacaccatctgcacctggggacatgcgttcgactctcccctttggccatatgtttcttggtaagtttgggtccactacgataacaaaatcgcccaccttgaccgtgtcgccgcgtccacgcggctcccgccggttttgaagcgtaggcagtacttcgcgtacccatcgttgccaaaataagtccgctagtcgttgcgacgctctccaatgtgaacgacgtagttcatccggccttgtgaaaatccctggcaacgggactttagagggcgcgccgagcagaaagtggttaggcgtcaaagcttcttcgtcgtctgggttaaccgatacatgggtcaagggtcgggaattgaccgtgtgctctacctctgtcagaagtgtgtgaagcacgtcttcatacggatgccgatcgataagtgtagcattcaatgcggtctttaccgtgcgtaccaaccgttcccaggcgccgcccatgaacggcgctcctggtggaatgtagcgccaggcgatgtgacgtatttctgcttcatgttggagagattctagggcggccttacggagctcagcatctgccccgtggaaattggtgccgttatcactccagatgacttcaggacatccacgacgtgccatcatacgcctcaacgcaagtatagcggcatccgttgatagcgaggcggcaacttctaatggacagcacgcgtagttaggcatgtgaacaatgccacaaagcgcttctcgtgatgtctcgctactgtgacggagagtggcccgaagtagtccagtcctgtgtgtttgaatggacgttgatggtgtgccagtcgacagggtggtaagtcgcctgtcagtggctctggcggcacggctcgacgtagtctacagggttggcaaagcctgattactgcacggacggatggccttaaacgtagaatccaatagcgttgtcgtatttcgttcacaatgcattccacgccgctgtggtgtaacattcgatggatccagtgtatgtacaagcggcagtaacggtgatcgccgtctagtactgctggtgactgtgtttctcgtgatatctcagctgctgctgcgatgcgtgagcgtattctcattatcttgtgctcgtcgactgtcagagataatcgcttcaaccggctgtcagctagtaacgtcctcccgtcgntattctcattatcttgtgctcgtcgactgtcagagataatcgcttcaaccggctgtcagctagtaccgtcctcccgtcggtgagaagacgcaattcatttgcgaaactttcttcctgtatagcacgagtccacaggagctcggcccgacgtgtgtactgaatgccaaggggtatgtaaaccgtcggtgttacgctgaggttgcggctctgcactccaggtcgcttccttgtaccctcccgttgcttcaccgtccagttcgggtcgtctacactaacgcctttgttgcgtttgcggttggtagctgttgtggtgtgaactcgaagtcggccgatgaattgaagaacgcgggcggtggcccggatgagtcgtagccaggaagagaaacgtgtgacgtcaggtagtgcctctgttaagttcgaccgttcgtgagcagcagcattgcttacacgctcctcacccgtgtcgacgtaggggtgtgagtctgtttcctgcgaccaggtgttttcgttgtcatagagaaatgaagggccgatgtaccagcggtggcttgcagtgaagtgagtcggtgtatcgcgagtcgagtcgtcggcgacattgtgagcggtggggacccagcgccattctcttcgctcggtgttttcttctaattccgctactcggtgcgcgacgaacggtttgaaagtgcgtgcgccggcgcgcagccacgctagcaccgtgcgcgagtcggaccagaagactcgacggtcggcgcgacgatcgtgctcttcttccacgcagcgtgctagtcgcccgccgagtacagcagcctgtaattcaagtctaggtatagatgtgaccttaaggggcgctacgcgccctttcgctgccgcgagcgacacatttacttgccctatgtcgttcactgaacgccaatatgctgccgcggcataggctcgttcgctcgcgtccacgaatacatgcaattctagtctaatcgagtcattataacccaggtgacagcgtggaatacgaacgcctttcagtatctgtagagcaatcaaccagtcgtgccatttacgctctagacttttaggtaggcgctcatcccaaccgatttttaaacgccaagcgtcttgcaatatgcactttgcttgtgtcgtaaacggcgcggctagtcccagcgggtcatacaaggacattgtcgtttttaatagctgacgtttcgtaacctgcttgctcaaagaagaagggtctactttcctgaagttgaatcccaaagtatcatcctggtgtcgccagataagaccgagaattttctcctccttgttgagcacagtgttctcaaccacgggctcggtcgcaagaccagcgacagcggccggctcgttggatgcccatttctgcaacacgaagtttcctcgccgatgtaccacgtcgactgctttagacactcggttcgcttctactgcgttgtcgaagctctgtaaaaaatcatccatataatgattacgtacagagttcactgcctctgggtagtcagcctcatgaacatgtgcattatgatttttgacataaattgcagtgctcggtgaagaggtcgcaccaaacaataccgctttcattctatattcgatgggcgttaaagtcgtatcatcgcgccacagaaaatgaagtgcgtctctatctttcactcgcaccgttattcgtagaaacatatcttttatgtctgctgaaacggcgacaggtttttgtctgaatcgcattaacacgccaaggagtgattgtaggagatcagggcctgtcagaagataatcgttgaggcacactccatgcgtgcgtgccgctgcgtcatacacaattctgaccttacccggtttagatgaattaattactggaaaatgtggcaagtaccacttgtacccgttagatggcgtgggtgccagttctgcatacccatatgataccagtgccttcatttgctctgaatatttttgttttacaatttggtctttgcgtaaacgggattcagtgttttgtagtcgactgagcgcggaggtgtagttgtctggaaaacacctatcctcatttttccataataagcccgtctcgtaaccgccttcaggcagagcgcgtgtagtttcctctagtatttttaatgctctcacctctgggtctgcttgcgggcgacgtggctgcactcctagtgattccaggctaaaatgttcttgcatgagcttttcaatagattcgtttgtacttacatgactgcaacgttctccgatctgtggtaatacatgaacttttgtcaggctgcaggttttatcatgtaaaacccagccaagcggtgtgcgtgacgctactggttgatcttttgtacctattcgagcttcagaagcgagcagaagtgcccaattgtcctgtcaagacttttggtacgccagcgtcatatgctagctgttcgactataggtgtcaggtgctcgaagcctgccaggtcattaacgcgtatcgactgaccagataattcaagtctgtcgatggttctggcttcaatgtcaatgccttcggttgtgtattttgcgttgcgagttcgtagcgtcaatgcgcgcgcctgctacggcctcgatataaaatggctcatttagacctgcgcctatccgctgcgcgacgtctgtagtaagcagagttattgtcgatccatcgtccaacaaagcaaatgtgtctactttaccgtatggtcccgatagtgtcactggcactactttcagcaatacttggttgtacgtgcgtggcgcgctcgtgttattgatgacggcgtgcagcgcgatgtcaccgcatggcgctgagtcgtcccgcgacgatacgtgtccggtcgctgtgacacgaggatgctcttctgggtcgtttgcggtgctcgatccccgtctactgtcactgtgcagtagccggtgatgataatgctcgcagtcttgcacttcacactgcttgcttttgcatcgatgcttccacgtccgtcggtttaggcacctgaaacataatttatttttacgagcagcttcccatctatcagttatcaacatttttttaaatttagagcagatagccacgctactgcaatcaccgttgcatactatacacggtgttttatcgcttcctactattttaaatgtcttgtgagccggttgttgtggacggtctcgtttatattccacctgtgctgaggcatgacgcgcattgagatcggcctctctatcaagaaatcgtcccaacactactaagccaggctctgcgtcacccgcagccatctcataatcgtaccaccggcttcttagcgtaactgacaacttttctaagatagcggaaatcatctccgggctatataaatattcagttcttttcagagcttgcaccgcggcaacagcgtttgtgaccttcgatgcaaacacacatatatctgtagggttatctgatactttaggtaactgacgtaatttatttaattcgtaggttattaatgcgttgggacgtcctaatcgagattctaacctttgcataatttgaacggccgaggatcctaagaataggcatttaactgcctctaacgctgtctcagggattttctgagacgggccaaattccctgcctctgtgtgagttgacgcagattcattatacgctgctttaaaatgcagccagtcgccgggatgcccactatagataggtaaatcaagttcatacctgctggcagcgggtttgccccgtgctacctctaacaacgcctgagtcagtccttgcagcaggctcccctcgtcgccacgttgcncccgacgatttttcacggtcagttcttcttcaccatgtctttgacctgcaagacgtgtggtggttctgatcatacgagaaaaagttcaaaaaagtgcaaggaatatttaccaccgattcgaaagaggcatttgagtgatgccggagccgaacttgagatatacacggtcaagcgaggactcgtttcctctctctgcccactcttggaatctgagaaaaaactcaagcttttgacagagattcgtcgtgatgtgcgagatctgtctcgagtctacatcgaacttggcgtttggctcaatttctacatgaaaacagcgacccaactgccctcgaagccagatgtgctaaatttcatctacgcaatgaaaggaaaaggcccctatgccgacgcgtatcgtgttatgtttggtgatagaaaatatgacgatagacttcgttcgtttgtggtccaagagatggccaagcagtacgagacagtgttacatacgaatattagcacgcacgcatacgctagacttgctcgttatttcaacgtaaagcgaaacgatccagctctctatgctgcgtttttcaagaaagacttgcccgaggacaacgaagagatacgtcgcgtatgcactatcatcaacgtggacactgttgggggcgccaagtggtggtctacgatacacgaatggctcaagattcaggcgaaactagaagacttcaagctctttcctcagccctcgcatggactcaagcacctcacatacacgtctaggggttggcacgaattgctgcgtcgcgtagatccaaaatctattacgagctactggacgcgtatcgtagatcataggcgagaactctggtcgccgtggttagacgttcgggtgtagtcttcaaactgatggcatcagtgttagcttatccatgatcgaatcaaaaaaaattcaaatcctataaaacgcccgaagaaaacgtatgatcgcgtcatcgcagtggacccctctgaggaggcatattgttgatgcagcatttatcagttttgtcacaaaatggtgaaatatctggatataaacatacgatatcttcaactaatcagttatttgctgcttaagaaacccacatttgtaactgatattgttttaagctgaacataaagacaattgtacgcttatagcgctataagttaggtaaaacaaggagtttattttcaatcatgcagaagtcagctgtgtaaagaagaaaatatctaaaatattcagtatctgaataaattagtaccatttcgtacactatgcagcttaaagaaaatatttcatctaatattcagcgttttgctgtttaactgctttgcttaaatatgttatacaggaaaatgcaaaaacttcagctactgtgcagataatagctgtttcaattacttttattcgaatatcgcttgtttagcagattctacgtatgattactattcagcttaaaaaaataccgcgaactttatactgaatttagtaagcttacaacattattttaatttaagaactctcttattcaaaataaagccataacatcagctgaaacacaaaagtaataaagcttgacactgcttattgtggtatattttcgctactatctggcttatgtgttggctgggttgtatacttatttagttagattaaggttaagtacggtagattttgacttcaaattaacatgattattatagaatattaaaaaagagaaggggataatctacttctacccatatcatttttaaagtttcccatgtatctatgtaggtagaggtaccaatctatggtttaattngatgtctcaacctcctgctcccgctacgtgacaacagaggacgctacttgtatatcagtcacattataggttttttttttgttaattattaggtgtggaggagagatacaaaaggatcgtttgtttcacttgtgcatttttttttattgatgttttgatttatattgaatagaagattacttttggaccactcactatctccaaaattttatctatgatttgagatctaaactgttagaacttaaatcatatatgaaattttggaaatttaagttttacatctttaacgacatttattatgacttgtcttaagttttttttaggaaagttgatcgagcggatgagccgaagttaggttggaaagcccaaacataactattaaaaagctacttttatacaggatgaaaattatagattaccgtaaagtaaaatagtacgctcggtcagtgaaacggcttcccaaatgaacacccatgttccttggtaaaagtggttcagttaacggaattaggtatgatatcttatacctaattcctttaactatataattttcatcctgcaatctatttttttttcttttcttatctttatatgttttctttctttctattcacgggtaaaagaaaacttcccatggtactactggattgcttggtagttctacgggattttttttcacccgtggtactactggtagtaatactggtaataatgtgactaaattattaggtattgatttgactgatagttttaggtcgttttaatgtttatttaattaagtacaaataaatgagagataaaaatattttttctcagattgaatcatgttgaataatgaattaaatcaatatctccaatcattacacttgcaagtgtaatgattggagatattgatatataaatgcgaaagtaactttgtctgtttgtctgtctgttacgcaatcacgcctaaactactgaaccgattttaacgaaatttggtacagatatagtctagagcctgagaaaggacataggctactttttatcccgatatacccacgggatcagggtttacgcgggtgaaaccgcgggcaacagctagtacacaataataacttcagtaggtatatactcaataatgtttaagttcgttccaatgtaaaggcaagtaaacaaacgaaggtaaaaaacggtangggcaacagctagtacacaataataacttcagtaggtatatactcaataatgtttaagttcgttccaatgtaaaggcaagtaaacaaacgaaggtaaaaaaaaggttagtaacgggtaaaatcatacaactatagtcatgtaatataactatgggcataggtagtacttattatactttgacattttgtgttaaataatgggaaagtgactccatctagcaaatttcccccctaactcctcgaccaatgaatgaacctggtgaaaagagcgtagaatctccagctttttcccccctaactcctcgaccactgaattaacctggtgatagcagcatagaacctccagcttattcccccctcactcctcgaccactgaatgaacctggtgatagcagcnatgaacctggtgaaaagagcgtagaatctccagctttttcccccctaactcctcgaccactgaatgaacctggtgatagcagcatagaacctccagcttattcccccctcactcctcgaccactgaatgaacctggtgatagcagtatagaacctccagcttattcccccctaactcctcaaccactgaatgtacctggtgagagaagcatagtacctacagcttattcccccctaactcctcgaccaccgaatgtacttggtgaaaggagcatagaacctccaccttattcccctctaattcctcgaccaccaaatgtacttatgtctcctaaaccacattattcaaaaaaagaaaacatgccaaacagtaacccttcatcttcaccattgcaaccgatgtctccagagacaacagaattatttaatattctagctgaatctgataatgaagaattcaacattaatagcaatgaaaacgctgcactaggttcaccaatttcttcggacataacaaacatcatgaatagtgatgactccgtacaggacccagacttcgtttgtcatgatgaaaatgaaatatctagcaataaaagctctgaaaattctgtatcattgctagcgacaatagaagaaggccctcaaacagcgatagaaatactggatgaaactaatatgtcaaaccataacacaacaaatctaatttagcaagaagatattgaaactgagccatcatccaatggaagacccaaaagggatagaaaaagatcatatggtggagtcttaagagaagatagaaagaagagaaaatataataacctaagctatgtgaactctatgaagcaggtagtcgatagtaaggtattcattgactacagctgtaattgtccgaaacaatgtcaaaataatgtatcaactgaacaaaaactagaagaatttaataaattctattcgtttggttcatatgttgctcaaaatatgtatttaatagcttgcgttaaggaaaaacctaagaaacgagcatacgtcacgagtacgccacgtcatttaaaaagaaacagcaaaacatatactcgtgaatattatttaaaaaatatcctagtttgtaaacaaattttgttaaatacacttcaaacatcatctaaaagaataaacaaagctctttgtaaaatgcggaataattgcctaaaagatatgcgagggctacaagcgggtcatatatatttcttatacttatttaaagattattataaaatccttcataatagctgggcactatgttggaacgaagtaatactaacaaatcgtttttctttgaatcagaaatattcatttttgaatcataagctgcttttaaattaatttgtgatggttgttttctttttcgtcgtaccaatttaagcttagcctggacccattctccttcaaaagatgctttaagttcatagaagtcactatttttagtaaatttaatcattgttaactcgtcagttttattagatccccattagtgtctttctggtaattaatggcttgctcttcagtcagtgctttcaagtcataaaagttactgaaatgcatctcataaacaatgaaagggttctctctgtttttagcatctcgtatcaaattaacatattgatctggtacgtatatggtccagtctttttagctctttttattgatttttcaatcagagaatgggcattatcaccttcattttgactatggccgctgattaaaaacttatggcacacagaatttatagctaaattttcgacagcataataaaacatgctgaacacatatctaaaaataaaaacgtattcattagaaattattataaagttaataattatatcaaaatattcaccgtcaaaaatttgatacgtaccgatttttttgttggccacaacaattatcactgtagaaagtaacatcagagtttggatgctcttccgcaactttctctagaaacttgtagacgcaagttcctatttctgtagaacctttagaaaccaagccctcacgccaaaagtaataagtagttgaatccgttttaatatttgttatctgaaataaagttaatattatttatagtaggtaatattaaactcctaagtcccaatgtcctttgtaaaggacgtccgaaataaagaattttgaaccatattaacatttttttattctattcctcaacctcattttgagacctatgttctctatataaaagcccgacgat

SEQ ID NO: 146 - DNA, 13235 bp, Mamestra sp.
  variation 1025: note = n is any nucleotide
  source 1..13235: mol_type = other DNA
ctgcgatatgagctaccccttgtacgagtaaccctgtcaaaaggcttaagccttaagcggttaatcataatgttgttttaaccctttcactgggttttaagtatagaacccattcaatgggttatccatattaaagagataaccctttcaatgggttcaagcttaaaacccattcatggggtttcatcatgataaaggtaacctcataaacggcttaccctttcaaagtagttaattcttaaccggggttgtacggtccctgactgaaacaccacccagcaccaactgggcgctgtttccactccaagtttagatagttaagatgtatctagacataatacatcttaactatctaaacctattttataattagaattacggggcgacatcgtcattgttgaccgagtccccttaaataaagattaaaaaaaaaaaaaaaaagttacaaatctgtcaggcgttcaattgtcccagattttcttcaggaatattgctgtttttttattattgatttttttatgttgttttatagtatataatttggttacaaatattaattacttttttaatactaaattttgtttaagttagacaaaaactataagggttaatcgaaaaattaacagtctgattagctcctaacgtaacaaaatgcgctaaaatacgcactattttgcatagttagctataaaataatatgtttcttatgagtattttttgtatttacgcagttttttactgaataaatgcgattttgaggtataagtaatttgttttattctacttagtaaacttaataaaactctgtaacgtttgtgtaatgtaactgacagaaatttgagtttaattctcacaaaactagattgaaatgctattaaaataaattacaaacttattctattgtattttccttaaaatttaatacatatagaagcaaaaatagttaaaaaccccaataaattacacactttgaaaatgaaagcttatttccattattggtacactttttcgcaaaaatgcccatnataaattacaaacttattctattgtattttccttaaaatttaatacattatagaagcaaaaatagttaaaaaccccaataaattacacactttgaaaatgaaagcttatttccattattggtacctacactttttcgcaaaaatgcccagtggcaaatgcatctctccccccacacccctcagatctagggactaagacgagcgagccaaaatagtttcactacctcgtgttaccagtcatcatcatcgtccacaactcgactttactcacagctcgatgtggcctctattttacttgtgccaattttcccccgatcctgtgctagcctcattaaagttttcatgtaggttttttacccgcgatggaaatggatggctgaaatctacaaatttatattttgattgtttttttaaagccttgcctactcagggaagtagtcttggttgtaagtttattaaaaaaagtggtgtggtaacagctaggtctaagaaaaagccttacgtccataaacagttataaaattcttttaaacttttaattaggtacgtatttcgaccgacttttgtacctagtgtcatattcgcactaatgagaaagctcaaaaataaactaaactaacttgtaaactatctagttgaccgagatttgtacaacaggctagtgcccgggttaactatttggttagtctcagcaacgcggcaaaaacataaaaaaacaagtctatgatttttctaaaattgtgcttttctatttatcaccaaaaatgttcttgttcaaaacgcatttttatttatgtttccgcattttataaaaccggtagaagacttagttctgtactatcggagatttttataaatgtgtgatacgaagcatacctacgaacagctacctataacatttttgtgacccggtttaaaatgtggcagggtatacacaaattacatcgccacaagttaacaaagtcaaaatacttgattaaaagatgatatacctactttttgtccgtagcaataaagtaggttctatttagcatttcgtcaagtttttatcatactaacactctgtatcacatacctattgtgttactgagaaaataagtaaggaggctctgagatcttagaccataagaagttatgtcaatttgacataactgttttttaagggttcgtaaaggacgtccgaaataaagaattttgaacccatttttttaatctattcctcaacctcattttgagacctatgttctctatataaaagcccgacgatttttcacggtcagttcttcttcaccatgtctttgacctgcaagacgtgtggtggttctgatcatacgagaataagttcaaaaaagtgcaaggaatatttaccaccgattcgaaagaggcatttgagtgatgccggagccgaacttgagatatacacggtcaagcgaggattcgtttcctctctctgcccactcttggaatctgagaaaaaactcaagcttttgacagagattcgtcgtgatgtgcgagatctgtctcgagtctacatcgaacttggcgtttggctcaatttctacatgaaaacagcgacccaactgccctcgaagccagatgtgctaaatttcatctacgcaatgaaaggaaaaggcccctatgccgacgcgtatcgtgttatgtttggtgatagaaaatatgacgatagacttcgttcgtttgtggtccaagagatggccaagcagtacgagacagtgttacatacgaatattagcacgcacgcatacgctagacttgctcgttatttcaacgtaaagcgaaacgatccagctctctatgctgcgtttttcaagaaagacttgcccgaggacaacgaagagatgcgtcgcgtatgcactatcatcaacgtggacactgttgggggcgccaagtggtggtctacgatacacgaatggctcaagattcaggcgaaactagaagacttcaagctctttcctcagccctcgcatggactcaagcacctcacatacacgtctaggggttggcacgaattgctgcgtcgcgtagatccaaaatctattacgagctactggacgcgtatcgtagatcataggcgagaactctggtcgccgtggttagacgtagatatgaaaaagttcgggtgtagtcttcaaactgatggcatcagtgttagcctatccatgaatcgaataaaaaaaaatcaaatcctataaaacgcccgaagaaaacgtatgatcgcgtcatcgcagtggaccccggctctcggatcccagtcgccgcagtagaatctaaacgattacagtttaggcgcatcactaaaaagtatgtgaggtcacatactctcgagtggaagcgcgaacgaattcgaaacaaactgtgtcgagtcagcgaggaagctgaacaaaaggctcgagaaaaactaacctttccagtttcatcaaaaaacacgattcatgtcgtagagtataccgttttccgtatgacttggttcgacgtgcgtcaggagccctacgaaaaacacgcgaaacttactaggctcggactcgacaaatatctacgtaccgcgaaatgcgaagaaaaaataatcaaggaagtttttgatggaggtggcgtcgaatctacgttggtcttgtatggagctggaagtaaattcatgaatacggcgtcgttcagtggccgaaaattcaagcacgactcgctaatcaagagattgaggagcaagcgcaacatcgacgtcgaagtcgtggacgaaaagtacacttctcaagcttgctcttcgtgcaacgcaaaaactggagtttcagaagatcgtcatgaatcataggctacgctggggggtttgccgaaactgcaacagcgagtttgatcgagacgctaacgctgcaaaaaacatactgataaaccatacaaggtctgccatctgcaggccaggatgttccacgagtggagcatcgtaaccttctagatattgtaactcgacgtcaataaggttcaattttgtacttgagctttgttgaggttgggatttaggaggttaagggttctgaaatcatataggtactaattaatatgagactgaaatatcaaagggcctatattacgacctccgaatagattctaaaatggaaaatattgtacatggaattatctagtcaattaacgggaacttaatcgtaggtggtaaaacaggccataagaatgcttgttgccatggtagttacccagagccttggactagaccgttagcctagttttaagtcgcacaaactaaacaaagttaataaaaaaggatttcaccatcaactttaatgactttgattacaactcgaataatctataagttacaagaaagtcaggacattaactcttaaaaaaaatccgtacggaatcgttttcagtttcgtttaaacaaccctcaactccgcgccttcacacgccagggaagtataataaaagtgttctttttttaggaaatgtcacaaccaatgcacacagcagtaacagttggagagtcgttgaataatctcaatcgtcacaaaaaaacacaatttcacagttacaatattagtaagtatttattaactttaactgtacaaagtcaacaatattttctttgccttgttcagtgtaaaagataaagaagaaataaaataacattgtcccctaaataatttatcatgccatgcaagttctacaaacttgtctaatagtagaactctaataagtacactcactacttgcaaaagtggcttgtgctataacacccatccccgttttattttccgaaacgatagaattactcaccacagtgtagttaccatttattaagatacaacgcacaatctgataggtataattatttacaatacggctaattgggatgtatcaaacattatcgctaggtggttttatttagaaagagtaaaattgaatgttgtttttataatcatttctcctgatattacagaaaattatcgtctacgaataatgaaaatgttcaggtacccacctagcacctaaatagaaaatttttgatacgacgtatataatgacgaatcagaagaagtttggatagatttacacattgataagattaagtaaaataccgctgtttcagcaagtcaatgttcgattttgatacaatttacagattaagtactaaaatgtattgtgattattcgtttcaactatctatagtccacaatgagtaatattatattaacaacacatttttaagacaacttcataatatttgtcacactgataataatatgtaaaactaattaatttagtctagtaattttacgtcgtgttcattctacaatcatgttctactcggtttattgggattaatagttcacatttatctttacataataaattgaatcaagtataataagggaatgttcggagaacttgcttcgctgtttacccaatttcgtaaaattacaaattcatttgcatgcaatagtttgtcacactcgtgaattttctggacactacattaataatctcgctaaacacttatcaaattgtatcaacgacattaattatatcgttcatggaacttaaaacgcgcgaatgctacaatcacacttttcttatttgtctgtattcaattcacataaaattagttctgcgagcggttcgtgcggtatttatttttgtatgacctaccccggtattccggggcaggccgtgggtactgttaaatcctgtcttgtatgaaggggtgcgccaggcagtggttgacggaggcccgcttggcggggtcgagcatgagcatacgctcgagcaggtccttcaactgcgcgatcttcttagcctcgggggtggcgaggcggtggtgcggcggcgccagctctgcctgcaggtcccgcgtcggctttatacttgaaattactacaaccttttcctgtaatgagaaaacgaaaaatgattattatcgataagtatgaaaaaaatcgaaatacagaatacattttcaaagtgtgcttggatggccaaatccgaatctatgaggaatatcgaaaaacactgaaaggagtcttgagcccgattttgatgaaaactaaaagtcaggtacttaacagggaggtcaagaagctgattaggcgcgacactcggagcgcaaatacccgattcagtgagcaagccatagggcagaacaaaggctcgaaggtatttgccaagcccaatacctcccgttgtcacctgacgaaactcagaacgtcacagggcaccaccgtcacctcgaagccagagatactcgctgaagtcgaaaagtctacggagacttatatgctcagaaaacatcccaccgcagcccacggcgcggatgatccacgggccaggcttacacgccatctcacagacgagcttcccgacattgacatgggtgagattagaatagctctcggacaacttcataacaataaagctccaggggatgacgggataaccacagagctgctcaaggcaggtggaacacctgtcttgacagagcttgtaaagctcttcaattccgtcatccacactggcataacaccggaggcatggcgcaggagcgtggtggtattatttttcaaaaaaggtgataacacgctccttaagaactaccgccccatttcactcctgagccatgtctacaagctgttttcgagggttatttcgaatcgtctcgcccaaaagtttgatgacttccagccgccggagcaggctgggtttcgaaaaggctacagcaccgtggaccatatacacacccttaggcaaataatccaaaagaccgaggaatataatcagcctctgtgcctagcgtatgtggactacgagaaagccttcgacaccgttgagacctgggctgtcctggaggccatgcagagatgtctcatcgactgccgctatgtcgaggtgatgagatgtctgtataaggccgcaacaatgaccgtccaagtacaagaacagagcacaaaaccaatccaactgcgtcgaggtgtaagacagggagatgtcatctctccgaaactttttacgaacgcgttggaggacgttttcaagacgcttaattggaaaggacggggcataaatatcaacggtcagtacatctcgcacctccgatttgcggatgacattgtcatcatggcagaatctctgcaggagctggaagggatgctaaacagcctaagcgattcttcaaggcgggtgggtctcgggatgaatctggacaaaaccaaagttatgtacaatggtcatgtccccccgagacttgtaatcgtaaatggcgctaccctcgaggttgtgcaagaatacatatatctaggccaaattatacaactggggcggcacaactttgataaggaagcgaccagaagaatacgcttgggctgggcggccttcgggaagctacgtggtatctttgaatcgtcgatcccacaatcccttaagaccagggtctttaaccagtgcgtccttcccgtaatgacttacggagccgaaacgtggacactcaccataggcctggtccacaaattcaaggttgctcagcgtgcaatggagagagcaatgctcgggatttctctggtggatagaattcgcaacgaagtcattcgccagagaactaaagtcaccgacattgcgcgtagaatgagcatgctgaagtggaagtgggccggccatgtctgtagacggacagacggtcgatggagcagacatgtggtagagtggagaccgcgtatgggcaaacgtagtgtgggacgccctgcggcacgatggatcgatgatttgaagaaggtggctggcagcggatggatgcggaccgctcaggaccgggatggttggcgatctttgggggaggcttacgttcagcagtggacggcaattggctgatatgatgaaaagtgcgccattggatttttttaaatcggtatttcgagccaggaatcgaaccggttcattttgaaaaaaacaaacagcccgtgttattgcaccatccgaaagtggaaagtaaaagcaaaaaaaaaaaacacatggcaaacaaaaggaaggctcgcatttttatttattaaaaatgagagcctcagctctcatttttagtttcaactaattcgtttaaaataacagtttatgcccacttctttgacacaactcacaactaataacataacaattatacaatataattatctcactaaagtatacgcagtaacgaaaactcaccctttcagtaatcttgtccagttcatgatacatgaagttacaattcgaatcaaaatgctgctctttaaagaagcctttcttgataatcttattcggtatcttcccctttagatccataaaatattttaacatttcattatttgattttccactgaacatgatctttccagtggacagctcgaagatggtgcatgcagtggaccacatgtctattccgtggtcgtaggtgactcctaaaatgatttctggagatctgtagaaccttgacacgaggtagggggtgacttcgttatcgctcaagtggcctgccgcgccaaagtcgcagagtttgagcatcagtttgttttcatttacgagtatgttgtccggctttatgtctggaaagagagacgaaatattgatttgtgaaaaagccattaaaatatcggaacatgatatcagtattttatttagtttatttattggttaacaggccgaagcggccggagttgttgtgaagtcagatggtatgtacaatactagatggcaaagatactgcctgcgtttccaatatctaaatacatagtataaaacaaaataatcgcttagtgttaaaaaagcgacaaatgaagaagtttagaaggtttgtattacttgcacccgtgcgaagagaaatgtatcaacttcctatatcactaataaacccggctcttcaaaccggagcacagcaacactgctgacggaaaatatatagtaaaatactttcctggacaagctcctttacaaaatggacccactattaccaatcaaactcagtagatttcttacctgcatgcaaaatcccagtcttcttcagcagttttagagctaaaagcatctgctgcgtataacttctgacggctttgatatgtattccgctgttcttgccgtattttttgaggacctcgcgtaggttcatggaaagaggttccatgaccatgcacaagtgtcttttgtggaagaaatgacggaacaggcgcagacaatggaacttatcttcgggatcagcgtcgttcaggcgtttcaggatctccaattcacgaagacctgtcttgtgcctgtggaaagagaaaaaggttattctcgtcgttagaatattgtatagattaaatgttagcgtaattcttataggttagagagcagtcactataagctggtactagtttatgtagtctggtaggagggtctgtattggaggtttcacgattgcaaaacaatatcatttttcattcaacaacaatatactttggtttggtaccaaaccaaagctctctactttttagctttggtaggtcgcaaacggctgacgaaagcaggaaacgactctacgaagagcaggctgagaaggtgggtacctatgtctgcacgcgaaaatatcatagttcgtggtgctgggtgtccccgaggactaaaaaccctgatgactcccgagcgccaagtcttaattggtctggaaccggagtcaggcaaattccagggtcataatggcagattctttgatgccattcaatggatccaagacacgagcaatacccgaggcaacgttgcagtgaggttcgagtatggcaacgttaggacctgaacccattgggccactccccattggatatctatgcaacctggtgaataaacacaccagagaccaacaaacactacaaagtaagggttgactgtggcaagtgtagccaggccacgacagaggcccttcgactacttaactagggttgcgtacacgtcacaacagttacaactggccgcaagttcctctgggtattactggtacaatccgtcggatagtcaggacgcagctggcctttctggatgagcaggagtggatcttatgaccaacctatgccacctgtacactgaagctatgcatggagttgcggaaaccaggaaatactagtaatcagctgaatccggttagtctggaagaccccaatatagtcgggaaaaggctaggcagatgatgatgatgacatggagttgcgaacaccaggccgtcatgctattgcatgtagtcttgtgtagttcgcgaacgaactacactggacagcaaataaaccgagccacccgctacctaggcactaattcgattttctcaaaaactaaaaaacctacaattatcaaagttgtacctacagaaagtgcgtttcatggtgattaaaatgaaagaaaactcattgggtttaatcaatatttcagtgtttattaaggattttacaaagaagagtcgttttccagtcgtgacaatcgttagtaatgataaagtgaaaaaaaaattaaagccaaaaacaaagataaaatcaaaaaaaaaagtttttgatcaatattccgtatgtccccttgctcggataactgccagcatccttgtattcatcgaccttaccagcctgacgataaaatcttgaggaattgtattccactcctcttaaattgcgattcgcagctctggaagccttgttggagcaggtacccgggctcgaacccgacgtttcagctcatcccataagtgttctatcggattcaagtccgggcttcgagctggccagtccatcgtacgaatgctgacgtcgcgtagatactgggtcaccacatgagcaacatgaggccgtgcattatcatgcatcaattgcatatcctgtccgatatatcctgcgtaaggtaccacatggtctgcgaggatttcagtaatgtagcgatgagaagtcagtccacgtgtacggcccgtcggttcgatgaaaactaacgctgtatgtgctgttaacgagatgccgccccagaccattacagatcctcctccataagcaacagtttcctcgatgcaacactgagaataacgttctccagggcgacgatatactctctgacgtcgatcacttccatgtagactcaccctggtctcatcagtgaagagtacattactccactgctctaatgtccaatccctatgctctcgagcaaattcaagtcgtgctcgacggtgtgctaccgttaatgctgggcctgttgcagctctttttggggtcaggttccgttcagcaagtctccttctgacggtatctgaacttatgaccacttggcgttcgtcacgcagactttgttggacttgaactgcgttgaggtggcgatttcgcagaacagtaaggtggatataacgatcatctgctgctgatgtagccctaggtctgcccgtacctggacggcgatcgaatgctccagtctctaggtatcgtctgtaaactcgttgcaccgaagatctgctgattcgaagccttcgagcgacttcacgttgcgcaatgcctgcttgaagtaatgctacagcttgagctgcttcccctcaggaagcagctcaagttgtatccattattaatcgaaaaaagtagcaaaaacacacgcgtctgagcaaacgatggacaaaaactaaagaaatgataagaaatatccgactatcctcattgtagagaaaaagaacgctaatttcaaactctggtgaaaacagagcaaatcgttagcattgtgtttgttgcttgattacaatgtgagttgacggtactttcgaattaatttgtagtcattttaatcaccatgaaacgcacttttgtaggtataactttgatagttgtaagttttatactttttgagaaaatcgaatcagagttcctaggtagcgggtggctcggtttatttgctgaccagtgtagttcgtaagagcgctccaacaggcgaactacgcgaactaggtctcagattcgccgctctttagttcgttagttcctttgaaattaccgaccttatagtattgcgagagtgagtgcgacctgtccaaactagttgcgtcgccgctcacttactcaataactacaagctactatttacaaatttagaataaaaacgtcatttagtattttattttataagcaattttctacattgaattaataaaacaattgaaataataagagtgcaacgtatgtaaagtaaaaataacggcaaaatagcgactttacaaacagaagaacgcgcgcagcagcaaactgcaaagagcgaacgatctgcctatctctcagctcactagctcagtcaacccccgtctcgaaacattgaattgggagttggtggtgcactaaaagagcgaaccagtttgccaaggagctgcgaactaaaatgagtgctcccggtcgcgaactactatgtgcaagtctaattgcctgggtatgtagggtatccagtgatgatttatacatggaagaatggagtaagtagtgtcacagattattagttactacggtagtatactgtgtgtataattttgtcactatatttttttgactatgtagattttttttctactcacattatctcattattccttatgatcttgacggccacgtcgctgttgttgcgcgcctggtcccgggctcggacgacgttcgagaacacgccctgccccgtgtacccgtacactgtgtaccggttgtccagcatctcgccgatacgtactctgtggaatgtgaacattacggttacacacatttctctgtatgtttatgaatccatataaataattatttccggatgaaacttggtacactggtagatcatgtccgggatagggtaagtataggatacttttcattacggattgttctcttgggataatattcgactctcacgtgtgcgaaatcgcttagtttctaataaagctatcttgttttctcaacacaatattagaagtgttcgtcaacagcgtcgtcctgacgatatcattctagccctaaaggatccttgttctgcgtgactttttacactacatacaatttttcgactttcgacttttatcgtaacaaaacttttaaaagcaattacaatagtattgtagcaaagacaagatgtacacgtctattagcagtaaacggtgtgtggactagttaaattcaatcgcacttaaagcaacttttttgtgataccgattgg

SEQ ID NO: 147 - DNA, 20975 bp, Mamestra sp.
  variation 1..90: note = n is any nucleotide
  variation 16063: note = n is any nucleotide
  source 1..20975: mol_type = other DNA
nnnnnnnnnnnnnnnnnnnnnnnnnnnnnnnnnnnnnnnnnnnnnnnnnnnnnnnnnnnnnnnnnnnnnnnnnnnnnnnnnnnnnnnnnnccctgcgcacacagcgggcagtgagcgaagcgcggcgggtggtgcgggtggtgcgggcggcgggtggtgcgggtggtgcgggcggcagatgctcacgtgcgacgctgcacgaggcgcgcgtccctgcgctggcgcgcctgcagacggttcctctcgatgcgcgcgcgctgcgcggccgacagaggctgcgctgtgtcgtccgccgcctctggcgctaagtgacgctcgtcattagtctcgactgacgccatagtatgttggcccttaataataaaaaaacattggtcagtaaatatcctcatggacaagcattattagaaaatataaaaacaggctaacgccatttcaagtctactaaataaatgcattttctcaagacctttgttgttcctaaagtcaggaactcgtaacggttctgtgaggagtggttctttggagcgagtccaaaataatttcatttttaataaaattgctggttaatgagtttatgacatattaatttagaagcaccttaatattgtggtatgtacatactatttgcatttcaaaagtcaaatgttaaaagaataattaatatataccattacattccagcaatattaataaataatcttccattttctggtattgcacaagaggatatggagtgtttagtatgagtgtaaaacatacatgtgtttacagaacacaggctatgagtataaacaattttcaatttggggacataactgtataaaaaccaaaagttcgatattggcacaacattttcttgtttttattataattcgtggagtgaaagtttaactatttaaataatttatactttaataggtttatgtagttgccagcgtatacaggccattgtagaatagggtctctgttatccgaaactctcattcagtccgttttttggtttgatttctaactgaaatgtttcaccggttatttaaattaatttgccatttatagatatccttaaaattaaattttcttaataagaaggcacctttattatcctatacacaacacaatgattaaattatctgagcacaaagttgaaagtttaaacttagcgctaagttacttatccaccacaaaacactttattgtactgtgaactgttctcatccaccactttttcaatcctgatgatttaagcttgtctataaaatgtatagattaagcactatattctttttatttgtacttaattgattattggagccgatttcaccacaacgcaattttatttaactttactgacagcacacttctaacactgtctgtcactgacatgtgccgacaagtttgtttttttttaattttgttcctgatcatggatactgagtctttaagtagcagtcttgaattttgacacaatttgttttgcatttaaaatgcggatgtaacaaattattatggtttttggagtatctggttgcaaatatatcgattcggccttctaagcaagtttcggcttaggtagtcaatactacaatcaaattcttagctccgagatcgcacctgtttcaattattccacactgtaccaatttacatcacaatatccactaggaatttccttttcaatcatatagtctaatctcttcttctccctatcctggactatgctgatgccagctatcttgatctcacccaagaccaattggacaagcttgagcgacttcaaaatctctgtatcaggtttatatttggcttgcgcaagtatgaccacgtatctgaatttcgtactaagctcaaatggcttcctattcgccttcgtcggaatgcccacatactttctctactttataatgtacctactctttaatccttctactcctttctatcttaaagaacgctttcagttcctctgtgacacacattctaggtctttgagatcatcggagaatctaaaactaagtattcgtatgcattccacttccttctttgacaaatctttcagtatacaagcggctcgtttgtggaatgcattacccttagaagtgaggcgtgcccaaacgctaccagagtttaaaagaacggtgaaggagcattacctttcactttaatttttccgctcctgtctcaattatatatttgatatttattagtatacaaattggtattgtatttatgtattttatattattatatctaattagtattgtttaaaacgtttgtacactgacagccctaaatctatctcccttcgttcaatccatccaaaggttgtctggaagagattgccttgtgcgataagaccgcccattgtgcacttattttatgtatgattgtcctgttcttattatgaggtgtacaataaagtatataataaataaataaatagtggtcgagaggtatcaacatctcgactagcaatcaaatgatcaaatcaatatgaacggctctgatgatggtaaaatatgccctttttggaaatctgaaagatcaaatcaatatgaacggctctgatgatagtaaaatatgccctttttggaaatctgaaagtccacacggctcttctgagcccgtactgagctataaacttttcgccctcaatatggttgcccaaaaaccgtgccgtctccccctctatcatttgtcacgccccgcggggtccttaagaagcgcctgagcacataaattttgccgcttagatttcatacggtatgatcgcttgaatggaaagatagaaaaagagtttacgtacgcgaagtaagaccataaaaataaataaaattagaggcttaggtatacagtttggggaaatatgcgtcatagccgcgctaaaacggctatcgcagagtatggcaggacttaggactcgcgtgtgagacagagccatcatgatgctggttttttagcgaaatgttcttgtaagcgcggggccccccaatgcgcggggcccgtagcatgtgctactcttgctatatggctaatccggcactgatgccagtctacttgaactgttatattgccttatatgaaaaaccgcccaagaagtggcaacttaaatgaaagccacaataatacaacaaacagttcaatggaagctggtaatgcaaatgaaagccaggattgatgaatctatacctaggtatcatctacatctcacagcttatcgtctgaacaaaggcaaataaagagaaagactaacgttgaatcgttagttgataaactggaagacattgatgcagattatgaagagcgtgcgcgtagaacacaacgcgccatcgacccgggcctggtggtgatcggacagcaagccacccaaagctcgccgtccccaggtgatcccagcgatccccggccaccgtaggcgcgggcctccggtggctggggatcgctttgcgactcccgacgcccggggcgtcttcttctgtagcggcggttgggacgaaaaccttgtctttccctcgctccggaccatggatttaacaacggtcggacgcgagaagccgccgccgatcgcctcgacgaggacacggcggtgctccgcccaagcagggcagacctccaccgtgtcctccgggcgatccactacctacctaagtacttgcgagttggacggggtctcgtcgccgacaatattaatacctacgtcgctgctaggttgtctgccgccgtcaccccgcgccgcaccctcgtctcctactcttcccggcgggcgtattcaagtacaatacctatacctacctaagtttttaaagattaagaaccaaaaaaggtttcgtgaatgaaacggatgaaataggataggtaggtacttagttgttttgttatctagagcacatgagtagtcatgtgatctagagcacatgcatactacttaggtactataagtagttgtgtaggtatctatataaacttaccagccagacttcacacgaactccttcaagataagtctcaaatattagaagattcatttatttctcaagattaggtaggtaagtattatgttcttcaactatgttcacacacaccaatttcttgttttaagtaggtaggtaggtaaggtgagtgggggtaagtcggaatggatttttgatgagataaacagtgttgatttgaaactgttgtgaaacaaagggatttaagtcaaatgcataaaatgatgttttgggtaaaaaagtatagtcaacttgtttctataatattgacagcaatctttttgaaacaatattttatgaaaaaaacgttagtaaaattggtcttaagaaaaaaaatatgtaggggaaagatgaaacgctgaaggggtaagattgaaatagtgactaaaatcgtattcatggtcattatgcttgtgtggtgatcaataaaccttctgcttcaataacctaaataacttgaaaatcagtaacattcaaaaatcgcattctaaatgcaagaaaaaataatttatcaaataaaatatatcgatcttaccccgttgaaacggctggcagtcaggggttctcaacatgttatggatattaaaagaattaaataatcatgctcatgcatgactgtcaagtctaactcggatcgataaataaaacacacgttttcatttagtaccacgtagcgtacattataattatttttataaaataaacaacgacagcagaatacaattaaacattattaaaaatattatttcaaaggatagaggtaatacctaaacatcacagttaaataaaatcagtcggtaataagtactacttttaaaactaaaaataacctcttatcaaaaatatatttggctttatcagatcagttggttattccgcaaagcagaagtaagcaactacaatttaaaaaatcacgtactcgtatttttgcgtcccttaataattaataaaaaaaaaaaaacaaaaccaggcacttttgcctttataaacgttactaaacagtactattataatcactgccaaattgacattaaaattctagataattgtaaaaaacaccgttcatcagaacgcgagaaatcactgcatgttgatcctaaaacaaaaataaaaagttatctatattattatacaagttgaaattgcatatttagtgttccataccgtggatgatttacagatcgcaaatcaaggtctctttgatatttatgtataaaaacagaaatatgaaagaagcatacctacctaagtacagatacattaacacagttatcagcataaaatgcctgtattccccggagggtaaggcagggtgtatcttcttatcgtgttgatcaatggcattatattttttctagacactggtctataaaaaaaatcttccggtttgtgaggcaaagtactgacttcaccacacaaaccagaggtgtatagtacgctaatattttgccagctatgtttaagttgtttaaattaaaaaaatatttaaaactttaaccatggattcagttggtacataattctagacaccttaacgtagaatttattcatccgcctaaaaatcagctgtatacattggtacattttaatcgtgtaggtattgcacttatgtacagagcatctgactttttttaagccgtcaagcggtttaacactagagagtttagaattatgtactaatttcctgatacaagtttttgttacgatgttgtggaaggtataccacagtgtatttcaggttgaggacccctgaccttttgtaggagtttcgtaatcggggtaagatggaaagttttatattatcatcttaccccgtcaaattttgcaggggaaagtttgaaagccaccataactcttaaaatacgtgaaatataataatcaccacattatagagcatattacatttcaaatctaattacgaatatcaaaacaaaatgtttgttacttacctgtgtaaggagatacagcgagcggggaaagattgaaaaactcaattttacgcgggaaatgtaacgttcggagaaatgtcaaataacaccgcagactgcggggcggggcaagacaaaatggtgtccacaacgatattgccagcattaaaagaattccctggtattcggcgttattatactatttttatctttccccgttttttatcttacccccagtcaccttactatcatatgacctaatttgaattttactgacaaactttaaaaatggaagagtgatgaacaaatattttaaaatcatggttattttatgaagctgctgctagaatcttctccatatgagacaatgtgttaagtaggtacttcttttaacggctacttgtgtcgtcttgaaagtacctatgtgtgctatttgtatttatttcatagcaatatatgtaggtacctaaagctgttgctggaaagctgtggctcgcctccatgcgagagaactcttcaacggttacttgtatcgtcttgaaactctgtttgctatttgttgatatttcatagcaacacatagtaactgtgttatgtagctgctgctggaatcgtctcaatgtgaaacgattattcaacggttacttctaccgtcatgactgtcatgagtcatgacacattgtgtgctatttgttgtcattctataacaataggtatatacatctggacacatctattggcccaccttgtattttcagtttcgtttggtcctagctaaaattttatattaggtcgagcaaaaagtttttatgcagttttgaacggcacattcacaatttcattcaatagtcttttttttaatttcgaacacagaatttaaagaaacaaaagacaatttggagcctgtttgttgatttcaaacaatcgaatactaagaaaacttggttttattggtttacttggatttaattcttgaaaaagtgattgatatctttggttttgcaacaaacattacttattcttaacattaaggtgaggttctatcaataatctatggatacttcacctgaagtcgccgcccaagctgtggcacttattcaggccggacacagccaaagaaacgtgagtgctcaacttaatttaagtcgatctgcggtccgaaatgtttatcggaggtacctagagactggcggctttgttcgtcgccaaggaaggccacgatctcgggtcacaactgaaaggcaggatcgattcatcgtgacgaccagcttgagaaatcgtcaccttacctccattgagatacaaaaccaacttcgcgacttccacggagtatctgtgagcgctcgaactgttcggagaaggttaaaagaacgcgatatggtaccacacaagccagctaatgggcccaaactaacgcgagcccaccgaacagcgcgccttcatttcgcacgcagtcatttaaattggacacagcaagattggagccgtgtactcttttctgatgagtctaaaattgtgttacatggcaatgatggaaggaagaaggtctaccgacgtaagggagagcgtttcgcacaatgctgctttgaagagagggttgcttatggcggtggctcatggactgtctggggcggtatatccgcgagcggcaaaactcaacttgaggttgttacaggaccacggctgccaacattaaatgctgaaaggtacattcgtgagtgcttagaacctcacgtgataccatacgcggactatgtgggcccaaatttcctttttatgcatgataatgcaagagcccatgcggccggcatcgtcagggaatatcttcgggatgtgaacatcacagttatggactggccagccagaagcccagacatgaaccccattgagcacatgtgggacgagctaaaaagacgtgttagggctcgtcagccagttgcccagacgatgcaggagttgaaaactgccatagaagaggaatgggagatgatccctcaaaattgcatagagcggttgataaactctatgcctaatcgtatgagagctgtggtagatgcccatggaggcaacacgcgttattaaattaaacctttatttgataaaacatgttttttattcaaaaatcaattgcctttaacaaggcgcatatccgacttgttaggcgtagctccatgtcgtatggtattctgaattcaaatttaaaacaatacgatcgaaaaagatggtaaaatgtatcaggtttaaaactgcatcaacagtttttgttcaatctagcaatcatatttcggtaggggccatcgaaacctaaactctaaggtgggccaatagatgtgtccagaagtgtattataatcatggtgatatcacgagtatgaagctgttgctggaatcgtcttcatatgagacaatacttcaacgcttacttgtatcatcttgatgggaaattaatatttgctagtgcgagtggactgagatgtatgtgtatgtacatatgtgtcattcactttctgctgtctccgctcaatgcatctttgacggcattccaagcgttctcggttccagccgtggactgaaccacggtcggatagactaccctgcgacctcgctgagcattcctccagcgtatgctgcgcggtgtcctcggggtagtccacgcattggtgccaaacgggcttctgccaacccgacctatgcgacggaggtacctactttccaaagcatccgtccagtaagcacctgcgtcagccggaaactatgggcaccatgtcgcctatccagccatagatcaaccattagccatcgctttctgcgttcttggcaggacagcggcgttttgggctgttaggttttacgctcacactggcgccccacaactggcgggcggacggtccatggaccacacgatccttctgactgagatatccgcacatctgcccatcccgcgtaaatatacggacgtgctaaataaaccttcgcatagtaaaaaacttaaaaacgatttcaatatatttttaggcacgttggcggaggatagagctccagcgcgatcttatggcggtatggaaagagcaactgtcgcaacccagcgctgggcacgtcacaatcgtggcggaagaagtcccctttttgtagagaggttgaagaagcgccacagcgttctaaccttccgcctgacgcaggtcttcacatgacacggtagaacagaactcgcccggttgtcaccattgtgcggatcgtccggaggacacggtggagcatacggtgatattctgccccgcttgagcggagcaccgccgtgttcttgtaactgcgatcggcggcgacgacctctcgcgtccggtccggtccaatctatggcccgtagtgagagggcatgagaaccaatcaactcctgctgcaaagcactaatataagccgggaggaggcgagacgcgtgacagagaggcaatccttacgccccagccgtcgtaggtaggagacgccatgagcgtcggaagtagcagggcgatccggccacttaaggcggaagcgagacgcgtgacagagagatattcttaacgccccagccgtcgtaggagccgccttgggcgtcggaagtcgcagggcgatccgaccacctgagtcgcgggtctgcggacaacgaacgattcgacgggtcgacgacgcgtggcgttccacgcgcgcctcaaagatatgtcagcataatttagggggcccgttaaggccaatgccgggccaggattacgtattaagagttattttatgtatgattgtcctgttcttattatgaggtgtacaataaagtaggtatataataaataaataaataccgcggccctgaacgcaacgggcatttcagtacgggtctcacactccctcctgctccgcccagagcgggaatagtcatttgatgattacatatccaaaaaaaatgggtatggatctagagtataaaaacttcttgtctagtactgtgaatatgacgtattttagactcctaagtcccaatgtcctttgtaaaggttgccgaaataaaggattttgaaccatattaacaattttttattctattcctcaacctcattttgagacctatgttctctatataaaagcccgacgatttttcacggtcagttcttcttcaccatgtctttgacctgcaagacgtgtggtggttctgatcatacgagaaaaagttcaaaaaagtgcaaggaatatttaccaccgattcgaaagaggcatttgagtgatgccggagccgaacttgagatatacacggtcaagcgaggactcgtatcctctctctgcccactcttggaatctgagaaaaaactcaagcttttgacagagattcgtcgtgatgtgcgagatctgtctcgagtctacatcgaacatggcgtttggctcaatttctacatgaaaacagcgacccaactgccctcgaagccagatgtgctaaatttcatctacgcaatgaaaggaaaaggcccctttgccgacgcgtatcgtgttatgtttggtgatagaaaatatgacgatagacttcgttcgtttgtggtccaagagatggccaagcagtacgagacagtgttacatacgaatattagcacgcacgcatacgctagacttgctcgttatttcaacgtaaagcgaaacgatccagctctctatgctgcgtttttcaagaaagacttgcccgaggacaacgaagagatgcgtcgcgtatgcactatcatcaacgtggacactgttgggggcgccaagtggtggtctacgatacacgaatggctcaagattcaggcgaaactagaagacttcaagctctttcctcagccctcgcatggactcaagcacctcacatacacgtctaggggttggcacgaattgctgcgtcgcgtagatccaaaatctattacgagctactggacgcgtatcgtagatcataggcgagaactctggtcgccgtggttagacgtagatatgaaaaagttcgggtgtagtcttcaaactgatggcatcagtgttagcctatccatgaatcgaataaaaaaaaatcaaatcctataaaacgcccgaagaaaacgtatgatcgcgtcatcgcagtggaccccggctctcggatcccagtcgccgcagtagaatctaaacgattacagtttaggcgcatcactaaaaagtatgtgaggtcacatactctcgagtggaagcgcgaacgaattcgaaacaaactgtgtcgagtcagcgaggaagctgaacaaaaggctcgagaaaaactaacctttccagtttcatcaaaaaacacgattcatgtcgtagagtataccgttttccgtatgacttggttcgacgtgcgtcaggagccctacgaaaaacacgcgaaacttactaggctcggactcgacaaatatctacgtaccgcgaaatgcgaagaaaaaataatcaaggaagtttttgatggaggtggcgttggtctacgttggtcttgtatggagctggaagtaaattcatggcgtcgttcagtggccgaaaattcaagcacgactcgctaatcaagagattgaggagcaagcgcaacatcgacgtcgaagtcgtggacgaaaagtacacttctcaagcttgctcttcgtgcaaactgccgaaactgcaacagcgagtttgatcgagacgctaacgctgcaaaaaacatactgataaaccatacaaggtctgccatctgcaggccaggatgttccacgagtggagcatcgtaaccttctagatattgtaactcgacgtcaataaggttcaattttgtacttgagctttgttgagggtgggatttaggagttaagttagttctaggcctctgtagataaatcactcaagatagactgtgattttataaaaccagattaaaagccaagccaatacctacacatggaaatctatccgaatgaggacctgaatacacttgttcggaaaagctaccaatacgaggacttgtttacatactgtgtgggaaaaacttccatccggggacatacgtgtgaagattaacacacaagtcctcgcaaggtactaaaaacattagtgatgtgtaaatgtggtgttaaaatttaaattgacgtcacacggatcggggtgtgagcatgaattttcgcgaccaaacagaggtccaccaaggtcgaaatgtttttcttattaaatactagctaccggccgcggctccgctcgcatgaatgtcgaacatattcccgggataaaaagtatcctatgtgttattccagactataatctacgtctgtgccaaatttcatcaagatccgttcagtagtttttgcgtgaaagagtgacaaacatccatcaatactaacaaactttcgcgtttataatattagtaggatattagaaaggctaaaataaaatggagaatacgatgaattcgtatccgtcatccgaggacgtatgaaaaagtcctcgaatgggccctgtgtattcaggtgcatgtcctcgcatggcacttaaaactaaaacaagcaaacacacacacgatagacacgttaaacttataacaccccgtcgtttttgcgtcgggggttaaaaaataagagaaaaacgtattcttgcggaacattacctgctacttgtttgtttgactgttttattatttagcccgaaaatgtatggatgctgaataatgtcctttgagctagaagaggttgatggagtatatgttggtaggtggactactcaattagttgtttttaccattccccacatcttgacatgatacactggtgtgtgaatatgtaagtaatatatcctatcgtaattattcacatttcacaaaaaagctttgaagattcacctttttttaatagtgtaattgttttaccaatagtaaaatataaattattatatcaataaataaacctttcaggttaaagagctatcatacaaagacttatcaatataatatgctgtatattttcagccacaacacttttataggtaaataaatacttcaaaatgaaaatggtttgtataaaaaaccataaataccaaaatagaaaagtgaaatagaaacaacaatggtgtttttttttgtgtccacattctcttgctagaacagtgcatgaggcgcagtggactgacgctccttatacaacaactcccaacaatggagtacaacacaacatcagaaaaacatgctagttcaagtgctcattccatttagttcataaaaacatagcatcaaacataatgaaataaacaaatgcagtttcaattatgaagatattttacaattcttaaaagttaaataaacgttaattctacagcttgtgttagatagctttcaaatcttctggtaggtcattcttaggatgcttgttctcgaaatgctgtttgtaggtcttagggtcaggcatctgcgcctgaaaccaaattacataatattctgtttgagtaggtattatagttttcattatagccacaagtttatcttagttacctactgcaaggttactacactttacttcagtactgcaataatagtacattttgatgcgagtggggaaagcgagcccttatggagtcaagaaactgcattgacaaatgcccacgtgcagcagactatttctcgaaatcttatttaacactatttcgctaaaaatttaaaaaaaatcatatacctacataaaacaatcataaaatgtagtaacaaattattgcgaaccaactctagtaccacaaacacttcatttcgtgccttaggtatatatgtcaccggaaaatggcaaccttcgtaatcataatatatcttgagagattgtaaactctcgatacaattgtcaactgaacatttggaatacttacctttttatgcatcaaaatttgatagtcttattatctctcgaagtaattccgagaaattgtggactgacataaaatggcagagagcaagtctacaatttatccattttagtgtgatagcaaaactggaaacaagcctctcataggtctattcagagaataaaagaccaatgaggggccaagtttccaatttaactatcacgccaacacaaataaactgtagaccagaaagctgattggtcgccagtttgtcagtccacaatttcttcgaacgcagggagatattatacaatagaacattgtgatttgaataattgcagggcaaatttccatttgacaatttattgagagttaacaatctctcaatatattttgtaatcttaggtagtttgcaattatccggtgacatttacatataagtggggtaaaaggcacttttttgtggtttaaaaaacgaccgagtctatgtaagatctgatgtctcgccttagtataaagcaacattaacattaaaagtaccaactgacagcgaccactgcgcactcatattggtcaaatcgaatagggcgcgatcattggtcaaatcaaatagcacgcgcttcctcggcttcctgttacacacttccatcccatttcttttcattatatctcgcactccgccaatcgctagaatattgcattgtaacctggggtggatcagcaaaaactcacatgctgaaattggaacatgctcaaagggcactcctgaaggctttggtttggtaacgttggcggttaccttaccgctttcctaccatcgaactctataaaacgtgtacagtcctctgtgttcgcaaattgttcatccttaaaccttgttttatccacacaccctcaaactccatacgctccttgcaaatttgactcagcgacgtaagcatacggtaacgttggcggttaccttaccgctttcctaccatcgaactctataaaacatgtacagtcctctctgttcgcaaattgttcatccttaaaccttgttttatccacacaccctcaaactccatacgctccttgcaaatttgactcagcgacgtaagcatactgtctgtccatccgcacaaattgtcgttcagcccgacgtagcttccctttcctcagtttccaagatatgtcgataagaatgatcattaaatttttaaatatataagtaccctatgtgcagatcaaaatgtaaaaaaactgcattggattatgctgagactgaaaatatactaaatgtttaaaaataattttgattaccggtaatattcatctactcaactaatcttagatcacgtttcaccttctcaaccacacactctcaggcaagtgggtgctcatacccggtgccctacatgggtgttggggtgaggacttatattgtactcatggacacagcatttcaaagacacgcacttctcctttttgttttgtatcataaatctctccctctcagtacttttacaattttgtagtatagaagtgcaacctaatattttaattctaagggtgtgagcctggagatctgtcatacaggtcccgaacccagtatagactccagcctttgtgagaacaaaggtttgaatctgcctgtaacttagatactatgtaccaaattgtacctttttgagaatattattatttcaagaaatcactcccacagattgcaggaaagtgagaggatcaataatattatcaagcatgtcatgttttaattggagtgctagtatgggacctactttctttaagaggacctttcacacggtcatccgatcccaaactaggcagagcctgtgatatggcaaccagacaactgtatcagttgtctggttggttactgttggtttatcaacatacttatatatttctaaaaacatacatattatagacaaattacacccagacacagaacaaatgaatccttgtgaattaaattagcctagttgaaactgtttttgtgcatttcattgggtgttctcaccttcgaaccttgaaatccctgttcaccttgtttggcagttcatcacaataacctttaaaatttgctcacatgcatgtccagctcagtaaatgtaatctcaatgtttatctttcattattttctttgacaataaaaatttacaaaagaaaacagaagttttcaggatcaactttagaagctcaccttctcaccaaatattgactcaaaataaagttagaaaatggaattccaatcatggaatccaacaatacccttcatgttcaaatacaccttcaacccatattttatcaatatantccttgtgaattaaattagcctagttgaaactgtttttgtgcatttcattgggtgttctcaccttcgaaccttgaaatccctgttcaccttgtttggcagttcatcacaataacctttaaaatttgctcacatgcatgtccagctcagtaaatgtaatctcaatgtttatctttcattattttctttgacaataaaaatttacaaaagaaaacagaagttttcaggatcaactttagaagctcaccttctcaccaaatattgactcaaaataaagttagaaaatggaattccaatcatggaatccaacaatacccttcatgttcaaatacaccttcaacccatattttatcaatatagcaccaatagcttccggagtaaagttcatacaacaagtggtcaccttgcaaacaacacacacatggacgagggctttctgcgcagctttcttctggtcattggcactatggccttgctgtttcttcattttggactgtttctctgcagcttttgcctgtgattgaagtttctgctgcccgcgtgccatccttcaatcctgaataatataatgagaaaagatttgttttttatttgtacccgactcaaaaactacaggaccaattttaaaaaaatcactagtggaatgctacattatccataagtaaataggatatgttttattttcaaactagcttttcccagtgcctttgtacaattgtacatggcatattctgttttttcccattcctgtaaagcattctccatgaaagtggcaatcatatacaaaaagatttttccaaatttgactggtatttcaagagattagtgcattcaaacaatgtcttcagctttacttcattatattagtataatattgatgataatacaataataatgtactagtttagggagaacacttcgatatctacaaaaagtaagtacgaaatccaagttgcgtgcgaaaagctagtcctgaattaaaaaacaagttgttctgaaaacactacctctttacacaattactcgtaggtaatcattactcctgttcagattataatatatactttgaactgctcatacatctacagcagaatataaataaattgaaagaatgtgtgatttcgatattgtttactatcttcatgtttacgtcgacatgataaacattacggcaaaaagaggttacttctttcaacgtccacgtaaaaagaaagggaattgagcaagatgtaactggaaaacagctcgaaataggaaaaaaaatatagaagcagatagcgcagattatagtacctacgaagtccaatttaatatgtgaataattaacatatttgcagtatcaatgccttaaaacaccataatgaaagctgtcttacctttaactttccaacgattccactgattttaactgtcttcaccaaaacggtattgttccgtagttaacacctatgtcaacaaataccgcaaaccaataatctaaccgaaaaaaagataaaatgccaacagagatactgaatggatgactgaaatatggattggctgaaaattttaatggttgatgaaagtgtgagctgagaatattgagaaaatgaatcaagcaagtaaattgaacacagataactatttgtaagataccacacatacacttctaggaagagtggtaaataaagccggattcacatttactttagtttaggttcgagctagttagttgatttttaaggcgtgtgtaaataaagggaacgtgcacaacgaaggatctactatctggtgacgcaaatccgaattattaatgcaaattttacttcactttgacacttcacgttataaaataatcataaggtgaaaaaaaaaattaactaagtgaaaatgtattgttgcatttccacttcattgaaaagaaaaataactgatatggtgaaaaattccattactttcctacaaatagtactaattttacatggttatgtgacaaacgacaaaagtggataagtgcagtaaaaaaatatatacatgacataatttttgtggttttagcctacactgtcccacagttgggcaaaggcctcccccaagaccttcgaagtattcttttcctgcgccacctcgcatattataattatttatttatattacataattttaaaattacgtgtgtgtatgagtttcaaaaacatttacaaataaataataatgttatttgtttttaccagtaaattttcagccaatccatatttcatccatccatccagtccctatgtcggcattttatctttttttcggatagattattagtttggtgttgacatgaaacaatcgctaaaggtgcgctagaaaaggcttttaagtagtcttttatcaggcggaaataaggagcgtgtcttttacagttggctcatgtgggtattgatgtactctgtcgacatactcaaatggactcaaaccgaactcaacgccctggattggagggtccgtacactgctgaccgcaattaggatgccacccatgatcatcggtcatgcatgacttgatgagactgtacatcccgcggaagtatggaggtcgaggccttttaaaggctaagactccccgtctttgcctttgcaccaaaatatgatcgcagtggacaaggactgaacccgttgtccgggctacttatatataatacttactacagatattgcaaggagatatggaaaggaaaggagctttacgggtgcttctaccgggcgatgcagaattcccggagtccgtatcctggctacgttttggcgacctctttggagaaactgatggttttgtctttgcgattatggacgaagttatcctgacgaataactaccggaggcacattggcgatgcaaagaagacgcgcgaaaattcaaaaattcttcaatttggggacaaaaatctactgcaaatagcttcatttttttgaccgaccgaccttaacaattcaaaagtgcctgtaaatggttttgaattaatgccttgagttttgagttgagctgagttttttttgagttttactgattccccacaaaatctcctcaatttttttttaggaaatgaaaccaattacatcaaatttggtaagatttatattccttttaaacacctttaaatttctttttactctcccatatttttgtgaccaaccttgttgccattatcctatttttctgtaaaaagataaatttatatgggttccggcgatcgtcagtgtggccagaatatatcaaaaggccaaaaattcttcgatccgggcatgtcttaaaagtagaaggaatatgaaaatgcggttataacttgctaaattgtagctcaaacgaaggtttctaacgtttatagtgttaaaaacaattgctaagattttttttaactcatatttcacgtaaatatattgtctattatttatgttgactaaaactacataatttgaggtcattaaaatagtattactacatacaaaacttagcttcttttccatataacattttcaaaaaggtttttgaaacaacaacaaacaaccagggaaagcgagttctatttgaaggaaggttatagaattttacaccatttcagtttttctatgaagtgttcgagacgtttgagtatccagaaacgcaacaatacattttcagttagttcaatgttagttgtcaaacattgtttgcgtaaatgagctttcatcgtacacgttcaacatcaccaaagagtaatataatatatggagtgaacaccactttgatccaccaaatataaaatatgtcaaacataatataaagcacattatacgacatgcatcatctcgttagtcaccagtcgtgcacaatcacctgcaccatctaagattttagcaaggcaaaaactatggtgggcgccagataaattttcaataaagttcaatactcaatactttatttgcattccacttattatgtgttctaaggtggaaaatttaaaaaagaaattgtgtacattatggattcatggttcattgccctttccttaatgtctccgcgtaggtaccggacaatcaattatgaatcgcctttctttactagaaaaagtaacggattatgatagatgtcagttttcggaattagctatgtcaataaatgtatgagggtcaatgaccgttattgcacgtttatctggtgtcgaccatactatttgccagtttgaagcagctgttgagcaaactggtcgaacaacatataatttgagttaaccgtgaacaaaagatgagattatgatgaagtgttacgcaattggggtgcttaactgcactttgccgccgtatttcatttgagaaaagtcattgagatatatatatgatagtaatgaatatgtctatgtgaaaagtacaaaaatctcgtccattcattccagtaaataaatatttactaaatccgtgctcaaatagaatcatagacagattgtttctaactttctatattgccaccaaaagtcaaaatcacgaagctgtcaccctcctgtcactgtccaaaatatgtaaacaatttaaataacctcaaatcaaaataattcgtaggttttattattttagtaagctatattcatatatttttacgtaaggttctgggggcatatattgcgtaactgtatatcctcttgagtaagtataacatagacgaaaacagtttgttttgtcggttgccttatggccatcgtattactcgtccgttaatattatgggtttgcagcattgataaaattaaataatgttttgcacatgcactgaattagactaaaaatacgatttatattactgtggacgaaattatataggtaatctagatcaatgcagcgtatcactcgggttttctgtgccgtctgctcaccgcgggccttagcgaggacacgttcgaaggggtcacaagcaaacgg

SEQ ID NO: 148 - DNA, 20723 bp, unidentified
  misc_feature 1..20723: note = Fanzor polypeptide
  variation 858..1269: note = n is any nucleotide
  variation 2787..3411: note = n is any nucleotide
  variation 14267..15118: note = n is any nucleotide
  variation 16927: note = n is any nucleotide
  source 1..20723: mol_type = other DNA
ttcagttctgcttctgactaattattgaagaaagctttacccacatttctgagatttttcattgattactatttaatgaggcattgaaacattcaagtgttataacttatctttacttttcacagaggaattacgtgaccacttcagtgcatatggtgagattgaaagcatcaatgtcaagactgatccgaatactggccgatccagaggatttgccttcatcgttttcaaggcaccagattccatagacaaagtgatggccgccggagagcacacaattaacaacaaaaaagtggatcctaagaaggcaaaggcgagacatggaaaaatatttgttggcgggctcagcagtgaaatatcagatgatgaaatcaaaaacttcttcagtaattttggaaccgtaagttcaccttgaattgtttcaacagcttgattatttaaaataatgtgatgacaaatccggatttggtgagataatttcttcttgacatttactgaagaggaaaccgggccactgataataattataacatgaattagtgttgttgtgaagttgccaatttcagaaactaatctaacttcttcttgcagatcattgaagtcgagatgcctttcgacaaaactaagaaccagaggaagggattctgcttcataacattcgaatccgagcaggtggtcaatgagctgctcaagacacccaagcagacgatcgccggcaaggaggtcagtatggcatgtaggcagcagcaggaagccccagcggagcgggtgcagtgggcggctagtacatgaggtgtgttgcaggtggacgtgaagcgcgccactcccaagccggacgggcccggcggcctgggcggnnnnnnnnnnnnnnnnnnnnnnnnnnnnnnnnnnnnnnnnnnnnnnnnnnnnnnnnnnnnnnnnnnnnnnnnnnnnnnnnnnnnnnnnnnnnnnnnnnnnnnnnnnnnnnnnnnnnnnnnnnnnnnnnnnnnnnnnnnnnnnnnnnnnnnnnnnnnnnnnnnnnnnnnnnnnnnnnnnnnnnnnnnnnnnnnnnnnnnnnnnnnnnnnnnnnnnnnnnnnnnnnnnnnnnnnnnnnnnnnnnnnnnnnnnnnnnnnnnnnnnnnnnnnnnnnnnnnnnnnnnnnnnnnnnnnnnnnnnnnnnnnnnnnnnnnnnnnnnnnnnnnnnnnnnnnnnnnnnnnnnnnnnnnnnnnnnnnnnnnnnnnnnnnnnnnnnnnnnnnnnnnnnnnnnnnnnnnnnnnnnnnnnnnnnnngatacggctacggcggctacggatacgacggctacgggggctacggcggttacgattactccggatatcccaattacggtaaacgcggcaagcagtactagtatagtggcgagcccccgctagcccgctcaccgacacattacctcgactgatgttacctgatcctaggatacgaagtgcacgtagtagagtaaggcgctaggttagcgttgcgagcgaggcgcgactccgtcctcgagatatgcctatttacattatagtgaacgattatttaacgaggagaacgacatcacgcgaagcttaggtatttaatttagtgtgtaggaaaatatttatttttctatatatttaatgttctatcgagataatgtgtagtgaatgttgtcgaggcgacagtgtataatctgaatataatcgcagctctgtctaaattttgaaaaactaggattaatcatctcatataactttgctaaaatcatattaagttgcatattttgtttatttccacgaggagccgcttcgcgtattctcgtgcgtagatcgtagtgcagttgcccattcggctatcgctctttatcattgtttcaacgggtataaactatattctgtacatatgtatgttacctgccttatgtttataagcgttcgtttgtaataccacttttgacatatgtagcaatgttgctcgagtttctttaatttttttggtaataattttacctttcgacgctctcgccacatgctacatctgggaaatggggtaaatatggagagacattgtgaaagtgataaagatatgatgaagcttttgaataaagcactgttacaaaaattctcaatgtgtttccatatgtaaccctagtccacttccctgccctgtctgactcaccacacgcttcatactttacacttatcaagattttttactaattgcatgcatatatattgcataactacaaaattacatacgagtcttacactgtacctacataagaaagtttattaataaaaactttgaaagaacaccaagtataccatgagagaatgaattcccctcaggtaataaacattatatactagctaatatgaagttgcctatgaatggtttgcatcgcggtggttgtgcacgcgtcctcacaacgcgctcgcacctcgcagactcgtgtgctgcggcacctctgggtagatcctaaatcgtctcgtttatgtaggtaggtactcaaccaataccgttcgtaggtacgtcctggtaggaaacaggttgtcatctgtcagccatccctagatattgtaatcttggaacgctgctacggaccgctcagtagtgcccagtccctccccggcccacacgtagcgcgagacgatttacgagctacccctccgcccggccccctgcgggtcccgggcggccgaccgtacaataatgagtatacgtcgaccagtctccgcgacgtccaccgttccggccacgagcacgcgctgcggcgcgccggcgggcggagcggtggcggcggactnnnnnnnnnnnnnnnnnnnnnnnnnnnnnnnnnnnnnnnnnnnnnnnnnnnnnnnnnnnnnnnnnnnnnnnnnnnnnnnnnnnnnnnnnnnnnnnnnnnnnnnnnnnnnnnnnnnnnnnnnnnnnnnnnnnnnnnnnnnnnnnnnnnnnnnnnnnnnnnnnnnnnnnnnnnnnnnnnnnnnnnnnnnnnnnnnnnnnnnnnnnnnnnnnnnnnnnnnnnnnnnnnnnnnnnnnnnnnnnnnnnnnnnnnnnnnnnnnnnnnnnnnnnnnnnnnnnnnnnnnnnnnnnnnnnnnnnnnnnnnnnnnnnnnnnnnnnnnnnnnnnnnnnnnnnnnnnnnnnnnnnnnnnnnnnnnnnnnnnnnnnnnnnnnnnnnnnnnnnnnnnnnnnnnnnnnnnnnnnnnnnnnnnnnnnnnnnnnnnnnnnnnnnnnnnnnnnnnnnnnnnnnnnnnnnnnnnnnnnnnnnnnnnnnnnnnnnnnnnnnnnnnnnnnnnnnnnnnnnnnnnnnnnnnnnnnnnnnnnnnnnnnnnnnnnnnnnnnnnnnnnnnnnnnnnnnnnnnnnnnnnnnnnnnnnnnnnnnnnnnnnnnnnnnnnnnnnnnnnnnnnnnnnnnnnnnnnnnnnnnnnnncggtggcggcggactaatgtgtttgtgttgcgggcagactacggcgggtacggagggtacgagggcgggtacggcgcgcgcgcggctccgcgcggcaaaggtactgcactctgccaccttgcgctgcctccatgcttttgccgacttatgcccgtcgattcgagccgagtagcgggaaggggagagttaggccgctcgtacactacaatactttgcgttttgcaaatggtccgacggcactattttcaagcaaatatctcatcatccaacaaatgtatggatatttcacatctgaacagttacactcgtagtgcacgagcggccttaaatttcaattttggctaggctggcttcgacgaagcttgttcctgttcgatcggctgactgacattccatgttctcccacagtcatctcgtcatagtcgatctcgaagcttgtgtttgcgtcgattagtcaagtctcaactggtttttcttagtaaagcagagtttgtcgcggctagacaaaaggcatttgatatagtctgcaagagcatggagggagcatgactagctcgctgtagtgtagtgtgacgtctgtgtcgtgaggccgggggacgccggcgcggggactgcgctggcggctcgcatgacacttaactcgctatcttttgcttactaagtaccgtcgtaattgacatcaaaactgcggaaaaatacataattaataaccttattcatcactggcaaaattaactatttctaattttctaaaacgtttatggcctttttcaccacctccggacgagcgtcggttctccaattgtgttcatattaaaataaataaatttacataccccccggatactgaaataggccgttagtattatcgattggctatccagaggtgcatccgctcttatctgtcgtcacgtttgttctgaatatagacccgtgtaggtgtcgtgcgaccgagacgcctcacgtgtcttgcatccaagttagcattcgtgtaaatttatcaacttttaaccattcccaataaagtattgtcggcgtctgtgtatcattgcatgtgaggtttaattaaatagtgatagtaaataataacatttttttcctacccaacagcttgtgacaaataatctagaaccaaataaataagagtttagcgttacaaacaggtgacgttacagccgggtaccaaggcggcaagcaacgcggaggcggcggcggcggccgtgccaaccagaggcaccagccctattaactgtacctgccgatagtcatctcagtccaatagtgaggtgagcagtcttggacatcacgctagagctgatcatatatattttctaacactgatcacgtgccttagtcgaatgctatctaggagtccttttgatgcaacaaaatgtttctttctgtgatttttattggatctgtaactaatttagctgttatagtttaaagctagatgtgaaccctttgtaaaacgcagcttgttgtccgcaggttaagtcaccggtcatgagtgtcccctgcgcttctcgcctcgccgcgctgggggcacgtcatttcattccacataattaatttaaggaagtaattgataacattttaagaagattttttaagggtaaaatactgtcagttgcgatatagccgcgttcgtacggctctagcgtaaatttattataatatagtatggattatagattcactgagtattattgcagattgattagattcgtttctgaaatttgtctcgaaattttaccttacgaactgaacactagaaataatgagtaaatataattacagagcttataaaatttgtaacgatgtccctgtacgccggcgagtcgtgttggacgtgttgcgtgtgagtgatggtgtgtgtgtgtgtacgtgtcgtagagtcgccctcatctgtcacagttgttgatctggatctcattgcagaaatgtagttttgtactttaatttggtaaaggatcgagcaatcagaatcatgtattttatacaaattagatgtttcttccattgattagggatgaaattaaatttttagactaagtaatcggtcatgaacaaactggagatataccaagttgtgtatgtcagaataaaacaaatgtgtaaataaaatattgactttttgtctgtgtttatgtcactgagcgtttcatccgctatgtgcacactctcgcgtgcgagcagcagcacatctgatgtttagagaacatctaaatgttgatatttttagaagtacatgtaatgatataatttcttgtcatgtaatatacattaccatcaaataggtctaaaactcttgactggaattagttttattgttgtttcctattttacatcaccattatattttcgtaaaacaccaaatccatgaaggtatactgacacacaagcataccttaccttagtcttacttaccttacctagtgacctgctaaagaataattaattaaatgagtaggtacctactcagatatcttcataacaaaacaaagcagcgctgcaggcgcactgatgtcgtgtgcgattcattttcagttgcgtgcttagactgtttgtacgcattgtgacaaactgtgattttagtgtacattattacggtattaatgtaaccggaaaattgtaaacgccgtaacataaaattgctaactattttttcttaagacacgaagacattggaaactattgaatttggatgggattcattgtaaacaaaacgattttgcataatatatctagaaattaataacgatttattacaatcaaatcggcaattttccggtgacatatacaaaacgatttttctaaaatacactcgcgagcaaaagtatggaatcacttacttgaaattggttccgcgcgatcttgagtagtaaataatttgttaataataataaaaatggcaccattttaaaggtttaactgttaactttaaattgataccaaattcattcaaatcacgctagtatttaagaagctatcccggattacgtgccgaagtaaggaaaaagatatgttttaattgtttgatacgtcacgacttgcggcctatagaccccctataaaagcacgtgttatcggattttctttatcagtcggctttcacacgttgaccggtacacatctccgctacttgtgacccttgaacttggacgacaatggatactacacctacagaagcagcacaaatcgttgccctattgcaagaagggctcagccagcgggctgtcgcacgtcagctccacataagccagtcctgtgtttcgaaagtttataaacgctttcgggagactggtggctttatcccgagaccaagatctggacggcgccggtgcacatcggagagggatgaccgttttatcgtgtcaacctctctccgaaatcgacatttgactggtgtcgacgtccaacaggagctcagaaatgttcgtggggtagctgccagcgagtggacagttcgtcgaagactgaagcaagctaatttgactccaaaaaggcctgccacaggcccgaaattgacggcaggtcatcgacaagcacgccttcaatttgctcgctcccatcttgattgggaggttgagcaatggaggcgagtcctgttctccgacgagtgcagaatgtgtttacacggcagcgaccgaaggggtcgggtctacagacggcctggggagcgatatgcgcagtgctgtttcgctgagacagtggcttatgggggcggttcttgtatgatgtgggccggcatttctttcgacggtaaaacggagcttgttttcgtgcctggcgggggacgaggaggtggtctaacttcagaccgctacatttccgatattctgctggaacatgtcgttccttatgcgggatatatcggtgctgacttcctccttatgcacgataacgctcgttgtcacacttcccgtgccacaactgaatacctcgaagaagtcggtatcgccacattggactggccagcgctcagcccggacttgaatcccattgagcacgtgtgggatgaactgaagaggagggttcgttccagaaatcctgctccttcaagtgtgaatgagctgaaatcggtattgattgaggagtgggagggtatcccgcaagaatcgattcagaagctgattaggtcaatgaagaaccgtcttcgagcagttattagggcgaggggagggaacacaaaatattgaaactcaattttaaggccaaataaattttttattaattaatttttgttgttttcttcttttataatttttccattatccttatgttttcctaactccttcacttaatctgggatagctccttgaataccggtgggatttaaatgaatttggtatcaatttaaagttaacagtttaacctttaaaatggtaccatttttattattcttaactagttattaagtactcaagatcgcgcggaatcaattccaagtaagtgattccatacttttgctcgcaagtgtatatctaggaattatgatgtacctacttaactacctaggtaccgacataggtacctagtctagatcaggtaggtacctaatgagaattaaaacgggaactgtatagaacaaactgccgacttgactgcttgacataggcaatactcacatcgctcttcgatcgctacgaacaaaccaaaaaagcttttctaatatagctagctctcgacctaaagattactaggagccacctagtttatgagactgacgcgacgcttcctcacttatggaaacaagcaaaataaacagtaggtaggtaatgaattaccgtcaatcgtctgccagaaaaagtacctacctagatgtaaagatccttgtctctgtaacttctgaacttgtcgctagatggcatcgggtcggtgttaaataaggagcgtcttcatgtggcagcgcagaagagaaagtacttacctacttacctatctacctacctatttatacggaaaaagttctaaatttgcaaccctagatggcggtcttgcggaatttgttcaagagtcatcgcggccctggaaacgcaaagggcactataggaggtacacatgggtttttgtcagtcagagtgacactcccttccgcttagcccagagcgaaaaaagttatttgatgattcccacgttaaaaataacggcgtcttcgccgtgctcgttctaaaggagcgtcaagcgcaaacgcatgcgtctgtgtattagctagcgccttgcggcattgcagcacgttgttacctcagatttgtccacggcattttgatgcctcccatgtggaggcatcaaaatgccgtttctcaaatcgaaaagtaggtaacaataatatttcaaccatatttttgtttataatatggaagtatgtaggtactgtattctttttttgtaatgttcatcgttatttattttcaagtaaaaattgtgcagatatttttacttgtgaataacgatgaaaattatatgaaaataacactacattgaggtttgattttcgatactcaactcactaaccttaattaggtcgtggccacccgttttaattataagacgccttctcactgttggatgaagaagttttgtattaccgggtaaaatggcgtggatagaaatgcaggggtgaataaaaacgaaactttgattggaagtttgcagcaatgaggaactccaattattttatatttaaatggacgctttgtgagaaacaattaatatggcattaatgtgaaaatcccaataaaagtttcgtttttattcacccctgcatttctattcaccccgttttactaccagcatctctgattcatctgctagaaaagacatctgttgttaagatccctatctcagtaacttttcgctagatggcataatgccaaaagagtcaccgcggctggaacgcaaggggctttagaagaaacacggatcggatgggttttagtcagtaagagtgtgacacgcccttccgctccacccagagcggaagaagtcatttgatgatgtcccatacaaaaaaacccatttggataaattatatttatttttgtagataggttaaaataacatttgtacaccacattttttcttggtaatttttaactaggtgaggccggtgtttcctagctgactgccctgagaagaaacatcgaaacaaaactcagaagattgagtgccgcaaacgcatgcgtctgtgaattggtattgacctagcgtttcgcggcaaggcagtagggaacatgcacgaaagatggcagcacaagtcgacacgagagccagtgtggttaaaaaaaataaacttttcaatactgtcataaatagttacttactctgtgactgtcatcgtgttgccgtcaatcttcacattatattcgaatcttcttcttcaccatgtctttgacctgcaagacgtgtggtggttctgatcatacgagaaaaagttcaaaaaagtgcaaggaatatttaccaccgattcgaaagaggcatttgagtgatgccggagccgaacttgagatatacacggtcaagcgaggactcgtttcctctctctgcccactcttggaatctgagaaaaaactcaagcttttgacagagattcgtcgtgatgtgcgagatctgtctcgagtctacatcgaacttggcgtttggctcaatttctacatacatgaaaacagcgacccaactgccctcgaagccagatgtgctaaatttcatctacgcaatgaaaggaaaaggcccctatgccgacgcgtatcgtgttatgtttggtgatagaaaatatgacgatagacttcgttcgtttgtggtccaagagatggccaagcagtacgagacagtgttacatacgaatattagcacgcacgcatacgctagacttgctcattatttcaacgtaaagcgaaacgctccagctctctatgctgcgtttttcaagaaagacttgcccgaggacaacgaagagatgcgtcgcgtatgcactatcatcaacgtggacactgttgggggcgccaagtggtggtctaagatacacgaatggctcaagattcaggcgaaactagaagacttcaagttctttcctcagccctcgcatggactcaagcacctcacatacacgtctaggggttggcacgaattgctgcgtcgcgtagatccaaaatctattacgagctactggacgcgtatcgtagatcataggcgagaactctggtcgccgtggttagacgtagatatgaaaaagttcgggtgtagtcttcaaactgatggcatcagtgttagcctatccatgaatcgaataaaaaaaaatcaaatcctataaaacgcccgaagaaaacgtatgatcgcgtcatcgcagtggaccccggctctcggatcccagttgccgcagtagaatctaaacgatttcagtttaggcgcatcactaaaaagtatgtgaagtcacatactctcgagtggaagcgcgaacgaattcgaaacaaactgtgtcgagtcagcgaggaagctgaacaaaaggatcgagaaaaactaacctttccagtttcatcaaaaaacacgattcatgtcgtagagtataccgttttccgtatgacttggttcgacgtgcgtcaggagccctacgaaaaacacgcgaaactgactaggctcggactcgacaaatatctacgtaccgcgaaatgcgaagaaaaaataatcaaggaagtttttgatggaggtggcgtcgaatctacgttggtcttgtatggagctggaagtaaattcatgaatacggcgtcgttcagtggccgaaaattcaagcacgactcgctaatcaagagattgaggagcaagcgcaacatcgacgtcgaaatcgtggacgaaaagtacacttctcaagcttgctcttcgtgctacgcaaaaactggagagtttcagaagatcgtcatgaatcataggctacgctggggattttgccgaaactgcaacagcgagtttgatcgagacgctaacgctgcaaaaaacatactgataaaccatacaaggtctgccatctgcaggccaggatgttccacgagtggagcatcgtaaccttctagatattgtaactcgacgtcaataaggttcaattttgtacttgagctttgtcgaggttgggatttaggaggttattacccacttcaaaaaaaggaggaggttctcaattcgtcggaaccttttctactttgttttacatgttccccgattacctactcaaagatggctggaccgattagatttttttgttgtttgaaagggtatacttcccaggtggacccatgatcatcaatacaggatctgatgatgggaacctggagaaatagagagaactctttcaattttataggcacaagagtactttctcggagtggtcccatttcaatttggtaaagatctgatgaagaacttcggagataggcaacggaactcctcaataaatgatagcaaatggactgggattgctgaaatttcatgtttacaccagttcataacataacattacgccggcacgctgtgaagggcctaccccttcacagcgtgccggcgtaatacatgtaaagcactaaaaagtgaaaaaaaaaactttttacaaaaaaaatacaaccgacttccaaataactatacttgagttgttcaagttacttctatctctgtttgatgggcaaaagaaaacctatcctattcgaggcggggttttaaaaatgcaccccccttaaaatagacctgccggcgcccatgactggggtcaccactggccagatgtactttttctcattggccgcccatgcatgtctgctgtctttcacgcatgtgtgtgacttagcaaatagtttagttttgttttattttatttacatttctgttctctacagctattagtacaaacattgacactgtcttcacttgtttcgtttgtgaatattttataaacagaatccatttggctgaacccttttaagatacaggctagtcctagtttaaaagatagagactactattgcatcatattgtaaatattattttattcaaacaatgtatacatacagtgcaaagtgctatgtttttgtgaaataaatactcttacttacttatgtacttatatattttctgaaacttaaatggtgcagggagtatattctcgtttttcagaaagtgcgagcacaggaagcggatctgtcagagccccgatgatgcaactaaaaatgagatggacttcataatgtcgtcgaagaagcaaatattcagtgatgtgtctgtgattaatgtggtaaaaaccggaagcgatcacggcatggtaagaggcacattaaatttaaatatcaatgtcttgactgatgaaatctacgctctgtacagcacagatctaaacacaaagctctgagagtttgtagctcgaactgcagaatcgtttcgagtgcctagcgagctcagagcacagatacaacaatcggttcgtggcaactgtccatacagtcgggtcaacgtcttcaagacccgtcgtgcaaataagaccaattgactctctgatcctaaacagggtcattaaaacggacagtagtggcatattatgtgtaaatccgcgattatttgtggagattttaatattattattttagaaaataattcaaatagcagcagatttttaagcctttttaaatcgttcaatttgtctaatgtttttactgaacctactagggtaacaccaacttcttcaacctgtatcgataaggtattgtgcgattgtgagagtttccgtggagtttcttgcacgttcttctccatagagatctacgctttgcaacgtgcaaatagcttcatgtttttggcggactgactttgacaattcaaaagtacctgataatggtttacttgaaataaatgctttgactttgactttgaagagctctgccgagcatggatgccgtgcatacccctcaacaacttttttactagttagaaagaacgtgggcggcaattcctcaaagtgattttgatgaacagattaccaaatcactgtgggatacaattagggatacgttgctaataggaattaaagtaagaagccagcctggaacactagatttgataaaaaataattagataactttttatagttaaaaatgtacttcatccctcgacacttttgacgtgtttattttaaagcgtctaaataaaccattatcaggtagaagtacctgataatggtttatttgaaataaatgctttgactttgactttgaatatggatcgtaaaaaaaaggggtaacccagtactcgggttgtgaccaggacgtgtgcttctttcgattgtcttggagcgccattttcttttcgttacccaagtaggtacttgagcatcgggtagtttccaacaatattcgggtttttcctgggaatttccttagagacttgttgatttcataacgtcatcgccaagtgttccgacgtgatgtgacctgtacaagccctctagtgtcgataacggcgcagttgttatcagatgaagtgcgactgagtcaggggcactcgaggcgctccataagtatggacgccagccggagcccggcacagtgctgttcaagtcgacaacatgttcaaactactggtactgagttgtctgctggtcagctgcctcgctgaccccttcggccttccatcttggtgagttatataacttattgctattgttcttcagtcatttgaagaaactacttgacagtcacatacgccgttcatcgtaacggttactgccgagtcagttgtgcagcactttcatttattgttatcctttaatcgtacctatgccagagtagttctaaggatacataacggaggatacaaaaaggcgagctgaacacagaattttgcgcagtagtggtcgttcactatttgtcttatgtgtttgttggtaggcagctacttcttatgatcatttgtttctacgagtatttgcgtgttaaggcacacctttgggcttttaatgctcgtgctgagccgaagatcagtttcctcgtcaaagcacttgaacctccccccacgttcacgtccagcagagtattaacaaaaacaaaatgaatgagtacttagtgggaagtagaacgtttgacagtccgcaaagtgtgtctgatatcggggcacacttttgggctggtgtgtcgatgtgctgtgaaacttttcatccctcatcaaccagcaatacgattacagtnnnnnnnnnnnnnnnnnnnnnnnnnnnnnnnnnnnnnnnnnnnnnnnnnnnnnnnnnnnnnnnnnnnnnnnnnnnnnnnnnnnnnnnnnnnnnnnnnnnnnnnnnnnnnnnnnnnnnnnnnnnnnnnnnnnnnnnnnnnnnnnnnnnnnnnnnnnnnnnnnnnnnnnnnnnnnnnnnnnnnnnnnnnnnnnnnnnnnnnnnnnnnnnnnnnnnnnnnnnnnnnnnnnnnnnnnnnnnnnnnnnnnnnnnnnnnnnnnnnnnnnnnnnnnnnnnnnnnnnnnnnnnnnnnnnnnnnnnnnnnnnnnnnnnnnnnnnnnnnnnnnnnnnnnnnnnnnnnnnnnnnnnnnnnnnnnnnnnnnnnnnnnnnnnnnnnnnnnnnnnnnnnnnnnnnnnnnnnnnnnnnnnnnnnnnnnnnnnnnnnnnnnnnnnnnnnnnnnnnnnnnnnnnnnnnnnnnnnnnnnnnnnnnnnnnnnnnnnnnnnnnnnnnnnnnngcccgccccgcgacggcgcctcctcgccctaccctaccacacctgacgcggaagcttcagtttcagttaatgatccttcttcaacacccccggaacctagcgctgatccttctacatcggaagctcctcttccatctgaagtgccttcaactacaagcagttacagttggtgggatgactgggcttggggtcgtagataatgctgacatgtcataactggcatagcatttcctacttatatatttgttggttctttagctgcaaaattattccaatttctaatctgaaccaaatgattgaatgaaataacaacatttttttagaaaaaattctactgtatgatgataaaatccttaaaatccgagttttaacacgcttttggatgtacttgtaaaagttcaaaactattgtaagcaaaaactttgataaataaaattttgtttcaataatgtttgtattctttatttgattcttttgaacacgatgtagattatagacgtggacagaatagacatttgtcacagacaaaaacagtgacagggctacgggttcagggtttagggctcggcagggctcggagctcagcagggctgcgcgctcgccgtcgcgtatagtatggacaacgcgttgcagagcgcgcggtagttcacctgtgcaggaaacaacacgagaccgttagttagctgttatgctgggcttgtaggtattgtaatatgttaggggttagcgtgctgtgtcatccacgcccccagagaagattcgctaccgacgcactgagctcgaggatgtggctgcggctgtcaagaggcttgaatgtcttatcaacagcgcttaactttatatattataagaatatataaagttactaataatttctaaatacggtattgaaattacggtatgttttagagtttttctcgctttattagcttaacattaattgtggtcaaactttgaagctctctctaagttttctggacctattttttttttctaagggtgggaaatcatcaaatgacttcttgcgctttaggtggagcggaagggcgtgtcagactcttcctccgcaaacacttcacaatcaggtttagccaccaagcgagcattgagcgtggagagtgtgtgaaaaaagatcatccgcatagaatagactttttgacaactgacggaaggtcgttcgttgtacagtattaaaaacagaagtggtcccagaattgatccttgactgactccggaacgcgtaaggtaacacttgaatttgctgacgatcgctgaggtagtcagcgagcagccgcagacgacctggtggtaaaccggtagcgcatagcttcgcaaaaagaatatcattgttgaccctatcaaacgccttccggaagacaaattacaagacattaacctggcctctatggccttgaggtttaaatatgtagttttttttttctttgataccattttgctcctcgcactgatacttttcattcaaactcaaactcaaagcatttatttcaattagaccatttacaggcacttttgaattatcaaggtcggtcggtcaaaaagatgaagctatttgcgcgttccaaaacgtagatctctatggagaagaacgtgcacacatccttcacggtcactctttcaaatataatatctatttcattacaaagtaatggttacatcattaatgttgaaattaaacatatatgtgagaacgatgtaaaagacgtgaagaataaaagcgtccgaagaaaaaagaaacaattaaaataaaccgtggcagcccagaaattacctgtctcagctgacggcggngcagcccagaaatcacctgtctcagctgacggcggccgttcacgaacatgacgcatgcgctagcaccattcggctcaaccattttaaagggagccaaatgagccaacgcatgcaccaccatcagacagacttttgagtgagcatgacactcccaaccgccagagtacattcaagtcgaagacacccaaaactgatagttaaagtttaagtttaaggtaaactgtactcacgcatgtcccgttaatgcatgaaattatacaatgttaaataaattgagtctttataaagaaaatattgcgttcttacaatcttcagccggtccaacaatgtgctataacagattactttgtgggccctagtggctgtggagcaagaccagcattgagccaagcatttttatcttcaatataatcccccacctgcttgcctgcatagtgtgcgtttaatacaagatttaaattttgtctcaattagttccaatatatggggaggtattttattataaaattttaaacaaaaccccatgaaagatgaggctactttagctagtctgaaacttggttgaactgattggtccctatttctagtaccataattatgtctgtcgcctcttttactaaaaagaattctttctgacttatatgatgttttcgtaaatgtattgacaaggtaccgtcatgatgttcatattcttaaacagtttccttagagaatcacgcagccggagattgtatatggctttgatggctcttttctgcaggataaaaatagactcgatgtctgcagcccgtccccattgtaaaataccgtaagacatgatactatgaaagtagctaaagtagacttgtctcgcggtatcaacatcggtaaattggtagatttttttatcagcatatgctgctgaacttagccgtcctgcaggagatgctaaatgaggaccccattgcagcctagagtcaagcgtaattcccaggaaaaccgttctatcgacgaattcgactttctccccgttcaacactatgtcacaatcactacttttgacgtttggtaaggcaaatcttatgcacttcgtttttttcccatttaaaaccaaattataagcagtgaaccaattttggacctgcagaagggcgttattttgtaataaatatgttatacgttttcaaaaactttagctttagaatgaaggccttgacattttccattgttatgtgtgtgtgtgtgagtgcggtacctcctcgccgcagccacgctggtagccgaagcacttgtaaacgaggtcgcgctcgcgcgccgacaccagcgccagcaggttgcgctggcacagtgcgcgctccaccgacacgcgcggaatcgtgccgcacttctccttatccatgtcctgtacaagacaccaaatgttttaagaaacaaaaaattacactaagatgaaataatttcaaaaacagtgtcattaaaggttattaaatgagcagaacgtagcatttctaatattagtatgaggaacagttaggaaacgtggtggaaacaggaaaaagacaatatggcttggtttccaaaaccggctcacctcgaacacctccattatattggatagctggtcagggaacttggagagcttcttgagcgcgccggagacgatgttcctctcctcgaagttgaggaagttgagcggcgagtcgagcgtgggcacgtgcggcacgggcgccagcagcggtgcgcgctccagccccgtctgcgtcagcgcctcgcccaccgtgttgcagaagcgctcgtactccacgtagcgccgccgcgccggcgcgcagaacctgctcgcacacgcgaaataaacacgtcaaaagtgtcgagggatgaagtacatttttaactataaaaatttatctaattattatttatcaaatctagtgttcctggctggcttcttactttaattcctataacgtatccctaattgtatcccacagtgatttggtaatctgttcatcaaaatcactttgaggaattgccgcccacgttctttctaactagtaaaaaagttgttgaggggtatgcacggcatccatactcggcagagctcttcaaagtcaaagtcaaagcatttatttcaagtaaaccattatcagtacttttgaattgtcaaagtcagtccgccaaaaacatgaagctatttgcacgttccaaagcgtagatctctatggagaagaacgtgcaagaaactccacggacactcttttaaatcattttatgattacaaaaattctggttacataaaccttgttgcttctatatatgacaacaatgtaaagaaagaaaacacaatttatagtatcaaatattaaaattagccagtagcaactaagggatgaccagtctctactgacggcgcccgttcacgaacatgacgcttgcatcagcaccattcagctcaaccattttgatggaaactgaatgatccgatacacgcgccaccatcagcgagacattggagtgagcatgacacaccctcaactgcccctgctatttcatgtcaaacaaggaaactatctattaacataatggtccacggccctcacatttacagaacttgaaattaaaattgcttctacattgtataaaactatgaacatcaatctgaaaagacacaaaaacaaaagtttgttccaaacataatataagattatgtggaatagtattattattagacataaaagagggtgagcatctcttccaaatataaaacctaactagtggaactaagcggccgcggctgtggagcaggaccggcatttagccaagcatttttatcaaggatatacctaatcttccagttttttgtcatgcttgtctacatagagtgcgttttaatgcatgttttaatttttttctcattcaggtcgagaatctcacgtggtattttattatacaatttaacacaatatcccataaaggaagtgtgtgctttagccaatctgaatcggggttgatctaatttattcctatttctagtattaaaattatgcctatcactaatattactaaaaagatgaatatttttccgaacatacataatgttttcgtatatgtattgacaaggtaccgtcatgatgttaatatccttaaatatagtatataaataataataaaaagtggtgtaaccttactatatttcattttatccggaaatactccttggtctacacataaattgaatattaaagccaagtatggtgctatggtctcaattatggacgtgcacactttgacagacattccccataagtcttcggtcaatttgattttgatttgccggaaagcttttaaaaccgtcatagggttgatatgtttgaattggaattcaaccgcacaacttggaacgtttgctcttaataaattaaatgatacctcgggtgaagaatttaaagcttcagtagttcttgatggtatttcggtgaaaaaatatacaaattcttgagctacttctaaattagagcttatggcaccatgtgcagtctccggtaaaaacagtgttttgtactttattcctactttttttcattaattgataactttccaaactgtctttattttgttatctgccgatctgatcttgtagctaatgtggctttagctactttgcaagtatttctgaagactttagagaatttgtttacatacatattaaaggtttctgtgtcaatgaaaggcttaaggccatgtaactcatatagtctttccctacttatcctaatacctttagtcgcccagtcactaaatataaacttagagaaagtat

SEQ ID NO: 149 - DNA, 20846 bp, unidentified
  misc_feature 1..20846: note = Fanzor polypeptide
  variation 819..1318: note = n is any nucleotide
  variation 16854..17353: note = n is any nucleotide
  source 1..20846: mol_type = other DNA
ggataacattaacatgtcggaatataaacaaaaagcactgaattatatcacaacaggaaccaccgccaacacaccactgtagcaaatacttccggcaaagggaagaactgactcgggacccagaaaaaacttcactaagtgaagaaaaatacgctgggaacgtcagcaaaaatacgctacctcatcagaaagataaaaggaagcaataacgcgtaatgaaagccgcctgcatcacaaagctagctaactgtgaaaaaaagttcacctgtccacaaccggaccacgagggtacatccgaaatagatgccccaaacacacgacccaaaatacactgcactgcgggcaaccagcccaggacactcctgctacgcatatcctaaccttactcgatgcatcccggagtaaacaaatgagaaaaaactcactagggacgcagcaaatgcggaaccagcggagcgtggagagacacgtccgggccggctgaccgcagagcagagaaggaagaatgacgcctgaatcagcgtctggtcaaagatccacacaagaacatctacgatatgatggaaagcttattggatagttattcttattttatttttgtttttaattttttacgaagttttttcgtagtgagaacccaattcataatgactgaagccatgagtgaggtcgcgtgcgctcatgatgaaggctcctcagaatttaaatgctctgcgcggtagattcaaactacggcggattagtgtttgaagaggatgccttatgtaataggcatgttcgtcaatgattacggggccactaataaatagtaggttttcnnnnnnnnnnnnnnnnnnnnnnnnnnnnnnnnnnnnnnnnnnnnnnnnnnnnnnnnnnnnnnnnnnnnnnnnnnnnnnnnnnnnnnnnnnnnnnnnnnnnnnnnnnnnnnnnnnnnnnnnnnnnnnnnnnnnnnnnnnnnnnnnnnnnnnnnnnnnnnnnnnnnnnnnnnnnnnnnnnnnnnnnnnnnnnnnnnnnnnnnnnnnnnnnnnnnnnnnnnnnnnnnnnnnnnnnnnnnnnnnnnnnnnnnnnnnnnnnnnnnnnnnnnnnnnnnnnnnnnnnnnnnnnnnnnnnnnnnnnnnnnnnnnnnnnnnnnnnnnnnnnnnnnnnnnnnnnnnnnnnnnnnnnnnnnnnnnnnnnnnnnnnnnnnnnnnnnnnnnnnnnnnnnnnnnnnnnnnnnnnnnnnnnnnnnnnnnnnnnnnnnnnnnnnnnnnnnnnnnnnnnnnnnnnnnnnnnnnnnnnnnnnnnnnnnnnnnnnnnnnnnnnnnnnnnnnnnnnnnnnattttccaagactactaccaaatagtaggtgttcccactatttggtaggttgcgaggtacgtcaaacgctccaatttgttagtagtcttggcaaatcaacgtcaaggcttcataacccatagaggatgactccaagcccaacatccaaaaaacaatgcaaaacaattataatgacaaagaaacccaatttcaacaagatgttgttataaaatagtgaaaaactgaggaggtgctaaaagaacagttttacatgtgcccgtcattcaagtaagcaaaaacatagacttgtccttaaaccaaaaaagtactgtacccaaaatccacattttcttccaaaaccaacaaaaaacattgaacacaataacaaatatcacaattttcaatttggcaaacacacttatgtactgtatacataaaacataatcccaaacttgcaatcaagtgttgcaaacccgtactccccccccccccccccctttccaaataaaacaaagtaaaagaaagcgtgacaagggggaagacccaggcacttcgccagagcactaggaaacactactcccggagagatagcacagagggggtctaacaatggacatgggcgaggtaggaggagacgaaggtattgacagaagaccacaaacccgccgaggcgatgtcaggtaaggatcgactttgcaggaaccgtaaggaggcagcaaaggatcgcaccatcgtgcgcagaaccctacatcagggttaatggcacgatatgacccgaacactatgtggcgcttgcacgttccttctccaccttcgaggagaccgccaccagtccccgagtgcgatcacccacaatgacagcattatccgaatcatcggagttccccactagcggactcctacaccctgagtgcaaggcctgcaccgggcacaacacatggtgcgtgttatgcccacgcttgaaacgcctgtatggggataagctgaacttgaaaacgttggtttctctctctcatttcttgtgcaacaccaaatgagaggtgagggtgctaacttaagtgacgacattcaaggtacggggaagaatcgctgcattccatgggaaccgacattgactggctgctcagttcagcacatcacctatccccagtggccatagcgacagaagagtgtacgctcgagcacactgaccggtgtagtgtcccgtgtctatatgcgtgtgaagccagaaggtccagaggtggggatcggtttttacacctacccgaaagaggatttatggagctccgatcttactctcaactatctgaacaatttttaccacacacacctaaaactcgttaaatgcggaaatagcctcacgaaaaaatatcatgccctggtgggggcacgaactctcgacccttgggtgtgaggcagacaccttaccagttagaccaatagagggggatcggtttttacaccttacccgaaagaggatttatggagctccgatcttactctcaaccatctgaacaatttaaccagcacacctaaacttcgttaaatgcggaaatagcctcacgaaaatatcatgccctggtgggggcacgaactctctcgacccttgggtgtgaggcaggcaccttaccagttagaccaatagagatatcccacttggcctgttcggctcagggtatttccgcatccgaggtctgtttaggctagcctattttcactgactttacactacttcaccttccgggaagcgaaagctccgaacagagaggaacaagcttgagccgaatcgaccgagagtccgtcagagagatgaacgggaatggtgagtcaacttcactgagcgatgctacacacgcacctacaaactgcccagttggcaactcgcttgggcggctggcaactccacaacccaacccaatcgagtctcacaacactccctgctctctcctatcctcttccttgtcctgtggggatcggtttttacaccttacccgaaagaggatttatggagctccgatcttactctcaaccatctgaacaatttaaccagcacacctaaacttcgttaaatgcggaaatagcctcacgaaaatatcatgccctggtgggggcacgaactctcgacccttgggtgtgaggcaggcaccttaccagttagaccaatagagatatcccacttggcctgttcggctcagggtatttccgcatccgaggtctgtttaggctagcctattttcactgactttacgggcaggtgaggaggcgtgcagtggagatgttgtgtcggttcgcgaggaagaacaacttctctgagatccccaatgagatccccaacatgtcaaagactggaggaccccatgcgtttttggatacagtggacagctgtctgattgtccatcctgaaggccacggccgactttcccccgaagggccagcgcgtggtccctcaggaagaacaagggaaccaacagttcgagggcattgatgtggtaggtgtgtgtgtgtcccacccatcctgccgtgattgtgatgtcccaggttaggattggtaacgcccacccctacctgctcgacgcatctgtatggtctacccagatcgtcggaggggggggcggtccagggcacagccgcagagagcgtgccccgagcaacccaggtgtccctaagtgtctcccgtagaatggtagtacgcgggagctcggcatgagcctatccataggggccaacggaacaccttgttgcccatgagtaattataatgggcggcgtagcctgagcctccctaaggtgaatggtcctgagcggcccaattccagttgaacccactaacgagtcccagatcctcctcgtgagggagaccgagtgcaggaaaacggcgaagaccttcctgcgaagtttcaccagcgtttggctgacgctgggtccctgtatagcgctggtcagatcccattcgaggacctacccacgtcacgacacgcgacggggtcaggcgtgactgggaatattgatgtttgaaccctaactgtgtgatgtgtgtttgaactactgtgagggtgtcgcgggacgcactgttctagggtgtctgaaacaatcaaccaaaaaaaattgcgtccaagtaaaaaaaaaactatcaaggatctggaggccgctcctgaggagaggatccagagcctgcttcaccagtttcgagaagatccgcggcgcgatgttgagaccgaaggggaagtctgtcgaacatgaacacacacgatcggaagtctgaacggccaagaatcgctggaaacgaggatggataggaacgtgccaatacgcatccttgaggtcccagcgacactacccacgacagaggtcgcagggccagtcgtacctggtgcaccgtcagcatccgaaaccgtggcttgtttcacgatgtgcccgttgagggccgacagatccaccaccgtcgcatcgcgtcgcagtccttctttggtaccagaaatacacgggagagggaaaaccggttgaccggctttcacctccttgaacgattccctgctcgtgcatggacgttatcacgtcggccacctccgaagagacgggcctgccggctttcgtttacaagaagctgagtggggggtctggacttccatctccaggttagaacccctccgtgcaatcttccgcccccacgtccctcgcggccagcgagggcgcaaggggcgaaaacaacctgtgtagcccccgagatgaggtgagcgaccctttcggctaggcgagaaggagaacaaggaggagaccgacctgagaacctacaaattttttgacgtggagggtcccccggcgggtacggtcccttgcggtcataagcgccacgttgacctcctctaccccccccccccacctcgccgaaaaaggcggggtccaaacccatcccctgtccgtcgcgcgtctgacccccgtcgaagtgcggccggaagtggaaggctggccagccccattctcggcggggatgaaagggagtcagaacagaagtgcgagggccggaaccgggtgacgctctggccggcaacttccctttcctgcgccctaagcggccctttcttggcggcagcactggcggcagcaccccgaagaggaccgtcagaaggacgggactgagcgaaacctggtcgcggcgacacagcgcgtcgttgcgtgtcgtaagcaggtgtccgccgacagagaaagcgtagcgtttcccaagcatcctggcgcaaaaagtccccgatgtatagaagctcatgagaacgtacaacaaaccctgacgaatatccaagggggctttcctggcagaacgaggaccttaccgtctggcgttgtcgagttgcctcgcacaaacctaacctatcagactcgctccttcagctcgaggaaccaaagagacaccggcgagctgaaggtggatccgcgccgaacgtgtgggtcaggttcaaaaccctcgcgaagatcgctccggtgcagtcgcctcgataagccgcaggtggtgaacgacgtctgtggagggaacctaaaagacaaggataataagttttcgccaccctctgtcgcaaggtaaaatcctgtcgacagaggactttatctgggtgagagaagaacgtggttagcaatagagcaaatttcaagtttgggcgcgctgatccaggaccagaacttgccgtccaatccgccgacagatttacaagaggaggcaaaagcagtgatgactccgggggagggactgaagtagatctgtcgacggaacggaacgttggcgaattctagggcctcagcaaaccaggcctccatgggagagggttacatcgagcacgacggctaagcccaggcttaccgtgtcgtcgcacaaacccgtcccataggaggacagtcccgtcaacacagccagggactgaacatcctgaaggatgtcctggcggctgaagtctgaccagagcttagtccgaggagcagacgggggcttgggcttcaccgaaaagtactgaaggtcagtcctcgtcgggtaagcccgcacctccacgtcggcccacctgacccatacaccctgatctgccctgaactgcatcttatcattaatttgcaccgaccagccagatgggagggccctctcacctgacgggggaagtttagccggtagcacgctccgggtgggaggcctgcacccccttccaaacagccaaggagccatagaggagcggcatggtccgcgacgggaccttggccttctggatggggggcaaagcgcggacccctgccctagcagacggagaacccccgcatgggagacagcaggggcaacctccgtgagctagggcaggagcagtactagccgacgaccgggcaggcggagaagctgggcgagaaggaatgtggtccactgcagaaggagggggaccgtagcaggggtaggttgggtgaggcgctgaggtttgtgtcacctgccaagaagcgcgataagagggagtcttgcatcgcctccaagcgctcgtcgatgcgtgacacaacccacccctgcatagccgaaaattcgatccgagagaggcgacccccccgaagattgttcgggtgcccgcaggggcgagcttgagcggggaggagagagacccatggacacgaaaacagcagcgtcgcggccccaaagaaggcgagcgacgacggccgtggcgccttgagggtctcgtccccgatcactaacgcccgaggggggaaacatcaccatccccctcttccagcgacacgtcagctcccgagaaaggggtaaccccgaaacctcgctatactccaccgagtcaagaggcggggtacccccctggcgagatggtaagtgaaggtcagggatagaagaatgaggaggagcaggatgacgggagtgggaaggctggccgggtgaaaggaggtcagaaggaaaggccgcgggggaaaacagagcaaggatcccggggctgagagaaacagggcggcccgacaccgaggcggaggagggagggacctccaccttgggacgagaccgtgaaggaagaataggcaccgaagcaggagaagtaggaggagaagcaactacatcctggcggaaaccctcctggacagtgtaggaggagggagcagagggccagctacagcatgaacatccgcgcgcgtagagaacaaaggaagaggaggaagtcttttgtgcaggggaagcgggcggaaggtagtagagcccctatccggagaggccaggggagggcgcacaggggcagagccgctaaccccggcctcaggggctgagaaccatgacgaggcgcgatgggcgtcgtcaaggcgagcaggaggacgacgagggcagtagaggacggggcgacgacgaggcgagcgatgagcgtggacggagctggggatcctcccgacgatgtgacgaccggccgcggggacccaggggaggagggcccgagcagggagagggccaggtgaaacggccatccagacgggtcagggatacccagggcgacgcggatcccggtcgtcaacaaaggccggggaacggtggcccccacagtcctaatgtggtgggagaccaccgcccacacagactgaagggaagcagaggccactgccgcctctgaggaaccagggctatggtccaccacatccaccagggtcaccatacacgggccacacaaagcagggaggtaggccgtagaggacacacattgcgagtggcgtaagcaggacctgtggcgctccaagcacggggagccacaaccctggcgaaagcaaggcatcccacctgcaacggaagaacaccacaccataagcagcacgtcgatagaggaagtgtagagaatgtccaataaaaaccagggaatgagcatggggaaacagtaacacacatgcaaaccggtatccgtactcaccctaaaccgggagcaccagaggtaggtgaggagggcgggcgaggtggaagagcacaagcagaacctgcaaagatggagaaagtgttaaccaccactcaacacatcttacatgcagtttttcttttttttggtctataacactagtaaagtgcacacaccaatatagtttcaggcaacaaggatgacataaaaaaggtcaacagtgaaagccaactattaccgcaaatttgcgggccaatggaggcataaccgtaccgacacaaccctcccgcatcttcgcgggaccccccagcgatctccgcaaatttgcggggagccgaaacgtcccagaggaccgaatcgagctctccgcaaatttgcgggaccggccgagatggtccgggttggcgcgccgaaaaagcgagaggagcgtctagggaataccaaaaaaggccacaaaaatgcgtcatctccttatgaactccaagcgatgatggccatcaagctgagcagtgtcttccttgaaatttatcctaactcaaccggtaaagggagaggcaaggaagacacaccaggggagaggaggcacatcccccaggaaccacccaacccacagagatagagcaaagcccatgaggagagaagtggcagggagggtggtttcgcacaaacaggggcccccgtggggtacccctggattgggcaaaaagactatgaaaggatggaggtgaaacaggaagagaaaacaaaaaaccagtaaatgaaactggtgagaaaaagggtggcctagccgtgagcagagaatgtgtcaggtggcgaaaaaccctgtggtgtgaaggaggggcccccgtggggtacccctggattatcacgaaccacctgtcgcccaggcccttgagacacagtgaaggctcgaaagggggggactcgggaataacgctaataatgcggccgacacaaactctacaaacagcaccgccaccaacgaaatctcagattgtttaccaacggtacaccttaggctatgaaaaaatgaaaactcataggggcatagcaattcctgaatgagaaaacgagctaggctaaaataagctaaaagctaaaactatgcccagactaacaggaaaaaaagaatatgaaaagagaaagaatgaaaaacatatacgaggaacgccaggcgcccacgtaccttcggtaggctatttccacacgcgtctccattatacacacttaggagcccatttacgtgtgccctagatcacgtaacatctgtctaacaaaaaaaagaaggccagataagccgaaacgaacctaaaacagggtgaattgaaggagcacaacaaaagcggactcaacaatggagacgcgtgaaaaaatgataacaagagagggtcgctcatgcgcacgttcgacagggatctgcacatgacggaccacgggatgggccttaagcggtaactaaggtaaacccctttttcttctcttctatgcttttttcaccttcggtggtagttttggttaatgtacaacgtctcttagagcaagataaggagtagactagacgttttctttttaaccgcggttgtttggaatgacgacatagcagtcaaaatagacaagtcgtcattgcaattaggtttaatagccttgacgttggatttgccaagactactaacaaagtatctccggtggcgacagaatggcccgactttaccaaaaaaaaacacgttcgtgcaactattcacccaaggatgcgaagccaagaagaggaggaaacccaatccggcgatcccctacacgtgggagagacggttcgttagcgcgagttacccgacccaactccggtatcattcggattacaatctcatcaattactgcgccaagacctaccagacgtgtttcaacaacaacctcgcgctaaacttcgtatcccgtcagaggcacgccatacgtttctacctcaaaaacgaccaaacggggggagaagacgacaccccaccgctccgctcgtgtatgccctgcagactctcgtgaatggctggaagtacgtcggaaggacctactccgtgaaccaattggcggaactgaaagatcggcactcagcgttcattgaccggcacgtgacgtatctcgggaagccagccctgagcggggggccggtggcttacctgcgctactactacggttttctcaagcgggagtattccgagtcgaccaaactcagaaacttcccgttggctccgaccaacgcggtcaaggcccactacgtggactttgacgcggtgggagtgaagggcctgtgtcgagaactgggcatcccgtcgggagaactgaaagaaaccgaagaagggtgggggttcattttagacctgaaacggataagaagaatgggagggaacgagaagtggacgttcgatcggtgcgtgtcgaccgacggcgtgacctgttcgatccgatactacaggtataaaaaaaacgacccgggaaccggcaccgctcacaagaggaagaagaaaaatgacgggaccgtcgccttccccaggggtacggctgaagtcagcaacagcaacactaccgtcgtatcgttgaaaggtaaacggatcatcggtgtggatcccggacaaaagaacattgccttttgcgtagagttggaccccgaaactcgatagattaccaaaaagacgacactgatttctaaacagtactactgcgactccgggatgaccgaggcatagagacggatttcgtcttggatggcccatccagagtacaaaaaagcccaggaaaaattgttgagatataaatttcccgtattacaggacccccacaagcattgagggcttagagggagtgattaaacacagtggtccctatagacgcgactacctcacatacaagagtcgtctaaatagctacatccgatggccggaaggtgtcgtacagaagcctaatgaattggccgaggccggctttttctactgtggtttgagcgatcatgtgcgatgcttccactgcggaaagggtctccgtaactgggggactaatgacattccttggcaggaacatgctcactggtaccccaactgtgagtttgtgcttgttaaaaaagaccagcgatttattaaacaagctgtgggtcttacccccaagctgtccacctccacacccccttttaaaggattaactactgaggaaatggaacatatgatggggttggataacagccaggctattttaaagatgggcttcccagaaatgcagattcgtagcgccctcaaacgcaagctggaacagactgggatgcccttcttcagcctcgagccatacatagagtatgttctgcaattaatggaggatgagactcgtcaggctcttagccaaaggaccaggaagagcattgaagatggagccaatgggggacaagctatccaaacctcgccgcctgaaagaaaacccccagttgagaacattgaagacgaaaccactgagggtcaagccatccaaagctcgcaggagggagtggggcctttggtggacattgaagaggaggtcactgagactacgcaaactacccaagcctcgcagcccggaatagagcccatggtggagaacatagaagacgaagcgccactgggggacaatctgtccgtacttcgcagtacgaaatagaacccatggcgaagaacatagaagacaaagccactggggggcaatctgtccgaacttcgcagcccggaatagagcccatggtggagaacatagaagacaaagccactggggggcaatctgtcctaacctcgcagcctggaaaagagcccatgagggaaaacatagaagacgaagccactgggggacaatttgtccgaacttcgcagccaaacaaaaataataataatttgggtaatagggctgctatgtctcaccggtccaagaagtttcacagtcaaagattcgaaaaggcgcggctggaaacattcattgacttgccagtaccttggttagagcccatggatcttgcccaggatgggttctattatctgagaacagtggaccactgcgcctgcatattctgccgaggcatcgtgggtgcatggatacagggggacacacctcggggtgaacacaagcgccacttccctcgttgcccgtttgtgaagggggagccggtgggtaacattccactcgagcaccgtaatatcattgcccgaatacgcccaaggtcctcggggctcaccacggtgacggacgtctgcggaaccggtcgtgacacatgcggccattactcaaagacaaatgtcccgtccgacaggacccccacaagcattgagggcttagcgggagtgattaaacacagtggtccctatagacgcgactacctcacatacaagagtcgtctagatagctacatccgatggccggaacgtgtcgtacagaagcctaatgaattggccgaggccggctttttctactgtggtttgagcgatcatgtgcgatgcttccactgcggaaacggtctccgtaactgggaggctaatgccattccttggcaggaacatgctcgctggtacctcaactgtgagtgggtgcttgttaaaaaagaccagccatttattaaacaagctggggatctcacccccatccgcatccaatcccagccgtccacctccacacccgcttttaaaggattaactactgaggaaatggaacttatgatggggttggataacagccaggctattttaaaaatgggcttcccagaaatgaagattcgtagtgccctcaaacgcaagctggaacagactgggatgcccttcttcagcctcgagtcattcatagaatatgttctgcaattaatggaggatgaggctcgtcaggctcttagccaagggaccaggaagaacattgaagatggagccaacgggggacaagctatccaaacctcgccgcccgaaagaaaacccccagttgagaacattgaagacgaaaccactgagggtcaagccatccaaagctcgcaggcgggagtggggcctttggtggacattgaagaggaggtcactgagaccacgcagactatccaagcctcgcagcccggaatagagcccatggtggagaacatagaagacgaagccactggggggcaatctgtccgtactttgcagcccgaaatagaacccagggtggagaacatagaagacgaagccactggggggcaatctgtcctaacctcacagcctggactagagcccatggtggagaacatagaagacgaagccactgggggacaatttgtccgaacttcgcagcccgaaatagagcccatgatggagaacatagatgacgaagccactgggggacaatctgtccgaacttcgcagcccggaatggagcccatggtggagaacatagaagacgaagccactggggggcaagctattccaacctcgcagtccggagtagaacccataccaatacgaattgagcaagaacttgagatcgcgcgcgctcacgaagcatgtgtaaagtttgcatggatgccgagatgagtgttattttcattccttgtagacacttggcaacctgtaatgcatgtgctctggccattgctcagtgccccatttgtcgtgcagacatcaggtgtatcatcatcaacgccatcctcgcctagtagaagagaaaagatggtgtttgaccgactttacaaccgacagttgctgttcaaaacttctcaagggaaagaaatcataaaaacggccgtcaaacaatctgccgctctcgagacgagaccttttcttacgcgagccaggaaaaaagcagaaaatctctcaagaggttcactcgcgtttgattaaatctgacgacatagagaacatagacaatgttcaggatgatctgcctaaattagagaatcggattgttaacaatgacactttgaagaaatatgtccaagtcatcgagaatctgtctgtcggtttcttaccaccggacactcaacaagacttacaaattcactccatctccagcagtacggcagcctgtaccctaaagaagatgagtatccggttcgccgtttgagaggccgactaatggtgttcccatctttcaatattattaggaaaagcatgtgcagtaacgaggggatggagcaggcatttttatttcaacccgctagtaagaagtggtcaattggctgtagcgtgtcgttcaacgttattttgggaaggatactttctgacccttcctataggtacaaatcctattccattagagaaattgctgaggaaacaaagacgggcagcgaacctgactcccgactgaacattgtggatattctagacttcgtcgcaaagtagatggatggctttagaatcaaagtcgaccaaatccaagaaaaacaagtcctgtctcggagaagagctgccgtgtttgtgtttttgattggcttggttatcctagctctcatattcgtgatccgtatggatatggaccttaaaagaaataagatcggcagcgcggctcacgtcgtcgaacacaccacgcccctccttatggggccaattatggccgctttcgataacgacgacacggaagccactagaagattgaattcaaatgcggccagtggagaggaccagccgccgaccccccctcctctgcctacaacaacaacaacaacaccaataaaatcctgcagcgccgatggataatgcaagaggcacaacgtgacccacgtgctcttctatcagggctcgtgggttctagttatggacgttcagactatgtagcgggcaaatagctttagttagggaataaacaaagatgaaattaaaatgtatttttatttgaaacatatttttatacattgtcaacagttttaatacatgaagatgaacactgtctacagacatgtaggctaacagtgcaattactaatgttcaatacgggagcggaagctctttctaaggcaatatggtgttccttccgctttttctcctcttcttcaataatcgcctttaacttctttcctcgggcagcgccgttggtgttggtctccgtggattgatctttcattttacgcttgcggccggtaattgtattactgatgatggggttgctgtcactgcggccattgttcgtattactgttagaattgctgctgctatcctggctgctacttttgctcttatcttctccagtggaagtagaggatggtaaatcagtctcttccggatcggaaccgttgaattgcattcccccctccccttgttggtcacccttatcaacgaactgttccaaatgagagagaacgtcgtggttggccggggtcaccatcttggtcggttggttggtttggttggttggatgcttagcttcttctgggggtctacacctaacaacctaccttttacagtgagccgtgcaggcattatctaatatacttacccaatccttacactaatcgactctctgcttttgataaagcagtgggcgacccgtacagcaattttgctgtagaagcgacaaccatccccctggaaacattaatcgagaggggaattaaggctattctgacagcaagggagagcaatgtgtcctccaatcccatcccgcccaggcgttgtccattttcaagtaaaagtccacgtcagacagcgttctggccactgcgaccagtccgtacttttcgatgtgaaccacctttcccatgcctttgatgatcacccggttactattaactttatctctcagttgagcaaccttttgggcttccctactgtaccattctatttttgactcggtgaccttctcatccgagagcaatgtgttccatttattcaggatttgtagcagctcggcattgttacatctctccttctcatcgagggcgcctacggtcgtgtgggaatctctggtgcccgcttcgaccagggagattgcatcaagccattgaatatcagtgagaatctttttggcgttgacggggacgtacaatttggaacctggggtgaaattaatgttcctgttggagggtgacgcctctggagctggcatggaattaagcatgtacgaaggaatgcgatactgattcctcattcttttttcaaaatctcttcctttgcagtagtttaccatatcatcatttctcactaaatctatgagtcgactggtcaattctgccgaagcggtattcaacctccgggaccctactcctcctcctctaccattattgttacctcggtaggtattctgttttgttcccggttgctgtggaacgaaggacttcgaattgaattcgtttaagatcctctcgatgttggcagtgtttctattagtcctttgtttctgtcgcgaggaaagcctgtcgtaatgatgatcgttgctgctgttgctgttgttgttgtggtggtgtttggtggtgatgcattgccggtcggtgtttgaacaaatcctcgtttaggaaggtagagatattaccctcggcatccagaatcgccaagtgattctcctcctgacttaccctgtccagaattttggtaatttcctcaatggggcttagacttatcctcagactgtccctcattatggtactcacgttcccgcacacgtctttgattaattgcatctctccactgctcaccaccatcatgattctcgacaccagtgttgccagtannnnnnnnnnnnnnnnnnnnnnnnnnnnnnnnnnnnnnnnnnnnnnnnnnnnnnnnnnnnnnnnnnnnnnnnnnnnnnnnnnnnnnnnnnnnnnnnnnnnnnnnnnnnnnnnnnnnnnnnnnnnnnnnnnnnnnnnnnnnnnnnnnnnnnnnnnnnnnnnnnnnnnnnnnnnnnnnnnnnnnnnnnnnnnnnnnnnnnnnnnnnnnnnnnnnnnnnnnnnnnnnnnnnnnnnnnnnnnnnnnnnnnnnnnnnnnnnnnnnnnnnnnnnnnnnnnnnnnnnnnnnnnnnnnnnnnnnnnnnnnnnnnnnnnnnnnnnnnnnnnnnnnnnnnnnnnnnnnnnnnnnnnnnnnnnnnnnnnnnnnnnnnnnnnnnnnnnnnnnnnnnnnnnnnnnnnnnnnnnnnnnnnnnnnnnnnnnnnnnnnnnnnnnnnnnnnnnnnnnnnnnnnnnnnnnnnnnnnnnnnnnnnnnnnnnnnnnnnnnnnnnnnnnnnnnnnnnnnnntattgtcgatgcctttgatgattttgaacacttgaattaagtcacctcttaatctgcgctgggttaaaggaaatagatttaattctctaagacgctcttcgtatggtttgttctttaggctaggtatcattttggtaactctacgttgaactcgttctagcttgtttatatctttttggtaataagggcaccaggattgaacgcagtattccagaagagggcggactaatgaattgtaaagggttaggataacttctttggatttatgctcaaatgacctgcctataaagccaattattttgtttgccttcttaacaacttctgaacattgttgactcggttttaggttactcgatattgttactcccagatcggtttctctgtttacattcttaagctgagtgccattcatcgaatagtttgctttctcatttaggtatccgatatgtagtactttacatttatccgcattgaaactcatttgccaaatttgggcccaacatgacaatttatctagattgtgttgtatatcgtcaacttgttcttttgagagtacgctatttgcaatttttgtatcgtcagcaaattttgagattgtacaggtgagaccctcatctatgtcgttgatgtaaattagaaagagaattggtcctagtaccgatccctggggtaccccgctacttacattggtccattttgatgccttaccgtttatgactactctttgctttctgtcgctgagccaattttctatccatttcaacacaccgtcttgtattccatgcgcttttagttttagcagtaaacgtttgtggggaactttttgtcaaaggccttttgaaaatcaaggtatataatatctacagctttactctcatcgtagaggttgaggatatcgtggaagaagtctaagaggtttgttaaacaggaacgttttttacgaaagccgtgttgagtatctttaagtatgttattttcctctaagtgatttacgagtctgtctcgtatgaccgtttctagcatttttacatacaactgaggttaagctaattggacgatagttactgggtagggatttgctgccttttttgaatatcggtgttacgttggctagcttccactgatcgggcatagtcccagactgcaaggatttattgaatagtaatgtcagtggtttagagagctcatccttagcttcctttagaactctaggcgagattgtatcaggtccaggcgttttatttaccttgagtttatctaaacaattcaatacttctctctctgtaacggtgatattgcttagaacatctgaattatcaatctgaatcggcgatggtgtagggatatcactgaggtcttctgttgtaaaaactgatgcaaagaaggtattgagggcattactcatttgttcttcgtctttggtgtattctccattttcatcgactaacggtccaacagttgaagtaacgacttttttctttctgatataactatagaattctttcgggttgtttttactttgattcgcaatatgtaactctaaggtctttttactttgcttaattaactttttggctttgcgtcgtagctctacaaatttcagccgttcttcgtcattttgtgaggattttaatctatcattagcaaattttttagcaagcaggcagtttgaaatatctttattccaccatttgggcttattattatggcctggacgccgagttttcgatggtatgcagtcttgcagcttttaggtaagtaaacacagtggtccctatagacgcgagtacctcgacatacaagagtcctcgtctagatagcgtgacacatccgatggccggaacgttgtcgtacagaagcctaatgaattggccgaggccggcttttttttctactgtggtttgagcgatcatgtgcgatgcttccactgcggaaacggtctccgtaactgggaggctaatgccattccttggcaggaacatgctcgctggtaccccaactgtgagtgggtgcttgttaaaaaaagaccagtcatttattaaacaagctggggatctcacccccatccgcatccaatcccagccgtccacctccacacccgcttttaaaggattaactactgaggaaatggaacttatgatggggttggataacagccaggctattttaaagatgggcttcccagaaatgcagattcgtagcgccctcaaacgcaagctggaacagactgggatgcccttcttcagcctcgagccatacatagagtgtgttctgcaattaatggaggatgagactcgtcaggctcttagccaaaggaccaggaagaacattgaagatggagccaatgggggacaagctatccaaacctcgccgcccgaaagaaaacccccagttgagaacattgaagacgaaaccactgagggtcaagccatccaaagctcgcaggcgggagtggggcctttggtggacattgaagaggaggtcactgagactatgcaaactacccaagccttgcagcccggaatagagcccatggtggagaacatagaagacgaagccactggggggcaatctgtcctaacctcacagcctggactagagcccatggtggagaacatggaagacgaagccactgggggacaatttgtccgaacttcgcagcccgaaatagagcccatgatggagaacatagatgacgaagccactgggggacaatctgtccgaacttcgcagcccggaatggagcccatggtggagaacatagaagacgaagccactggggggcaagctattccaacctcgcagtccggagtagaacccataccaatacgaattgagcaagaacttgagatcgcgcgctcacgaagcatgtgtaaagtttgcatggatgccgagatgagtgttattttcattccttgtagacacttggcaacctgtaatgcatgtgctctggccattgctcagtgccccatttgtcgtgcagacatcaggtgtatcatcaacgccatcctcgcctagtagaagagaaaagatggtgtttgaccgactttacaaccgacagttgctgttcaaaacttctcaagggaaagaaatcataaaaacggccgtcaaacaatctgccgctctcgagacgagaccttttcttacgcgagccaggaaaaagcagaaaaatctctctcaagaggttcactcgcgtttgattgaatctgacgacatagagaacatagacaatgttcaggatgatctgcctaaattagagaatcggattgttaacaatgacactttgaagaaatatgtccaagtcatcgagaatctgtctgtcggtttcttaccaccggacactcaacaagacttacaaattcactccatctccagcagtacggcagcctgtaccctaaagaagatgagtatccggttcgccgttttgagaggccggctaatggtgttcccatctttcaatattattaggaaaagcatgtgcagtaacgagggg

SEQ ID NO: 150 - DNA, 20741 bp, Paralithodes sp.
  source 1..20741: mol_type = other DNA
tcccccaaggccactgagacacagtcgatcgatactctctctctctctcttgcactcgcttgctatcagtgatgagcacaccctccaatcggatttctaatgttagcacgaaaatatacctcagaataagggaataacagggaaaataggtgataactgaaggagaggaggaaagtggggaaggaggggaggtagaggactgagattttgcatggcccaggggcaaaaaaaaaaaaaaaaaaaaaaaaaaaaatataaattttttttttttttcgatagtaataagataataaatattgcctttgaatgatgacttatcagatcaataataaccaaatagtagtttcttagttttaattttaaaagtaatcctgttagtcgctgttttgatatcctcaggtaatgtattccagttaatacatcctgagtatgagatgaatcttatctccaattcttaataacaacctatttctggtgtctcggttgtgaacgtctgatgcagcttcaaaggttattatagagttactatcgagttggtcatacacaaattttacagactctattttattaatataacttattttaagaataccaagatttttaaagagaggatcagtatggtcacggtaatttgcattcgatactattcttattttttttttctgaattaatacaatcggtttaataatggacatttgcgcacatccccaggttacattgcaatattgtagatatggatatatgagactagtataaaattacaagtgcttatttcgttaagttaggttttattttattgattatgccaatagatttagaaagcttactgtgaacatactgtacttggggtttccagtttagcttactgtcaatgtatacacccaacatttgtgtttgaaatactcttccaataatggagttacctatcgtgatgttcaccatattgttaatacatttcctaccagcaaaaataatgaaatgtgtttacttacattgagtgatagcttgttagctaataacctattgtacacatattgcaattctctattcatggtatgagccatagaccgaatgccgcttccagagtaaaatacattggtatcgtcagcgaataacatgaatttcaaaatatttgatgaatgcaccagataatttatgtatagaaggaacagaagaagtcccagggtagatacctgcggtgcaacggttacaatttgttcaaaagtagatgttataccatttatttccgtaagctgttgtctgttgcttaaataactaaagaaccacaccaaagtctcatttctcattccataaaattctaatttctttggtaaaattgtgtggtttatagtgtctaaagcttttcgtaaatctaaaaatatgcctatggtataattaccttgattatttgcacaaattacatcatttaacatttgtattatggctgattgaagtgaatagttttttttttttattttcgaaagccaaactgattctcattcaagttattgtttgtaatagaaaaagccatcaagctgtcatatacaaaccgttctttaattttatttaaagctgataagatagatatgggtcgataattagagacttgtagccgatctccccctttataaataggtatgatctttgcaacttttaccttatcgggaaatactccagtacgaaaagataaatttattaattttgacaacaatggagagatagctgtacatgcatacttgagaattcttgcataatttccgtcaaatcctgtgccagattctttaagattatttatgatatcagttacttcattaaaaagtggtgggatttatcagcgtagttgggtactgtcctgtcaagtagtcgacaggagatgcttgacaagaagatagtgagtcagctaattgttttcgtatagaacaaaaatgtgagtttacatgattgcaaataacagggggttagattcattcattcgttgttaatttccaattcatcaatactagtgttattggtttgaagctgtaaaagtctgtttatcactttctaagtatttctgctatcttcagatgccgaacttaacttagataacaattattgtttcttggcagtagccaatttattatccaccatgttcctaaattgtcgatattcttctccgaaagtaattggttttgtaacacattttctgtataagctatgtcttctttttattagatcggcaatttccttagtgacccatggcttagactgacccttacaagatatctttataattttccatggtacactttcttccaccaccctgcctatggtgtttataacgcaattaaatgttgtattcacatcatcttgaacaatctgaaaatcatgcaatgcttcttccatacgggtgttcaaaagtgtggcatcaagtgatttataatctttaaactttatagttgtatcattatctgaacatttatcacaataagtgcagctaacaaaaggggcaaagtggtctgacacatcagtgatcaatatgccattattggatattaatgttaaatcgttagaccaaatgtgatcaattattgtcgcacaatcattactaactcgagttggtctattgatgcaagaatataatccatgcttgaacataatatcagtaaaatattgaactcctttgttgttttcataattcagtagattaatattaaagtcgcccaatatataacacttcttcttagttttagtaatttccttttaaaacaaatcaaacaattaattaaacaagtttatactcgaacatggacgtctataatatgataccaattagatgacgtttgtcgcctattacacattcaacgaacagagattcaaagcaaacacacaaacggtaaatagttttgcatcttaaataatttcttacaaacaaacaaacacctccttggcggttcctgttattggtaaataaagtaaagccattcatattgtatacattttgaatatcatcggacaatcgagtttcacaaaatcccaatatttatactttattttgaaaaggcaaaatatgttgaactaaaaacaggtctaggtttcagggtatacttcttacgttgtgaaataagattgttaacttagtggaattactatgtaaacacttttcaaactcaagttgatgatagtattcagtgctgggaagagataggtcaacgagaaggttattgtctggatcataattattaagaatttcagtctcgctattagtcgtaaaaggattaaactgtagtagcttaaagtaatcaaatgtaaccaaatgatcgcctatgctatcataatgaagcaaattgttcaattccgcatcagttaattgggaaaaagggagtaccggtacattattcatctaaaatataaagatatcgtatataatacactctcatacccttcatgaacaatcacttagccaaagtacagcccaagacaaaaatacctgtccgaatattaactctaaacagaaacaccaacgtacgaaattaaaataccaggtaagtattaatgatatgattaatttcgctcagtaaagcttcaataatccctaggtcgcgatttatgtctctgactgtacctgaatacacacaatgataggcgggaaaatatgatatttggaggaatttccccaatccggattttataaaactgttgatatgatataattggaggtttccacaaggcaatacagatgaaataatttatgttgcaatttgtaccaggttcagttacattttcattggattattcaagatgtcctaatgttaggctttgtgaattggcattcagaattcccctacgaaaaatgctaacttaatttaggaatagttaagcctgagtaatgtaagcaaattagagctgcaaattgtgttggtccctagtttttcaaaatatactggtatatatacatttagttttttaatttaggatatttatgcttacattaacaccttaagcatgggtgatgccatatggtgtcaataaggttaatgggcagcatcccgggtgacgccatatggtgccagcatttttcacatcaagcaatcaaattttccataattgtaatctcggccctatcgaccttgtgatggactaagctccatccccagctcctccttgactccgtcaagcctctcattactccccccccccccaccatctcccccacccataagcaccctcaactagctccacttcccccctacctctcagtgattacattatctgtcccaggagcgagtcagtgctatactgactgagtgaaggagatggtgactcaaaaccctctctgagcccacgtgattgacacacatacatgcacacctatttacacacacaaatgagtatagtttggttttcagtccctcacttatatatgcacgcacgcttgaggagtagaatgttgttttaggctatcgcggtgataaacaaggaacaacgcaatgtcgaaccatggtgttttcaccattctcaacctacaaggctataagttttcgagttgttacaaagaaacatttaagccttaattgttactgatacttgttattgctaaattagtataaatatagtagcactgtcaagtaacgcaatattatttaaagcaaactgtatcaaaatgtagcatcagctaacggtcttcgtgtgattgttgtgatgctcctgacacatatgttcatattataattgatataaaaaataatataatggaacaaatcattcaaatttcattgtgatgaatgtgaaagtaaacaacctgattgtatatatttcttacttcgctagtgctatccagaagatatctccggctaaaagtgtttgtgtgacaccagtgtataagtacatcagtgacccagtgactgtatcgtccatgctccaaattgaaaattggtaccatctgtgaggcctactgaaaatatatataatctatataatctatatataatctaaaagataatacttgcactgttgtggattttaatttggaggtaataactctgttcactgagtatccacataccgattagctgtttattatagcttatgctgataactagtttccttgtgtagtgtaccaaatagtaaacttcagggaactgaaattattctctcagcagatgagcagttttcaagccactgccacaaaaacggttacaaaaaaaaaaaaaaaaatcccacataatgttcgcttttcctgatgtaataataactctctctctcttcatgctaagtttgcgatgtagcaagaccagatacatagatagagattaatataaattactattataaaaggtataaatagaacaatatgactaatgtaaaagaaaaaaaacgtcatatgagtcggtatgaagctattaatggaatccttatgtcaagttggttggggaagtaatagcccagtagttaacatggtggacggcggatcaaatggtatccaggttgaggccacgccaaacgttagtgatttttctgaggtgatctgattgctcctgctgttctacaatgatcctgactacaccaacatgtcaactaaatacaccccgtatcattattaactcgagaagtgcgaaactattgtaatgcaaagtgcccgtcagatttttttttctatgtgattgagggaggcaaaaggattaactgcttatagcgagtgcctcccccatagttgaaagagtgacagggccaaaatcaagggacgttcgagccaaaatgcctggacacacggagtttgaagcaatttaagtcataggaagagggaaagactgattctgggagagagttccagagctcagctgttgagtagaagaaagtttgagagtaaagtttcactcttgggttggagagttgcacagagtaggggtgggattgagttgcaagacgggtaccacgtgccctacgtaaaggaggtggtatgcactgggatagctctgaggaacactgattattatagtagcgatagaatagcgagagagatgcaacattgcggcggagagagagagagattgcagagagttggtgagtggacgggagttaatgatacgaaaggccttcctttcaactttgtctaggagagcggtgtgagaggaacctccccacacatgtgaacaatactcaatacaagggcgcactatgcccctgtacagagcaagaagctgtgcaggggaaaagaaccccctaagtcggttgagcacacccagcttctgggaggctgccttagcaagactggtaatatggtccatccaaatgagagcagaagaaaaagagacaccaagaatattgagagaagatgaagggttgatttttgtattgttgaagaataagggatagtccgctgggagatcctgacgggtagatagatggagaaattgggttttggaagcattaaagttaacaaggttttctctgccccaattggaaatagtatttagatcagaatttaagagttctatggcttcattacgtttgtcgttgagggattgctggctggggcgttctgaaaaactaatggagtagtgtaaggttgagtcgtctgcatatgaatggatgggaattaaggtacagttaaggagatcatttataaaaattagaaagagaataggagataggacagagccctgaggaacaccggagtttatagggtgaggaagtgaacaatggccgtccacaaccgcggctatggaacggccggaaaggaaattagagacaaaggcacagatggagggatagaaaccgaaggagggtagtttagaaattaaagatttatgccagactctatcgaaggctttcgatatgtctagtgcaatagaaaaagtctcaccgaactcctgaaaggaggatgaccaagagttagtaagatatgaaagaagatcaccagtagagcgacccttaaggaagccatactggcgatctgagagcagattatgagaagagaaatgcttgagaaatttggaagcaagaatagtttcaaaaactttagaaagacaagagacaagagatgagagcaattggacgatagttggagggttgagagcggtcacccttctttggaacaggttgaatgtgagcaaacttccagcatgaagggaagacgttagaggatagaaagagacgaaagagtttgcctaggcagggagtcagcacggaagcacagtttttgagaacaacaggaggaacaccgtccggaccgtatgccttattagtgttaagcccagagagggtagaaagtacatctttagaagatattaggatattaggcataagtaagagagaggagggcggagagggaggaatagcaccggaatcatccaaggtggagtttctagcaaaagtttgagcgaagagtttagctttgtcagaggaagaagtgatggttgtgccatcagagtgggaaaggggagggaaagacgaggaagagaaattgttggagaggtttttggctagatgccagaaagcttgggaagagctagagttggatagttcagtgcatttattattgatgaaagagtgtttggcaagtcgaagaacagatttggcttgattccgggcagaaacatatgaagaatgagagtcttgagttttaaggcgtcggtaccgtttgaatgcttcctccttattgcggacagcagtagaacatgcgtgagtaaaccaagatttttttagcattagtctgagagaaagagaatggaatgtatgcttccatgcccgataggattacctcggtaatgcgttcagcactctccgagggtcctcggccatggaagcagaaatcattccatgggaaatcaaagaagtactgccgaagagcctcccagtcggcagcgccaaagtgccacaagcgccgccggctaggatgatcgggtggctgtactggagagataggacaggtgacagagataagtttatggtcggagaagcccagaggagagaaaagatcgacagtataagaagaagggttagaagttagaaacaagtcaagaatgttgggccgatctccgatgcgatccgggatacgggtgggttgctgaactaactgctctaggtcatttaggatagaaaagacgtaggcttgttcaccaggtggatcagtagtgtgagaggagagccaatggcggtggtgaacgttgaaatctcctaagatggagatttctgagaaaggagaaatggatagaatgtgttccactgtagagtttagatagtcaaagaatttgggaaagttggtagagttaggggaaagatagacagcacagaaatatttagtaagagaatgacaggaaagtttgagccataaagttgagaattcagaggagtcgaaatcgggaacacgagagcaagtgagtttgttgtgcacatatgcacaacatccgcctttggctttgaaactaggatagagaaagtaggaggatacagagaaggggttgctggaagttgctacagacacctgagtttcggtgaggaagagaagatcaggtttgtaggaggagagatggtgctcaacagagtgaaagttagaggaaagtccgcgaatgttgcagaaattaatagaaagagtaacaggccgaggtccaggtaattgtgtggggtcgtcaggggatggtcggtcgggtgagggggcatttatggtcccccccccccccccccccccctgggggactcctaggctgggctacaattcatattttattttatttttaattttggtgtggaggaatgaagtgtggtgtgcatgtttagtgtagtgaagtggataggaggaggaggtgtttgtgagagctagctggattgctctcagtgtaaatgaggcacaaagaaaatcagcaagagaggccaagcaaatgaaacaggagttccagcgactctttatcacatgcctataacctcacctgggtctagccctgatctattggtgcctacaatacaaggtattggcttcaattctgatgaaaatcatcatatttaccatatataacattgttacttctccacatgcgcctattttacttttaaccctttagcgggcaaatgactttacggggatatttgcggtagggttggaatttgaacgctttaaccctttagcagaatgcttcacaacactttgaccaatgaccctgtttatataacttattcgggcaaatggccgtacagggatatttatggtagggttggaatttgaatacttcataatatattgactgaccaactggtgtttttgttactatattgaccttgtttatgtaactttctatatagatatatttatttattttatatattaagggacataatgtccacattcggcccctcgattcggccataaaaagagatggtgcccgcaccgccactgccaaaaagtacaagaatgtaaaatgttccctgggcaagattctcttggaacccgacggttcggatcccctaatcgaaaagcgatatctggccatctctcggatggccttaaaggcctctcaactgtgcactttcgtaatatgagatctactcgaaaaagaagaaagagaaaaaaggacgagcggagtaggtgacgacggcgaagctactgccgccgccggtgtagaatggcccgactttaccaaaatgaacacgttcgtgcaactcttcacccaaggatgcgaagccagaaagaggaggaggaaacccaatccggcgacctccgacacatgggagagacggttcgttagcgcacattacccgacccaaccccggtatcattcggactacaatctcgtcaattactgcgctaagacctatcagacgtgtttcaacaacaacctcgcgctaaacttcatgtcccgccagagacacgccatacgtttctacctcaatcacgtccacggggagacgatgcccactgctccgctcgtgtacgccctgcagactctcgtgaacggctggaagtacgtcggaaggacctactccgcgaaccaattggtggaactgaaagatcggcactcggtgttagtcgactggcacgcgatttatctctggaggccgatccctgagcgggccggtgaattacctgcggtactacggttttctcaagcgggagtattccgagtcgaccaaactcagaaacgtcccgttggttcctaccaacaaggttaaggcccactacgtggactttgacgcgatgggagtgaagggcctgtgtcgagaactgggcatcccgttgggagaactgaaagaaaccgaaggatgggggtttattttcgacttgaaacggataagaagaatggggggaaacgagaagtggatgtccgatcggtgcatgtcgaccgatggcgtggcctgttcgatccggtactacagttataaaaaaaacgacccgcgaacccacaccgcttccgctgtcactcgtcataatcacaagaggaagaagaaaaatgacgggaccgtcgccttccccaagggtacggcggaagtcgctgtcgtatcgttggaaggcaaacggatcatcggtgtggatcccggacgaaagaacattgccttctgtgtagagttggaccccgaaactcgaaagattaccaacaagacgagacttacttctaaacagtactactgcgactccgggatgaccgaggccaagagacggatttcgtcttggatggcccatccggagtacaaaaaagcccacgaagaattgtcgagagccgattccgaaaaagaaggagacgaagcaggaaaaaggtccgcttacctaaaataatacgttcaacattacaaaacgctatggcagaccaagatcgagaagaagtggagaagggtcaagtttcgaaagtactgtctcagccagaaaactctagacgcgttcgtcaacaaaactctgttcggcggcgataaccgctccccgtttcacgtcgcgtacgggtcggccaaattctcgtccaccggtaagggggagcactactcgtcccccaacggaaagctggccaaattgaagagagagagagccggcggcgaaaattttaccgccgtggacgagtggaacacctcaaaattgtgccaccgttgcatgggtcctctcagcccggtgggtttcgtgaaagttcaaaatgaaggagaaacggaagaagaaccaaaagttaccgagagattgatctacctgcgaggtttgcgccgttgctctgtccagagtaataatttcaacgacgtagacactcaaaggagaaaatgacaaagaagaatcggcggcaacgacaacaataaccctgtctcgagtccacccagtaaatgtccgatcggcggagcctttcttgaccgagacagtaaagctgctgccaatgttggccagaaactttttctggactcgtctacgttgtcgtcatcatcgacactacaaagaggggtcaaggttgaaacgaaacaagttttctggttaaataaagtttattgtaaaaaaattaccacaccgtgcacacacgtgacggagatgtgagtagtatggctctaaataaaacagggtcgtatataacccgaggcggcaaaccaatactgacccttaccacattcggatcggtgagttgtttgcccgctaaagggtaaatatgaaaatatgaacattgaacagcaataaaagaagtggtaacagcaattggctggtgaaaaacttatgttttggccccgcggtcctaatataaggcagaccggcgagaatacaaaggagtacaaagggtacaaaggaaaacaagcaacaacaggttatgcgacccctcgaggttacttgccctccaaaacactgctgttccaagtgttgcaacagtatttcggagagatgtgagacggaagtgctgccctggggcttagtccatggcagggaaaattatattaagatctaatagataattgaacaaacattactaaagaaattatttattcaattacaaatgcagtcaatgcacatgcagtggtgtaaggagaagagggaggggagtgaagggtacagcatggtggacagaagaagtaaaaacagctgttcaagacaagaagaaagggtatagagaaaaaagagagtagtgaagagagtagtgaaggaaagtacgagaagagaatataaggaatttagaaggaatctgagtaaaaaatggagggagtgtaagaaactgttctggaaagaagtcaagaaagttagggaaggtagcaagggaaatagtaagggtgtgaaagataagaatgggaaagtgctagccaagaagcaagagagagtcgaaagacggagggagtactttaacgaattgctgaatgtaaggaatgaagcgccagcacacatagttggatggggtatgggagggaaaagaagagaagtagtggagaaggaggtgggggtcaggaggtcagaagtgtgtgaagccatgaaatgagtgaagttggggaaagcaccaagaatagatggagattggagagtgttgagaaatgctgaaatatgatggtgagatagtgatcaaatgggtatggaaaatgtgttaactagcatggaagaaggggagtgcacctgatgactggaatacaggcataatagtccacctatataagggtaaaggggaaagaggagtgtgtagtaaccaccaagtaatacgtcttctaagcgtagtaaggaaggtgtacagtagggtagtgattgagagactgagagcgagaatggagaaatgggtagtcgacgagcagggcaggtttaggaagggaagaggatgtgaagatcagattgatactctgaaatgtcttgtatgttgcctttatggacttgaagaaggcctatgacagactggatagagaaggtatgtggaaagtacttagaatatacggagtagatggcaagttgctgaaaacagtgaagagattgtatgagggtgcaaaggcggcagtatgtatggagaatgagcagagcgagttctttgatctgaatgttgggttgagacagcggtgtgtgatgtccccgtggttgtttaatgtatatttggatggagggataagggagggaaacgagtggaagctacctgtactgctgtttgctgatgatacagatctgatgagcgacaatgaatgggagttgcagggtctggtaaatatgtttggaacagtgtgcgaaaaacagaatctgaaggtaaatgcggggaagagcaaggttatgggttgaagccaaagagtgaggtgaagttgaacggtgaggctatggagaatgtcagctcaattaagtatctagacagtgtgctgagtaaagatgggagtgcggataaagaaatgttggaacgctgaaagcagtaacaaataatagggtgatcagcatggaagtgaagaagtccttgcatgacagtgtggtaatcccgacattgatttaccgatgctgagcatggactttggtcaagagactcagaccaagagtgagaggggtggaaatgagttaattgagaagtgcgtatgaggacagacgaatgaggaagtaagagggaggtgtggtgtggaggtagatgtgctggaaagtgtgaaaaggaacaccttgagatggtttggccatatgaaacgtataggaagtgagagaatgactaaaatggtgtatgatagtgaggtggaagaacagagagggagaggtacaccgagagagaggtggaaggatggagtgaagaagtatatgaatgaaagcggagttgggtgggaggaggggcgtcgactgactggggacagaggtgcatgggggcattttgtttgtggccaccccttcggggatcactgcatttcaggcaatacatagatagatagaaatgcagtcaaccttgggttcagggcaaggtgcttgtttaggcgaacttttggcggaggacggggaatggtggaagtgtggcggtgagaggtgggacttctgaatgttggtacagtgaccggtaaagcgagagagctaggctgggagtcggcacagaagaacagttttttagtacaacaggaggaacaccatccggtccgtacgccttctaagtattaagccaagagaaggcagagagtacattcttggaagagattatgataaagggcataaataagtgagagggggtggcgagggatgtgtagggccggaataatccaaggtggagtttttagagaaagtttgagcgaagagttcagctttatcagagaaagaggcgacggcggtacaaaggagtacaaaggtaaacaaacaacaacaggtcatgcgacccctcgaggttacttgccctccaaaacactgatgttccaagtgttgcaacagtatttcggagataatgtgggaaagatgtgagaaggaagtgctgccctggggcttagttcatggcaggggaaataatattaagatctattaggttattgaacaaacactacaaaagaacatatttattcaattacaaatgcagtcaaccttgggttcagggcaaggtggttgtctaggcaaactttgaagtctatgacatcatggggaagcccattccacaagttgacgactctattgaagaagttcttggattcattagagttgaatgatttaccaattattttgcagccatttccctgtgtgtagtttgatagattaattggttaatatttactacaattcatgttgtctatgtatttaatgatcttgaaaacttgaataaggtcacccctcaatctgcgcttggctaatggatataaattttgttcttgaaaacgttcctcgtttggttttttgcaaagacagggtatcatcttggtaactctacgttgaactcgttccaatttgtctatatttgttttctagtaatggcactagaactgaatgcagtattccaaaagtgggcagactaatgaattgtaaagggttaggatagtcttttggtttatgtttacattttctacctatgaaacctataattttgcctgccttcttaacaccttcagcacaatgttgacttgttttaaattactggatattattaatcctcaattggtttatctacactctttagctgagttccattcatcgagtaacctgcattttcattgcagtatcagatatgaagtactttacacttatctttattgaagcacttttgccagattttagccctttgtgaaagcttgtttagattgttatgcatatcttcaacatgttcatttgttagtatggtatttgcgatttgtgtgtcatctgcaaactttgagattgtccaggtgagaccctcatctatgtcgttattgtaaattaggaaaaggactggccccagcactgatccttgaggtacatcactagttacattggttcacgttgatgcttccccattaataactacgctttgtttcctttccctaagccaatttactatccaactgtagaacggtgccttgtattcaatgtgattttaatttcattgctaactgtaggtatggaacttcatcaaaggttttctggaagtctaagtatataatatccacagctttactttcgtcatataaggtttgctaagcaggaacgatttttgcgaaaaccatgttgtgtgtcttttattatattattttccttcaagtgattaacgagtctgcttcttatagtttctaatatgttttgcatactactcaggtcaagttgattggagacgataattgctaggcaaggatttgctaccttttatacacattggtgctacgttcgcaagcttccactcatcaggtatttcgccagtgtccaaggatttgttgaaaatcagctttaggggtttggagagctcgaaattagcttcttttaagaactctatgaaaaattgtaatgggttcaagtgaaatttgttttccttgaggttatctaaaaatcttcgtacttctccctcagtaatgctaatattcctaagaacttccaaattgtttgtctgtgctggcagtactgtagggatgtcacttaggtattctgatgttaagactgatgcaaagaagttgttaagagcattactcattttggcatcagcattggtaaaatctatattttcatcgacccagggtccaattgttgaagtcaccactttcctcttcctgatgtaactgtagaattattttgggttcgtcttactttgattctcaaaatgtaactccaaagtgtttttactttgtttaattaaccttttggatttacgttgtagatctccgaagtcctgtctattttcatcgttatcggaggtttgtaatatctcatgagcattctttttagcgaatagacattcagctatgtttctattccactattaggtttgtggataattatcttctatatatttatggtatgcatcgcatactgtgttcgtgttaatttctgtgaaaaatttccatgattggtttatctcatttttgtttagaaaactccaattggcttctttaaattttattttgagtttacggaaatttgctcgcttgaaatttggaacttctcattgttggtattgagttttttgctattaaatttgatactgaaagtgatcgtccgatggtcactattgcagaattcatcaccaacagtcacgttattgatcgagtcttcttttgttgcaagtacaaggtcaagaacattattaccgggagttggagattgaacaaattgatgaagggaactttcttgtaagtttgcttacagatcgtatccagagtgtgaagtaagagtgtcaccccacatggtcactagtaaattaaagtcgccaaaatatatagtatcgtgtatgttacttatttctgcaatttgcttgtaaatttctttgtcggtttgcgctggttggtctgtatattaatactaggaatatttttgttactttaatttttttttattagcacataagatgaatcaatatttactatttgaggttttgacaagagaattgggataagactttctttgatgacaaaatataacaccgcctccatttttattaactctgcttttctcaaacattacacaactgggaagagaaaacgctgctaaaaagtctctgtcttccgtatttagccaagattctgatatgccgattacatcaacattttctgtgaacactagttcctctaattctgaaaatatatagcgtatacttcaagcattcacgtagaagacctttagagatgtggttcttgatataatttgatgctcgccacatgtatttgatgattttgcttgtcttgagtttgtatttcttctgagattgaaattgtcctcccactctgatgactgttggccccattttttaacaaaagttctttatgtcatcattcagcagacggccaaaccgggcagctccttaacgggtttaggtggacaccatctcttgagaacaaatgttgatcgtggtagaaattattccaagtgttgatgaagccgatgttctctttcctgcagatgttggcgatttatattcgtggctgtggtccagaagagattctttgcgttaatccgtggaaagatacccgagataacgatcctgctagatttgtctctatacgtcttgatcagcttcttgtatttgttcaagtgttcctctgatcgtgtgcactggacgtcgttcgatccgacatgtatgacgtacgttgtgtttgtgggggccagcctggttacctcggtcacaacagcagcgacgtcatccatgccaccacccgggatacagaatcactttctggtcctgggtgaccaggcgcagaactccttgagctggccgcgtactatggagtcccccacaagcaggacttcctgtttcttcttcttcatcagtagcgagaatttggaaacagtttggatgaccttcttggtagcagtacctatttcttgcgagctaaaaattattttcattaggaacgagagttggggtattgtcagaggtctggttggtggttgaggtctgaggtggtgctacatccaaccttgggcgattctgaatccctgtgtcttgttgctggcagggtggcgtaatttccgacgtttgtgctcaggaacttttcaagggtattaactctgcgagttaacatattaaataattagagagcttttcctagcttctcctcttgttctgcccgctggacatagaacctgcagtttgtcatgctctcgttctcgaagaatgtcgtaccaaagcttccgttgcacgacactcagtcacgtagattgggcatctatctagctgtggtcttcgtagtgatgatcaaggcaaaacaaccatttgggagtgcttggaaataggctaccatgggcagtcataaacaaagattctggaataaaataaaacagaaataggctaccagtggtactagcctagtcaaagacaaacattacgaaatgcatagcaaaaggccaccagggggtagcctagtcagaagcagaaaaagataatttcgtaaatcgtagaaataggctaaaggggtgcagaataggctaccgggtgtgatacgcaggaattggctgactgacgcagctaggtcacaaaaagagggtcggaataatttgtccttgcacgaaaatactcgataaatattgggaataataggaaaaatacccaataattgaggaggggggaagaaggtgcagagagggggggacacatgtggaggagtgatagcaggtactggaggtgaattatctcacataatcacatattgctttgttttgagtatcagtggggtgttttgaacagtgttattgtttgtgttggctctcgagaggacgctcgccgtccaccagtaaaacctctctagaggactcatgccattcttgggttaactcataacaatagacgatgcccgaccatattcgaagatgctgtgaacgatgccatacctgctttctataaatcacatgacatgtattaataaggtgtggtcttctagtgttgcagaaaggaaacaaccaacaccttgaaataccatctagtgtgacacacccagctcctcaaagtttcactcaataatcccgggaccttgaaagagttgcagcttacagcccccaagtaaaaacctatctgcttcttcttcttcgatatctcctacgttactttttgcctctccttcaccataatgttttgccttaacttatggctaaccattacctcttctgtctacctgtcaatttgttcttctacctaactttcagtcttattctattctcctatactatctgccttctttccatctgccttactgattccctcttctccttcttacctaattgcctgcctatgttcttacctctgctttcagctacactctaaaaaatggaaacatgtagatgcttaaattcctcgacgcactcaaggacaggtttgtcttttccttaagccagcatccttgtctcactttactctccccccacccccaccctctctctctctctctctctcactctctcgtccggataactatctaattttcagtcacattcaagttgttgtgtatacactttacaagtcacatgtaaccggtgtctgctagtggcttccgacttcaatttcatggacatttacattattaattaggtgtgctcagtacagcccgtaagaccatcatctctgtaaaccaaaaataaatatcatctacattcctcgaacatgatcggccggttatgttcgttagtttttgtttctgcagctgttttggtttacggctgttttgtccatgaccaaacgggtccgtaatcgatacaagcccagccaagtgatcaatttagtctgattgtccaggcaaaatatagctggaattcgcaaaaattgcaacagaaatgattttacttatattggcttgtggaaaccctcaacagtctatatcaactgtctattaaaattcagaaaggggaaagtcctcaaaatacctacatctgttaattagtccaatcacaatgtagctagacctaacaaaatgcaacagcaaatatttcacctatatttgcttcaagaaacccccaagtacaacatatcaaaagtccgcaatagtccggataggggaaagtcctcaacattaataaaccaacataactttacaacaaagtgttctaacatggcaaaattggtgtctctacccatgttttcatggtcaaggaatccactgatcattggattaacccccctcaggtattacataatattaacccccctcaggtattacataatattaacccccctcaggtattacataatattaacccccctcaggtattacaatattaacccccctcaggtattacataatattaacccccctcaggtattacataatatgtggtatgtaaattagaagcagccaatacccaaaaatcgaacattattgtaactttgcagccaatggtgtaaactcggtaaaacaggtggctatatccatattttcaacgtcagggaatacaatgatcctaagagtaaccgcctatgtgtattacataacaagtactatgctaattaagaggtgaccaataatgctaactactaaatgtctatagggatcagtgtatcaaaaaaccgagaaaaagactcaatttcattattccatgcaaaaaccgtccacatcattgctttaccccacaaaacaaaataatataataggacattaataggaacagaattaccatgatggcagtattgagtgcttcacttatcgaagtccagtttgtcaaggggttttggagaatttgaacagctctatcttttacagtcaccacatacaactgtttaatcaaatgtgcactggcaggtgcacat

SEQ ID NO: 151 - DNA, 20669 bp, unidentified
  misc_feature 1..20669: note = Fanzor polypeptide
  variation 16302..16801: note = n is any nucleotide
  source 1..20669: mol_type = other DNA
ttgagccccgttgtgtgtctacgtctcgtgtattagctagcctagttttaggggctctaaatcccgtttcgtgtctccaccatacaagaccagttcactttagtgtacaatctcagatttttttttttgagaaaatattatttttgtcaagtcaatcttaactagcctagtttttagggggatttgagccccgttatgtgtgtgtctcgtcgtcgtgcattagctagcctagttttaggggctaaatccgttttgtgtctccaccatacaagaccagttcactttagtgtacaatctcagatttttttttttttgagaaaatattatttttgtcaagtcaatcttaactagcctagtttttaggggggaagtgataaaattgcctgagagccgaatattgcagcttcccccaaaccagctgggcaggagggttttcatgttacaaccacctttctcacacacatatatgtgagtagtacgggctctaaataaaaaagggtcgtatataaccccgaaacggccaaacaatactgacccttaccacatttggattggagagtcgtttgcccgctaaagggttagataaaaaaaacagcagtcttccacagggtcccaccgactttctcaacactaaacgtatacatcaagttctgggcaagccaatctgacctgtagacgtagattgtgctctcaccaggtagtctggggagaagtgccaatattgtctgagagccgaatattgcaacttccctcaaaccagctggtcaagccaatcttacatgtagacgtagcttgtgctctcaccaggtaggcatgtagacgtagattgtgctctcaacaggtaggttgaggaaagtgggcatattgcctgagagtccaatattgcagctttcctcaaaccacctggggaggcgggttttcaagttacaaccgactttctcacacacgtatactgtacatccactatttcacacactggtatattgtacatagagtcttcatcatctttatgtcttagctagcctcatccctcaagttctggtcaagccaatcttaactcaccatagcttccacagggtcccaccaactatctcacacacacactggtatactgtatatagataaagtgcaggtcaagtatttaaaccccattgtatgtcttcatcatcttatatggaacggtgaagatacacacggacagcgtcgccatatcttccacagggtcccaccaactatctcacacacgtatattgtacatcgggtatactgtacatcgagtcttccccattgtgtgtcttcgtcatcttatattcacaaactcaggaacggcgaagatacacacggacagcgtcgggtcccacctagtgaagttaatttttagctcgccataacttccacagggttccaccgactatctcacacacactggtatactgtatatagataaagtgcaggtcaagaatttaaaccccattttatgtcttcatcttatattcacaaactcaggaacggcgaagatacacacggacagcgtcgccatatcttccacagggtcccaccaactatctcacacacgtatattgtacatggactatctcacaccctggtatactgtacatcgagtcttccccattgtgtgtcttcatcatcttatattcacaaactcaggaacggggaagatacacacggacagcgtcgggtcccaccaacatcacacgtatacttgtacatcaatcatcaagttctggttaagccaatctgacatctgacatgtagacgtagattgtgctctcaccaggtggtaggctggggaaagtgcaatattacctgagagccgaatattgcagctcccctcagacccagctggggaggcgggttttcacctactttcacacacacgtatacggtaatcaattagttctagtgaagttaatcttagctcgccataacttccactatctctcacacacactggtatactgtatatagataaagtgcaggtcaagtatttaaaccccattttatgtcttcatcatcttatatggaacggcgaagatacacatggacagcgtcgtcatatcttccacagggtcccaccaactatctcacaccctggtatactgtacatccagtcttccccattgtgtgtcgtcatcatcttatattcacaaactcaggaacggcgaagatacacacggacagcgtcgccatatcttccagcagggtcccaccgacatcacacgtatacttgtacatcgaacagggtcgcaccgacttttctcaacaccacacgtatacttgtacatcgaacagggtcccaccgccaacaccacacatattcagtagacgtagattgtgctctcaccaggtagactggggcagcccgcaatattgtctaagagccaatattgcagcttccctcagacccagctggggaggcgggttttcaagttacaaccgactttctcacacacgtatactgtacatagacttaagccaatcacacactggtatactatacatagagtcttcatcatctttatgtcttagctagcctcatcgttcaagttctggtcaagccaatcttagctcaccatagcttccacagggtcccaccaattatctcacgcacgtatactgtacatagataaagttctggtcaaatatttaaaccccattgtgtgtcttcatcatcttatattcacaaactcaggtgtcttcatcatcttatattcacaaactcaggaacagcgaagatacacacggacagcgtcgccatatcttccaacagggccccaccgacttttctcaacaccacacgtatacttgtacatcgaacagggtcccaccgacttttctcaacaccacacgtatacttgcacattgatcaagttctggttaagccaatctaacatgtagacgtagattgtgctctcaccaggtaggctggggaaagagtaatattgcctcagtgtcgaatattgcagcttccctaagaccgagctggggggaggcggggttttcaagttacaaccgatgttaagccaatctaacatgtagacgtagattgtgctctcaccaggtaggctagggaaagagtaatattgcctgagtgccgaatattgcagtttccctaagaccaagctgggcaggcgggttttcaagttacaaccgaagtcaagtcaatcttagctcgccataacttccacagggtccccttccacagggtcccaccaactatctcacatactggtatactgtacatcagactatctcacacactggtatactgtacatagagtcttccccattgtgtgtcttcatcatcttatattcacaaactcaggaacggcgaagatacacacggacagcgttgccatatcttccaacagggacccaccgacttttctcaacacacacacgtatacttgtacatcgaacagggtcccaccgactttctcaacaccacacgtatacttgtacattgatcaagttctggttaattcaatctaacatgtagacgtagattgtgctctcaccaggtagactggggaaagcaacatattgcctgagagccgaataatgcagcttccctcagacccaactggggaggcgggttttcaagttacaaccgactttttctcacacacgtacactataatcaatgagttctagtcaagtcaattttaactcgccataacttccacagggttccaccgactatctcacacacactggtatactgtacatcaagtctacatcatcttatgtcttagctatcctcatctggtcaagccaatcttagctcaccatagcttccacagggtcccacgactatctcacacacgtatactgtacatagataaagttctaatcaagtatttaaacccaattgtgtgtcttcatacattttatgtcttagatagcctaataattttggggggctctgaatcccgtttaaaaaaatatattaggatgtaaatgaaacacaaaaattaaacttatatatatatattcacaaactcaggtacggcgaagatacacacatggacagataacagccgtcgccataaatttttttttttcccagttttaaaatcgttagtcttgttcggcaactcatctaggggagacaaccttatacaaattcgggtggatgggactcgtcaaccttggttggcaacctgtctaggggggtaaacctgatatacaaatccgtattgtttacctaagggtaaggcaggttagtggatggattagccgaacaccactgtagcaaaaaaaatagtgctaacaagatacacagagggcctcggagtcggaccgacccacagggtcccaccgactagactatctcacacacacatacacacaacaaagttctggtcaagaattctagtgccatcctcactcgtgacgttttctcatctttacatacaaggaagactcaagacggcgaagatacatggacaggtaacaaccatcgccatagcttccacagggtcccaccgactagactatctcacacacatatacacacgatcaagttctggtcaagaattctagtgccaccctcactcaccaaaagaagtgacgttttctcatctttgcatacaagtcttcttttctcctcattgaataaaattcagacttttcttgacctcctcgtacaacgattccaccacaacgaaggccaatcaccaccgccaccaccattactactaccaccaccaccattactactaccaccaccaacatactggtatatatatatatatatatattaaaagaagacgcaggggtgtgatgtgctcagcttaagagggtcgactttctgcgggcaaaaatcctgggaaaaaaaaatcataaatcaatcacagggtcccaccgactatctcacacacatatacacacgatcaagttctggtcaagaattctagtgccaccctcactcaccacaagaagtgacgttttctcatctttgcatacaagtcttcttttctcctcattgaataaaaatccacaaattcagacaatgtgtaaacactcttcgtcatacaacgaacaccaccactgccaaaacgccaccaccgccaccatgactactaccaccaccaccattactactacaccagcaacataccacatatatatatatatatatatatatatatatatatatatatatatatatatatatatatatatatatatatatatatatatattaaaagaagatgcaggggtgtgatgtgctcagcttaagagggttgactttctgcgggcaaatatcctggggaaaaaaaatatcataaatcaagtacttctcaatagactatgcctaaaactcactatgaacatacataatattatacaccctatgaaccaaaataaccatccaaaaacacatgaaaataagggcaaacgaaagaggtcaaaataagtattatttgacaatatattaattaagagggccgacttttcaatgaattttgattatcaattatgacccttattttgtaatattatttattttgatattgtagttttttacctttaagagttgcacaccaggcaggttttgagctagtgatgaccacacacatacttcttacaacttcatcaggtaatcggctacccctgagagttgtggcaggtgcatgcggtccacccatacgcgcagggtcatccacactcgtattgtcgtaattggagggaatctgccgtggtagtcctgggtgggttaaagtttgtatggcagccatgactgcctgcatgtatcatcggttcaagggttatcacatgggtggtggtttggtggtcataaacgggtatattaacatattttgatgatgtggttggttgaggatcagtaacaggtatattaatatattttgatgatgtggtggtcagttgatgggggatttcattagcaataacctggtgttcattagttgtgagggtggtttggagatttccatttgttaatggtacatcttgatgggggattgcattgttggcacggtgtttctcagatttggtattaccaccaccaccaccaccgccactactactactactactactactactactactactactagtagtagtactaatagtactactactactgtgactatgactgttttttatgttcacttgttgcgttgatttgtgacaactatttggtggtgtcttgggtctgggttgtgtcctcctcctactcctactattactactcctactactactactaccacgtctgctactgattttcaattattgtttggtactatcactactacttatgttcacttgttgtttgcaaccagtggatttgtgaccactatttggtggtgtcttggggttgcattgtgtgagttgtgtgtcctactactactaccatcaccactactactactactgatgttcacttgttgtttgcaaccagtggatttgtgaccactatttggtggtgtcttggggttgcattgtgtgagttgtgtcctactactactactactactgatgttcacttgttgtttgtaaccagtggatttatttggtggtgtcttggggttgtatttagcgattagtttatgtctaagttgtatccagtcttgcatgcatttttggcgttgtgctattaaacattctaactttggggatatgttgtttcttatatatgttcgttttttttaatggttggtgctagtggtggtggcggtggtggtggtttattatttatctggaaagtaaaaaaaatcgggtataattataatttatataaatatacacgtataatattttttaaccaattcactccaataaaaaagttccatttcattaaccttttttattttgtgttggtgttgtgatgatgatggtttcccccgtttagtggtggtggtagtagtaggtggcggcggcgtaaagaaccctcccttgcccccgctatagtatttatatttaaatagtgagatattttcctatcatttcgatatttccacttttttttctgttctatatagggattcaaaacttgtctagggaaatgtgggaataatcgtatgtattctgattctggctttctgtggaaaagtcctagtaatctttcacatgtatcatcggttcaagggttatcacatgggtggtggtttggtggtcataaacgggtatattaacatattgtgatgatgtggttggttgaggatcagtaacaggtatattaatatattttgatgatgtggtggtcagttgatgggggatttcattagcaataacctggtgttcattagttgtgagggtggtttggagatttccattttttaatggtacatcttgatgggggattgcattgttggcacggtgtttctcagatttggtattaccaccaccaccactacacctactaccactactactactactactactactactactactactactactagtagtagtactactaatagtactactactactgtgactatgactgtttttgatgttcacttgttgcgttgatttgtgacaactatttggtggtgtcttgggtctgggttgtgtcctcctcctactcctactattactactcctactactactactaccacgcctgctactgattttcaattgttgtttggtactatcactactacttatgttcacttgttgtttgcaaccagtggatttgtgaccactatttggtggtgtcttggggttgcattgtgtgagttgtgtcctactactactactaccactactcaccactactactactactgatgttcacttgttgtttgcaaccagtggatttgtgaccactatttggtggtgtcttggggttgcattgtgtgagttgtgtgtactactactactactactactactgatgttcacttgttgtttgcaaccagtggatttatttggtggtgtcttggggttgtatttagcgattagtttatgtctaagttgtatccagtcttgcatgcatttttggcgttgttctattaaacattctaactttagggatatgttgtttcttatatatgttcggttttttttaatggttggtgctggtggtggtggctggtggtggtggtttattatttatctggaaagtaaaacaaatcgggtataattataatttatataaatatacacgtataatattttttaaccaattcactccaataaaaaagttccatttcattaaccttttttattttgtgttggtgttgtgatgatgatggtttcccccgtttagtggtcgtgggtagtagtaggtgggcggcggcgtacttgtctgaaaagtaaaatattttcggtagtctatataaatatacacttttaatatttttaaccaattcactcaaataaaaaaaaatcatgtactactactactactagtataattatcatttatctgaaaagtataaatatacacgtataatatttttaaccaattaaccaattcacccataaaaaagttccatttcattaaccttttgtattttgtgttggtgttgtgatgatgatgatgatggtttccccgtttagtggtggtgtggtagtagtaggtggcggcgtacttgtctgaaaagtaaaataattagggtataattaaaatctatataatgtcttctttatccacattacaaagaggagtcaaggtggaaaagaaacgcgttttctggttaaataaagttcattgtaaaaaaaaaaaaaaaaaaaaaaaaaaaaaacgtgcacgttaagtaaagttcattgtaaaaaaaaaaaaaaaaaaaaacgtgcacacacgtgacggaggtgtgagtagtacggctctgaataaaaaagggtcgtatataaccccgaaggggatatataagttccatttcattaaccttttgtatttcgtgttggtgttgtgatgatgatgatggtccccccccccccccccccccccccgtttagtggtggtggtagtagtaggtggcggcgtacttgtctgaaaagtaaaataattcggttataattatagtctatataaatatacacttttaatatttttaaccaattctctcaaataaaaaagttccatttcattaaccttttgtattttgtgttggcgttgttgtgtcgacaatgtatttttccgtttggtggtggtaggtggaggtgatggactcatctaagggagagtaaaaaaaaaaaaataaaaaaaaaaatgccctatttcggtcgtgtcaatcttagctagggaggggatctgaacattgaaaacatattttctgagaggtagagtgtttcagagcagacaggagggagctaggtagactgtttcagagcagacaggtagagagcgggtgaccctccaaggcttctactcaggccggtattcatttctacacctcaatcactcgtcccgttttgagaagctatgtgtcgatcttttccatggcagcccttgagcctatggagaattccctgcgctcccaagtatttttttacattttatttctataacattcaatatcgacgatagagtgttctatccactttctttttctatggctgctcaagtgggcaattccgtgatacgggatctactcgcaaaagaagacagagtatctccggtggcgacagaatggcccgactttaccaaaatgaacacgatcgtgcaactattcacccaaggatgcgaaaccaagaagaggaggaaacccaatccggcgatctccgacacgtgggagagacggttcattagcgcgagttacccgacccaaccccggtatcattcggattacaatctcatcaattactgcgccaagacctaccagacgtgtttcaacaacaacctcgcgctaaactttgtatcccgtcagagacacgccatacgtttctacctcaaaaatgaccagacgggggagaagacgacacccaccgctccctgcagactctcgtgaatggctggaagtacgtcggaaggacctactccgcgaactaattggctgaactgaaagatcggcactcggcgttcattgaccggcacgcgacgtatctcgggaagccagctctgagcgggggaccggtggcttacctgcggtactacggttttctcaagcgggggtattccgagtcgaccaaactcagaaatgtcccgttggctccaaccaacgtggtcaagatccactacgtggactttgacgcggtgggagtgaaggacctgacggcgtggcctgttcgatccgatactacaggtataaaaataacgacccgggaaccagcaccggtcacaagaggaagaagaaaaatgacgggaccgtcgctttttcccaggggtatagctgaagtcatcaacaacaacaccactaccgtcgtatcattgaaaggtaaacggatcatcggtgtggatcccggacgaaagaacattgcctattgtgtagagtcggaccccgaaactcgaaagattaccaaaaagacgagactgacttctaaacagtactactgcgactccgggatgaccgaggccaagagacggatttcgtcttggatggcccatccagagtacaaaaaatcgtgtacaaatatcgccatggtgaaagacgccaattattcacggttaagcttgatgcatttcacgcaacactgttccaactatatcccctccagaacttgagcgatgaggttagctaagacataagatgtagacacacaacggggctcaaatccccctaaaaactaggccagttaagattgacttgacaaaaataatagcttctcaaaaaaaaaaatctgagattgtacattaaagtgaactggtctagtatggtggagacacgaaatgggatttagagcccctaaaaactaggctagctagctaatacacgagactgacaaaaactaataatatttcttctcaaaaaaaaaatctgagattgtacattaaagtgaactggtcttgtatggtggagacacgaaatgggatttagagcccctaaaactaggctagctaatacacgagacgtagacacacaacggggctcaaattcccctaaaaactaggctagttaagattgacttgacaaaaataatatcttctcaaaaaaatctgagattgtacactaaagttaactggtgttgtatggtggagacacgaaatgggatttagagcccctaaaactaggctagctaatacacgagacgaagacatacaatgggatcgtatcttccacactctcataattatttatgattttttaaagtaggccgtatacctttcaatcgtggataataggggtaggcgtttttttcgagtatgtatggagtatgccgactgcatcgcgagtagcgcgctcttggaaacagatattggttgaaagcgcgcccatccaggtgtctccattcagaaggaatttccaacacgaaccgatgtaatattctcaattctagagacgatagactgggtgatataattctacacctgggcgtcaccgtgagctactctcggatgcctggtgtatctacgttcgttcacaattatcctgttaaactggacgcgagtttgtcaggaaactggacgcgagtttgtcaggtgaaacaattttggaatctatcctgagtaagtgtagagcacgtataaaatacctgtatagacaggtgggatgcttgcccgcggcgaccaaaaagaccctctgccaagcacttgttcaatgtcattttgactattctgtgtcatcctggtactctgcatcatctaaatcagcacagcacaaacttcaggtcactcaaaataaaatggttaggttcatgctgaacctaggacccagatcacatgttagccaggaacaacttcagtcactaggtatgctcaatgtttctgacagggccaaacaaatcaggctaactaatgccttcaacattttctatgacagagctccagagtatctaaagaatgattttgttaaagcaaatgagaggagtggacataatacaagaaacatgatgtttaattttaaggtcccgagaatccaaggacagggtaagcaaacattcttcttcactgccatcaaagactggaacgacctacccctgtcagtccgtgaaaagagaacactgtattccttcagacgtagcctgaaggaacacctgaaccggacagctgcgagaagggagcaccaagcttatgtctactactaaataagacataagagatagacaaaccaaactgaaatgattactgattacggattactgatatttactataggatgtaaggtatcttaaaataaccccctagaaatactttctctaaagtatctatttctttatcctccccttttccccagctaacctaatcccacaaggaccccaatggaaatacgcctaacggccttattgggctatccttagttggaattatgcaatgcaatgtcatatttgtaacaaactatgtggtaccaactctgtaaattgctgactgaataaatattattattattatattattaagtagtagaaacacaatggggtttaaatgactttctccaaaaatattttacataaagtgaactggcctttgtatatggctgcacaatataccttgtattgaattgtatagaaattaaatgaaatgtacaaatgtgcctttttatctccttcagtgtatatgggacctggttggaacactctcaatattgtctcccccagaagataaaataaataaccctacacttgacacattcaaacagaataaactaacacagcgccctacacattataaaaaacatatatattatagaatacagagggagagaataccttttgtgtcggggagtagcttaaattgtagttcgttctctgtgagatggcactatttatatgtttggaaaaggggagtggctagtgggggtggactctaaataaaggggtgtgtgtgtgagatcatatccggatggggaactcaggggaattcccaaattgtgtgtacatattatgtgtacatattatgtacaagaccaattcactttagtgtacaatctcagaaaatatttttttgagaaatattttttatcttaactttttttttttagtcaattcaatcttaactagcctagtttttagggggattttagctccgttatatgtctacgtctcgtgtagatagcctagttataggggctctaaatcccgtttcgtgtctccacatacaagaccaattcactttagtgtacaatctcagatttttttgagagaaaatattattttgtcaattcaatcttaactagcctagtttttagggggattttagctccgttatattatatgtctacgtctcgtagtagatagcctagttataggggctctaaatcccgtttcgtgtctccaccatacaagaccaattcactttagtgtacaatctcagaaaaaaaattttttttttagtcaaaaattttatttttttgtcaattcaatcttaactagcctagtttttagggggattttagcttatatgtatatgtctgtcgtctcgtgtatatagcctagttataggggctctaaatcccgtttcgtgtctccaccatacaagaccaattcactttagtgtacaatctcagaatttttttttgaaaaaattattagagaaaatattattttgtcatttcaatctactagcctagccttttttagggggattttagctccgttatatgtctacgtctcgtgtatatagcctagttataggggctctaaatcccgtttcgtgtctccaccatacaagaccaattcactttagtgtacaatctcagattttttttttgagaaaatattattttgtcaattctagtttttcaatcttaactagcctagtttttagggggattttagctccgttatatgtctacgtctcgtgtagatagcctagttataggtctctctaaatcccgtttcgtgtctccatacatacaagaccaattcattttttttagtgtacaatctcaaaaaatttttttgagaaaatattattttgtcaattcaatcttaactagcctagtttttagggggattttagctccgttatatgtctacgtctcgtgtagatagcctagttataggggctctaaatcccgtttcgtgtctccaccatacaagaccaattcactttagtgtacaatctcagatttttttttttgagaaaatattattttgtcaattcaatcttaactagcctagtttttagggctctgcggtcagccggcccggacgtgtctctccacgctccgctggttccgcatttgctgcgtccctagtgagttttttttcatttgtttactccgggatgtatcgagtaaggttaggatatgcgtagcaggagtgtcctgggctggttgcccgcagtgcagtgtattttgggtcgtgtgtttggggcatctatttcggatgtaccctcgtgggtcggttgtggacaggtgaactttttcacagttagctagctttgtgatgcaggcggctttcattacgcgttattgcttccttttatctttctgatgaggtagcgtatttttgctgacgttcccagcgtatttttcttcacttagtgaagttttttttgggtcccgagtcagttcttccctttgccggaagtatttgctacagtggtgtgttggcggtggttcctgttgtgatataattcagtgctttttgattatattccgacatgttaatgttatccgtctgcctaggcctagccagcctctcgtagctttaccacatatacaagtgttattgatttattttctaaatatgtactactgtgtgatgtgtgtcctggtttagttgtgtattggctaattccacggactatttatgtgtcctgggttagttgtgtattggctaattccacggactatgttgggcccggcgttagttgtgttttggctacgcctcggtcctgtgttgcgttcagatggtatctggacggggtgggttttttccggcggggtttttctcggtttacaccatgaaaaacccggctggttgccgagttttggccatgcgtggtttaaaaacaggcttgtttccccggcgagtgggtgtctgtggctccccaggactgcgtctctggggtgcctgtttcaggctccttctgattcccggcgggttggctgtacccatctaacagtgttcatacggacacgtgttgtttgtagttttttttcggttttgcaaagccaatataaaactatgctgttgttgtatttcctccccggcgatcttttacaaagatgtggggttaggaacaattggggttaacttttaaactttaaatcacccggcgggtgcaacctggtagggtgggatgcccgaatttgcaaaattcagtttagttgaccagacaattgagggatgcattgtgtatcgcctccttcaacatacggcgctttagggcacaattggggttaacgtttttaaaactaatattcacacccggcgggtgctccctggaggggtgggaataacgaatttacaattcagttagttaaccagacaattgagggatacgttttgtatcgccgccttcaacatacggcgatctaaaaagatacttcgggagaagttagatctcgtatatttgtcaggcttcccagtttttgatctacgagataattcgggggccggcgtttttttagtttttttttttctccaaaattgaatcttgaaacaaacaccaccggaaagacttaatcagttataaacgccatgctggtctttatatattatgtcagagggtattcataaatcttttggacaaattaagatattctgaaatcttttacttaggaaaccccaccgcgtagcgagctgtagtcgttgagtattacgtctcgttacccggcgggttatttaacacttgtgtgcgaacatgtttgggttaaccttatgagcattaattcctggaaaaattttccagagctgggtcccggcgggtctatgcagaacctggagtaatgatcccaccagtctctgtcatggctacctttgccccggtttttgctttatgcattacgccctcctgttcaggtatccctatttttgcgcacaccctttgtataaaatgtgttaaaatgtctcgtttgtgtgggttacctttccggcgttttttttctcgttgctccgagaacaccgtttttgtttaccgagttttagtcaggatggctcaaaataggtaagttactccgacgagtttggtcgcttgagggctcataagaaactgcgttttctgtggtcgagcctgggatcaggcttccnnnnnnnnnnnnnnnnnnnnnnnnnnnnnnnnnnnnnnnnnnnnnnnnnnnnnnnnnnnnnnnnnnnnnnnnnnnnnnnnnnnnnnnnnnnnnnnnnnnnnnnnnnnnnnnnnnnnnnnnnnnnnnnnnnnnnnnnnnnnnnnnnnnnnnnnnnnnnnnnnnnnnnnnnnnnnnnnnnnnnnnnnnnnnnnnnnnnnnnnnnnnnnnnnnnnnnnnnnnnnnnnnnnnnnnnnnnnnnnnnnnnnnnnnnnnnnnnnnnnnnnnnnnnnnnnnnnnnnnnnnnnnnnnnnnnnnnnnnnnnnnnnnnnnnnnnnnnnnnnnnnnnnnnnnnnnnnnnnnnnnnnnnnnnnnnnnnnnnnnnnnnnnnnnnnnnnnnnnnnnnnnnnnnnnnnnnnnnnnnnnnnnnnnnnnnnnnnnnnnnnnnnnnnnnnnnnnnnnnnnnnnnnnnnnnnnnnnnnnnnnnnnnnnnnnnnnnnnnnnnnnnnnnnnnnnnnnnnnnnacagttttacaaatgtactggaaccgatctaacgctgaacattaaggaaaaatgtcccaagacagtagaggaggctgccaagatggcagacctcagattatcattgattcgtggttgcggtgccgctcagagggctgagtcagggcagaaggggcgctataccccacccaccagagttttcgataataacaaatcctatgacacacataaccacactaaaagcattgcacctaataacacctacaaaacacaagcctctcccgtttactaaaggtcaggccccttcttcgcccgcacaagggaagaagcccattggggatgtgaaatgttacaaatgtcagaagctaggccattattcacgtgagtgccctagtaacactcccgctaagccggtgtcattggttcacagtatcggtgtgtctctgaaggctgcagcaactgcccggggtaggttgtcagcagctgaggcacacgcggtaaagaagcgtacggaaggctcgacacctgtccgggacactttctgtagccatcggggacacgggtttgtgagctgggggagtgaactacggagggttgacttgttgagggatacgggggcttcgcaaactttgttgaggaacttcacagggaaaccgataaaatgcggccagagttgttgtggtgcagggtataaatgctacgaggtcatacccacttgtgaggttggagttgagagtgggagaggtgtgcagggagctggatgtagggatcgttgagtgtttgccagttgagggcgtcgaccttcttctcggcaacgactttgcggtgcccacttccgggactccacccttagtcgttgccgagagggcggccgacgtggatggtgagaatcgggaatgggttgggaggtgccaacaggatgagatggcctgtgtggtaacccgatctcgctctgcggctcctgcacagcctagcactcaacctcggggacagtggaggaaggatcaggagaaggttgctaagggcaggaaaagggacattgattctgctgcacttctcggtgattcggtacttggacctataataaacacgggagttgactctggcccagagatggtgtgtaacaaggcagagttgggtaagacttcgcgtgaggcaagagctgtagcgagagccactaaggcagtagagcctactagccggggtaatgtcttattacaaaaccatcttgatgcattgacgcccggggacattagtgagcagcagctgcaagacgctagcctagctcgttatagcaatggtgccatagagttggaggaagatggggatgcgagccgggagagacttataggttgcatggcagcggcaggtaataacttggttaatgcacaggcggtcatgaagcaccagtatgacgccaaggtgaagcttcgggagttttcggtgggtcaggaggtaatgttgcttttacctttgcctggacaccccctttttctgccaagttcattgggccgtatgtggtggctaagaaactgtccgaccttgattatctcgttgcaacacctgaccgtaggaaaaaacatcagttatgtcatgttaacctcatgaaagagtatgtgagacggccccctcagagcctctcactgtccctgtgctggcctgcagcggccagggtggagaaggaggtggggacagtcatgctgctgaggaggatagctgggactgtgtcatttccgcggaacagtgggcggggaatactgaacaagaggctaggcaagctgtaagtcacctgcctgagcaccagggtgctgctgtcctaggcctgttcaggtcatacccctctgttttcgccgaacacccaggtctcactactcaggtaacgcacgacgtgggacgtcggtgataatgtgcccttcaagtcagtgccctaccgtgtgcccccggtaaagttgccagctttacgggaggagttaaagtacatggttgagagagggatgatcactgaaggttatgtgaagtggacatcacccgtcacgttgcagccaaaacctgacggcaaggtgcggttctgcatagattttcgtaggctaaatggcttgaccactaccaacccttaccctttgcctcgagttgacgacagcgtggacaagatagggaatgcaaagtaccttactaaaattgatcttgtaaaaggctactggcaagtacccctgtcggaccgagctaagcaagtttgtggttttgtggtagatggcaagacctaccaatgtaacgtaatgccttatgggcttaagaacgcacctgccacgtttcaaaacctgatgaacgatatttgtgacgaaatccctaactgcacggtctaccttgatgacgtgatagtatatgatgacgattttgaaaatcacctaaggcacttagagaccctgtttaggaagttgcacgatgctgggctggtggtgaacctgaggaagtgcgagtttgtaaaggctactgtgcagtatcttggctttgtggtcgggttaggccgggtgtgccccccccctgagcaagatacaggctatcaatatgtttcccaggcccaccactaagcgccaggtcatgcggttcctaggtatgataggctattataggcgcttcatccggggatactctactgtcttagcaccgttaactgatctactgtcgaagtcagtgaagttctgttgggctgcggagtgtcagagggctttcgacctagtcaagcacctgctgtgtacacatccgattttgagggccccagacttctccaggagttttcagctggcgactgatgccagcggtgtgggtgccggggcagtgttactgcagactgattccgagggcttggaacacccagtgagcttcttttctcgcaagtttaattcggcacaaaggaattactcgactatagagaaggagcttctggctatcgttttgtcgctcaaacatttcgaagtttatgttccagcctacggcccggtagtgacgatttatacggaccatcatcccttgaaattcctaaatcagtttcacaatcggaatatgcggttgaccaggtggtccctaatgctccaagagtataatctcaacattcagcatattgccgggagtgagaacgtgatagcagattgtctatcaagggttgatgatccaagatagtcgtgcacggtgtgtgggttgagcaggagtaaaattaggctatcataacgccgtccaaaaagattataaaacaataaaataaacgagaaaactctttcttttttttagttttgtaactctttattgttgtagcatgatgcatgcaatattgtgttttatgtataattcacacttcagttgttgtgcaccttttgcaattagtggcagctaagggtagcaggtcggttggttgcctgtcagattttgataatgcttctaaggtcgattatctaaaatcttgggggggctgtgacgcaccccagtgctgggcaacgcaacctgattgtactccttggtactccactgtaccgcccgtgatctggctaccgtcagccgctatgtatattgagtgtgacaacttataactatgttctttgtatctctgcaaaggtctcgtcatgtgctaaccagtggtgggttttgttttaagccatgtcgagaccttccatttaatatgtagtatcaatagagaagttgatagataggataatgggaattcagagagagagagtgagttgggcttcagagcaagagggtagcaacacgccgcgctgccggccgggtggttgccagacgtatggactggttggcagccttgcccttatagctaggcgcgatagggttggtagtccattgttgcctgcctgggctgggcccatgttgtcgtacagca

SEQ ID NO: 152 - DNA, 20663 bp, Paralithodes sp.
  variation 894..1393: note = n is any nucleotide
  variation 8446..8945: note = n is any nucleotide
  source 1..20663: mol_type = other DNA
tcactcttgggttggagagttgcacagagtaggggtgggattgagttgcaagacgggtaccacgtgccctacgtaaaggaggtggtatgcactgggatagctatgaggaacactgattattatagtagcgatagaatagcgagagagatgcaacattgcggcggagagagagagattgcagagagttggtgagtggacgggagttaatgatacgaaaggccttcctttaaactttgtctaggagagcggtgtgagaggaacctccccacacatgtgaacaatactcaatacaagggcgcactatgcccctgtacagagcaagaagctgtgcaggggaaaagaaccccctaaagcggttgagcacacccagcttctgggaggctgccttagcaagctttcccctttttaacgccggcacagtgaactcagaaaacatgtgtgcactgtgctcattcttggctacaaatcccggggaaggtgcaatgtgaatacattcattaagtctaccaaaccgaaggcaattaggtgtgttgctcatcgccgccagctcagacactctgttcccggtggccaaagccaaaaggaatacagccttttttaagagtaatgcaaaatctgcagtattttggtacagacgagagtgaagtaaagacaatgccttgtccagagaccaagtaggcatgagctgacggggaggtgggcggagtttaaaacatgctctcataaaaccagtttcctcagccaccggtatgaagagacctgtaaggtctaaaaagggcactctaatcgcagttaagtgataagtaaacgttaccacagataaacgtttctgctcaaacagataattcaaataattaaaaactaacgccactgagggcacagtctgttctgttnnnnnnnnnnnnnnnnnnnnnnnnnnnnnnnnnnnnnnnnnnnnnnnnnnnnnnnnnnnnnnnnnnnnnnnnnnnnnnnnnnnnnnnnnnnnnnnnnnnnnnnnnnnnnnnnnnnnnnnnnnnnnnnnnnnnnnnnnnnnnnnnnnnnnnnnnnnnnnnnnnnnnnnnnnnnnnnnnnnnnnnnnnnnnnnnnnnnnnnnnnnnnnnnnnnnnnnnnnnnnnnnnnnnnnnnnnnnnnnnnnnnnnnnnnnnnnnnnnnnnnnnnnnnnnnnnnnnnnnnnnnnnnnnnnnnnnnnnnnnnnnnnnnnnnnnnnnnnnnnnnnnnnnnnnnnnnnnnnnnnnnnnnnnnnnnnnnnnnnnnnnnnnnnnnnnnnnnnnnnnnnnnnnnnnnnnnnnnnnnnnnnnnnnnnnnnnnnnnnnnnnnnnnnnnnnnnnnnnnnnnnnnnnnnnnnnnnnnnnnnnnnnnnnnnnnnnnnnnnnnnnnnnnnnnnnnnnnnnnnactgaacgtgatcgcctctgattcgacgaatcacgtttgtgattgtttgcaatcagacggcgatcacgctaacactccctggaggtgactagcgaagctatcataacagtaggcctaaatctctcctctacattatattatcataattaagcttaattagcctccctccatgttatttatgtgtcgcaatctcaattataaggtggcacacctataaaaatcatagttatcgtgaccattttgctatatataacataaaacaagcagcttggagcgcaagtctcacagctacttcgtcaggccttcagtgcggtaagcgtagcctagttggtaacgacttcgcttttaaatccgtaagcctactcgcaagggttcgaggctcgatgagctaatgtttttttttttttttttttgcagtttatttatttaatttgtatcgttatatattggtaatgttactatgccaatgatgatgtattgtaatgggttataacttgctgtacaggtttttgagcgtttgtctatattattgattgattattatgttttttatgcggtttgtatttcattgttatagttatatatcggtaatgttacagttgttactatgccaattgaatgatagcctatattttaacgggttatagcctagcttgctgtacaggtttttcggcgcttgtctattattgatcgattactctatttacatttcttaaaaacaatttctgaggcataattgcatcgaagtatgataggtcagttaagctatgtttagtaaggtagcctatccacgctatagttaaatatgcaaagtaataatctaatggttaaaaaaatatatttatgaaccttccataaatataggcttgcaaatagcctatatacacatagatcgtcagaaaaagaaagtatgcctatacatacattgccaggaagagataatatagcctatataggctactatttaattcagcctggctacatagccaatatatataaaactataggcctatagtttagcatattcatagtcctacatcgccaggaaaagaaatctactttttatttccccaatagactaacggagaattgtttgaaaattacacggggaagaaagagctacctttgccagataaggaccgtaataactttgtcaacatttcttaataagattataagatataatagcctgatggtagcctagcctaccgtctgtcttgagcttgaacaaggctgctgactgtagctgacagtgtgactaccttagccaatagtctatattgatggataataatatccaatattaaaatgtattgatttgacaaaaccatttgactttgattgaaattaatagaccgaagaagcactgtaacaggcctaaaaccttcgcagacatcgccaacaagatttgaatttcgtgctcatagccactgaccaatcagcgacgagaatcaatgtttggctatcaatgtcgttcagtctgcgcgatcataaacaggattgctcaaacagaaacaggattgcctgatagggtagactgaacgcgctccagcatgcggaaacgggtgttcacaatgtgagagttgaggactgagagatctaccaccggcctcatagcagcgcagtccttctttaggaccagaaacacatgagacagaaataccttttgtgtagaagatatttccttgataacgccttcctcgtgcatggacatgatcacttgggccacttcctgagacactggtcgctgtcggggagggcacctgagaggaggcctggacctccacctccaagtcagacccttcttgaccacccgacgcgcccacgaccggcggggccattgccggtagtgggggcggaagaagccggtgcgggcgcctttgtgtcaggcccatcaccgcttcgacgagatgggcgggcgagggaagaggggactggccaggaggaactacgcgttttttggcgcggagcccctcttggacttatcgtagtgggagctagagccaccacgtcctcctccagacgtccccccgccccgccgaaacgatggacgagcctcgcgctccggcctatccccctccaggctgtgtctggcagcggaggaactggggccctgcgcctgccagcgccgcatcccctcttgacggggacggcgatccggggaccgacgaccacggaaggcgggtacaccacgccccctgtgagccagtcccctggccacacctctagcctggcgccctctgccggcgacagacctgcccccgcgtccgcgggtggaggaggatgaagtgggcttcgccaccaccttccgttgagcagagtatgtgtcactctgcgccagtaagaaagccccttgccaagcctcctcagggaacagtccaggggtcagaaggtcagtcagtaggaggcggttgcggacgtcggcaggggccttcttacagaaagccacccgaagttgttgacggcaacgagtggcttcatggagggagtggcggatgtcctgaacagggttgagggcaagctgcagggtgatccgtcggacatgctcaaaaccttggcgatgatcagccgattccagcgactcaataaggcggaggtgaacccgcgccagttccaactgagcaagaagagttgaaagttggcgcgccgctcgctgacggaacttaaagtcccggtccagtggtgccttctccggtgccgtgaaaaaggaacacggaagggggcccaccgacagtttgggagcattgagccactcccacacaggcagagggaagcccgaggaggtaaggagcatgcccgacagaaaagatgattccatggatgggatggccggcaaggtctcagccatggactgaccaaactccactgcttcacggatccattcaccccagggacccggacagacgtgcgggagttcgagcatcaggaccccgtcccgatctcgcacattcctgaggtacggcgtccctgagatggcagagagggagtggacatccgcagacaggtcttggcgggagtagtcagcccagggcttggtggcagtgtaaggcaagaccgacggatgatatgaaaaataccgcatgtcttgccggttagggtacaccctcacatcgacctcagggaccagaccctgtggagtaatggccctgaagatgtttttctcattcacctggatagcccagccctccggcacagcccgctctccggccggcaggtggaccgccccctcagggttggaggcgatcacagctctccaagcaacagaatccccatacagggatggcatcttgactttggggatcttaaacttggagagaggcggcacggagagggggtgagagaacaaccccaaaccctggcccgggataacaacgggccagagaggagtcgtaggcggtgtcggaggtgcaggtgatgaagtagatgatgtcaacggtaccacgaccgggagagcaggccgagatgggatgtggtcggcaacaggtgggagaggagccacaagcggagtctgcagaggcaccgggttagtagtacccaaccgggagaccactgcctccatggccgccgtgacagaggagaggatgtctgccttattggaggccatctcaagacgaatagacgccaactccgcccgtaactccgtctccgcagcaggagggaaggacgtctgtagaggagacagggaaccagcctcactgggcccacgggccccatggtccgtgagcggggagaactcaggggacggtgggagaggactgtgccgccacgtcggggtcctcctggcccgaatcaggtgcaccgtccgaagacgagtcgacccccatatcctcgtcctccagccgatcaaaatccgcaacctccatctcaagaacatcttctaaatggtcagggagacgaggaggagactgctggccacaagggatcgaggcgtcggaacctccaggttgaggaggaggcgtggagggcatcgccgccgggaccaccacagccgggcccgccatagggaagaggccgggacccctcacaggctgggaggcaggcagaggctcgaactccaccccaccagtggctgaagatggtgcaggatggagaacgacctcctcggcaggcggggcaggacggcgtttggccctgaagaccgtggaaccctgcgaaggaggggggctcatcctgaggtgaggagaagcaagacggggtcgatcagcaggggacggagatcggcgacgtttcttcttgccagaagctccagaagtcatggataggtcggagggaggcacacgatgttcatgacgcctgggggcccgctccctggaacgcgccctcccgcccgcctgacccgaactcccgggaggggagccccgagccgtatgaggagagcgagagtgacgaacagtaggggagcggggaacggcgtgcagcatcggaggtaggtgggatccctaacaacacccggacgtcatcctcacggaaggaaggagccctgtgcaggaccctttggacgtgacgggagatgacgtcccatgatcggcgtagagacgtcctggcccgttgtccttccgccgacgtagggagagtctcgagtagttgaagagcggagagacacaccccacaccggcggggatcgtaaacatccttcccatagcaggccgtgtggaggcaacattcccgatgatcccgcaaggccgtccgctgacacgtcggccgagagcagggaggagccggcatcacagcactgaaaaatggggaagcattacccaccagtagaggtgagacaggcaatatgaggcagtagagccaattcagcatgtaagactcaataagacaatatccagtaagaagctatgtagcaagtataacaggaaagtcaaaagaaaacacccacaccagagaccctcaacaccagggctgggacaagccccttagcgaggcccaaccctgggaacaggtcctaaccaaaatcgtggggaaagtggtacccttcgaaatacctgagaaccctctgtgagagcggagggaggaggcggcgaagcggcggcggcgtagggacagccggcagtagagcgggcaccagctggaaggaaaaggtcaagtgtgagcaacccaacagtaccctataagtgtaaataggggcggggagggaatccaaaacacacaggacatcgccactttgggtcgagtcctaggacttttcaggtggtctttgggtcctcccagtatacaaggaggacgcccgtagggcgggaaccaggtacagaaggaggacacaaggaacaggacataagggataggaaaacagccaatcagccgttgtccaaaaagccctgtccaggtacatgaagaggggggcagaacagggcgcataaaccaagtcaagtgaaaagctatgtggcctaggccttgacaaggcacagggcacatcaaaaagataaaggcgcttctagggcggatttaaaaagatgaaggagctgaggacaccagaagacccttgcctgtgtggcgaaaaaaaaaagtgagtaaacacgaaaatcgagtcaacttgtccaagcatatcctccctgtgagcggggccccctatcgcgtacagtttccagacatcccccccccccccccccctttttagtgatcaagtaaccacaggcaggggaagaacagaaacatggacttgtaagaaaaacgagaatttaaccgagagctacgagaccgagacttcccagtcagtggagacaaaaggaaggcagaaggaaaggacctgtgtggatcattccaacggcgggcagctcaaggcaaaaaaccgattagcttaaacacacaattaatgagaatcttaacaagagcgtagaagaccaaccagcaagtcagtagagacaagaggaaaacagaaggacaggactatgtggcccaaaccgacggcggtcagctcaagttaaaaaacacaggcctagcctagttacacaattcacataaacgagaaaagactagggcagcgtcaatccctaagtgaaaaaacctagtaacaaagctaaacactgcccgagaagccccacaagtacgttaaattaataaaataaaaggaggatagcctagggcttgaccgacattttcaccagaaccacgtatccacgagtcaagtaggcccggggaaacgaaaaggaactgacaaaagcgtgaaccatgcgaacgaaatacaagaccaccaccaccaactatggacaagtttaataaacaagtcagaagggctataggtcagttgagaccaaagcagcatgtttgtgagagaataaaggctatgtggcctatgctcacacaaagcagaatccagagaaacttcatgctcaagtcttgtaaaacatcgacacgtagtcatatgaaaaaaaacaataaaacaaaaagtcacaaagggaaagaaacacaatgcatcccgcgggaagcatatttccccccccccccccccccccaggtacgttaagggtagttaaactgaacatgaacccgaaaagcgagggtagaatagacacacaacgaccgctacgcggcgttgaggaccaaccaccccgaagaaaacaaataaataaacaagtctccagcactacgcgcacacaccttaaacacgccataaagccgtagtaaagtgctgcctacatcactgaacatccttctaaaacctcaacagcctgaaaaggctcacactcactaatagttgaagcgaaggggatgcaaagcaggcactcgcgaagcacagacaaaaaaggcgtgtgacatcgacggtgggcgcgaagtgactgatactttggcaggtcctggcacaggctcatagaacatggagcatggctcagaggagagcagctagattaaatgggtaactataacaattctttctctccttcgctatctcttctttcctagtcgtctcggagtgtgtacaacgtgcctagtagtgaattgaggtgcaactctagagattatttggttacttcgcgtgagtaccgataaatcggcccgctgtggtagcggctgagatcataagccctacgttggaaacgtagagactgctannnnnnnnnnnnnnnnnnnnnnnnnnnnnnnnnnnnnnnnnnnnnnnnnnnnnnnnnnnnnnnnnnnnnnnnnnnnnnnnnnnnnnnnnnnnnnnnnnnnnnnnnnnnnnnnnnnnnnnnnnnnnnnnnnnnnnnnnnnnnnnnnnnnnnnnnnnnnnnnnnnnnnnnnnnnnnnnnnnnnnnnnnnnnnnnnnnnnnnnnnnnnnnnnnnnnnnnnnnnnnnnnnnnnnnnnnnnnnnnnnnnnnnnnnnnnnnnnnnnnnnnnnnnnnnnnnnnnnnnnnnnnnnnnnnnnnnnnnnnnnnnnnnnnnnnnnnnnnnnnnnnnnnnnnnnnnnnnnnnnnnnnnnnnnnnnnnnnnnnnnnnnnnnnnnnnnnnnnnnnnnnnnnnnnnnnnnnnnnnnnnnnnnnnnnnnnnnnnnnnnnnnnnnnnnnnnnnnnnnnnnnnnnnnnnnnnnnnnnnnnnnnnnnnnnnnnnnnnnnnnnnnnnnnnnnnnnnnnnntttagcagaatgcttcacaacactttgaccaatgaccctgtttatgtaacttattctgattcgaaaaaactttgacttttcctggattcttctacattatctttatcgacattataaagaggagtcaaggtggaaaagaaacgcgttttctggttaactaaagtttattgtaaaacaatcataccacaccatgcacacacgtgacggaggtgtgagtagaacggctctaaataaaaaagggtcgtatataaccccgaagttaccctaaaacaatgtaaatgaaatacaaaaaactcaccaaattcaactttattaacccttcagcgggtaaatgaccttatggggatatatgcggtagggttggaattagaatgctttaactttagcagaatgcttcacaacactttgacctatgaccctgtttatgtaacttattcggattaaaaaaaaaaaattgactaattaaaactgatgttttttttactagattgaccatgtttatataactttatatatagatatattttatttttatatattactctcggatggccgtaaaggcctctcaactgtgcaattccgtgataggggatctactcgcaaaaagaagaaaggacgaccggagtatctccggtggtgacagaatggcccgactttaccaaaatgaacacgttcgtgcaactattcacccaaggatgcgaagccaagaagaggaggaaacccaatccggcgatctccgacacgtgggagagacggttccttagcgcaagttacctgacccaaccccgttatcattcggattacaatctcatcaattactgcgccaagacctaccagacgtgtttcaacaacaacctcgcgctaaacttcgtatcccgtcagagacacgccatatatttctacctcaaaaacaaccaaacgggggagaagacgacacccaccgctccgctcgtgtacgccctgcagactctcgtgaatggctggaagtacgtcagaaggacctactccgcgaaccaaatggcggaactgaaagatcggcactcggcgttcattgaccggcacgcgacgtatctcgggaagccagccctgagcgggggccggtggcttacctgcggtactacggttttctcaagcgggagtattccgagtcaaccaaactcagaaacgtcccattggctccgaccaacgtgttcaaggcccactatgtggactttgacgcggtgggagtgaagggcctgtgtcgagaactgggcatcccgtcgggagaactgaaagaaaccgaagaagggtgggggttcattttcgacctgaaacggataagaagaatgggagggaacgagaagtggacgttcgatcggtgcgtgtcgaccgacggcgtggcctgttcgatccgatactacaggtataaaaaaaacgacccgggaaccggcaccgctcacaagaggaagaagaaaaatgacgggatcgtcgccttccccaagggtacggctgaagtcatcaacaacaacagcaacactatcgtcgtatcgttggaaggtaaatggatcatcggtgtggatcccggacgaaagaacattgccttttgcgtagagttgtaccccgaaactcgaaagagtttcccccaacgggaagctggccaaactgatgagagagagagccggcgccggacatttcaccgctgtgaacgagtggaacaccttcaaagtgtgtcatcgttgtaagggtcctctcagcccggtgggtttcgtgcaagttcaaaacgaagacaaaggagaaacggaagaagaaccaaaagttaccgataaattgatctatctgcgaggtttgcgtcgttgctcggccccgagtaataatttcaacgaagtagtcactcaaaggagaaaaagacaaacaagaatcggcggtagtgtctctagtcaacaacagagtagtaaatttccgatcgggggagcctttctagacagagacagtaacgccgccgccaatattgctcagaaacttttcctggattcttctacgttgtcttctttatccacattacaaagaggagtcaaggtggaaaagaaacgcgttttctggttaaataaagtttattgtaaaaaaaaaaaaaaagaccacaccgtgcacacacgtgacggaggtgtgagtagtacggctctaaataaaaaagggtcgtatataaccccgaagcggccaaacaatatttattgacccttaccacattcggattggtgagtcgtttgcccgctaaagggttaactctcagggaatagtcattctcaatgtatgattttttaataaaaaagtttattttacaataccattcaagtggtttaaagtcgatataggatactacatgttctatctcaccctcggatatggcctgcctaccatgactgaaatttataaaaaggctcattagtacgttggccctagcattatgggtctgacgcggaatttgatatcttcacgatagtcctcaaaccccccaaccagcacccctttcatttgtacactggagtaatcccaacatggtaggtgaattaggaggtcttcttcccttatagtagtagttgttccaaagccaaagtgatgaccgagaccccggtggtgcattgttgtcccgttccagaagtctgctcttgtataggtagatgccgtcatgtgggaaccaaccgggtcctacacgatttgttactctgaggatgagtttgcgaaaagagtatcgtgtcggtagtagtaccaacacaaggtatttgggaagacgcatacctacgaacctgctggggtgttaggtagattatcttgatttgtttattcatcaggaatccaggaggaagtcaattgtctggatggtaggaggtgcaggtataatagggaaggggtggtggtggtggtgtggtggtggtggcagaaactttagttttcttcatcggagggacataatccttagtttgatccatcggttgcttaaccgccatggttggaggtgaaggtataatagggaaacgggcagtggtggcggcagaaaccttagttttcttcattggagggacagaatcctgagtttgatccattggtcgcttaaccgccataaggttggtaataataacaggtaatatggggtcgacacgtataatggctgctagtgaggatatgcggcccaggtcccggatagttggtgttgctgaacggtcacacccactaccacatatccgaacaagggaacgggaaaagcccccagctaggagtacaaaggaaatcaagcaacaacagatctagtgacccttctaggttgcttgtcctccaaaacactgaggatcaagtgtccaaacagtggtttagagtgggtaagggaacattggaaagggaattactgccctggaaactaatgtccgtggcaggattaggaagttagtaggggacagatgggttagtaactgagggggggataaaataaagttattcatttacaaacgcagtcagtcgcgggtttgatgagagatatttgtctaggcggagtttaaatgaatcaacggtgctgcagtctataacgtttcggggaagcccattccacaagttgacaactcgattgaagaagaaattcttagattcgtgcgagttaaaagatttaccaataattttgcaaccgttttcccgcgtgtaattagattggtcgatagtgaagtacttactacagttcatattgtcgatgcctttgatgattttgaacacttgaattaagtcacctcttaatctgcgctgggttaaaggaaatagatttaattctctaagacgctcttcgtatggtttgttctttaggctaggtatcattttggtaactctacgttgaactcgttctagcttgtttatatcttttttttggtaataagggcaccaggattgaacgcagtattccagaagagggcggactaaggaattgtaaagggttaggataacttctttggatttatgctcaaatgacctgcctataaagccaattattttgtttgccttcttaacaacttctgaacattgttgactcggttttaggttactcgatattgttactcccagatcggtttctctgtttacattcttaagctgagtgccattcatcgaatagtttgctttctcatttaggtatccgatatgtagtactttacatttatccgcattgaaactcatttgccaaatttgggcccaacatgacaatttatctagattgtgttgcatatcgtcaacttgttcttttgagagtacgctatttgcaatttttgtatcgtcagcaaattttgagattgtacaggtgagaccctcatctatgtcgttgatgtaaattagaaagagaattggtcctagtaccgatccctggggtaccccgctacttacattggtccatttagatgccttaccgtttatgactactctttgctttctgttgctgagccaattttctatccatttcaacacaccgtcttgtattccatgcgcttttagttttagcagtaaacgtttgtggggaactttgtcaaaggccttttgaaaatcaaggtatataatatctacagctttactctcatcgtagaggttgaggatatcgtggaagaagtctaagaggtttgttaaacaggaacgttttttacgaaagccgtgttgagtatctttaagtatgttattttcctctaagtgatttacgagtctgtctcgtatgaccgtttctagcattttacatacaactgaggttaagctaattggacgatagttactgggtaggatttgctgcctttttttaatatcggtgttacgttggctagcttccactgatcagacatagttccagactgcaaggatttattgaattgtaatgtcagtggtttggagagctcatccttagcttcctttagaactctaggcgatattgtatcagattttcaaagaaccatgggggtgagatgaggagagattcgtaacaagatgaagggcctggacgaaaatgagctggaaagaagaagactggatgttcaacagaatcagattaaaatgattatgaactcgacctacggtcttatggcattaaacaacaaacccctggctagtttgattacccaaatcggccggagaaccattgctaatatacagatagcgggacaattaattgataaaaattgtataacttcttatggggacacagacagctgtttcttttaaatgaatgatccaaccattcggaggagtatcaccccggataaaacctatcttgatgttgatttattactcgaaattgagagtcaacaaaaatgtattgatcaaatttcatgcgtattaaaaggcttaaatcagtcctcatttgacatgcccgggattaatgttatgaaacttttacccgagaaaattatattgttggcaaatatttggggaaaaaaaagttacgtcttactatattggcgggatgattccactccctatcgagacctaataaaggccctttccgaggggaatacgattactagcaatctcttccaaattatacctagatcggaatcgagcctattaaaagtgcggcgcggctcgacgcacattctaagagttaatatatggggcattgtcaatttctatctcaatcgttccctaaagacggacaataatgttgtggattatgcgagcctcatgggaggtactccgttggacgatgtcgttaaagacgccgaacgatatttggatatgtattataaaggtatttttgttaagggggactgtaattatctagagttggcaattaattatattacccaaaataaacaaatattttcctcattataagctgggtcatattctggccaagttgattaagaacattattatttttaataatagtttcacagacatgtcatattggaaaagtatccgcaaggagacccccattagtccctacgatatagttctggaggactataataaggatcccgtattattccccgaattgaaattgggtatcaaatcattatttggaaatatggtttacgtgaataatctttacgagctgagatctaacgattagggggtaaagtggtttaccactacacatcagaaaaaaaaaagttggaatacacagacaatgtgtggcattctatcgggtaatagtatactccaaaaatcggtggtggtgaatgtctttaaaattgttgtagacgccatccaaaaattatacctcggactacaaaatcaatttaaaactaagttatcattctcgtttcatcgagataatatgaatggtgtatgttttcagtcagaagagattgaagccaaattaaagattactaatataaccatgcccgataaacacgatattgcaaccataatgaaccattttaattgctgcgaggatttagctatagagatacagagcgcgtcctcgcatcaggtgctatttatgaatttaatggagacaaccaagcctcgctctgcgttcatgtcgtgcagtaacgaggcgtgtcaaaagattcacaaatattttctcgaaaatgtgaatataaactgtcgtcacgataagaaagtatttacgcaaatgaatcccgaatcatataaagagattaaaattaatagtatcatctttactaagatataagttggatattaatgatttaattggctaatgtatcgataccattttcggatatgttaaatactgtaaactttccattgacacctatcaacattttataaatgttatggggcgtcacatcttgcaaggatgtgtgtttatttacactagatacccacatgtatatagttctcatatattacgttgcaaagttggttaaaggattaactttcatgacacccgatggagaattatgcaatcagttaaaacaattcaagtattattctaaagacaggaatgcctttgtttatataaccaatcatgaaaaaatacatcatcgatcgaaacagatgaagatagatacatatttcaaaaaaatgcaaaaaataggacaagtagaattggatacaaaaacccacggagatggaccgggaatatatcattttaatattgtatcttccattacaaacctcgccttgacacgttttaccttgttagggggcatcaccctataaatatttatatttcatttatattatattatacctatcaagaatgatattaattattttgattgtcctaatattcactcttatatatcattttatatataatcaacaacaacaacccaaaaagaataaagaggacctactggattttaaaaatatgatggcgcaaattgtgactaatgaggttaatatctatgaaccattatatattgaggtcatggaccaatataatataatgaaaagagaagaccgtgtagaagcagacaactgtttttataaatgatataaaacctatgaaaattgcaaatgataagatgcaccaatatcgtatacaaattcagcaaaagcttagacggaagatgtattctaacttaccactactagaacttcagagtgcaatttttgaatctactataaacattgttcaatttatggatagtgtgtgtatactcagaaactgtattgataattggaaccaaaaaaaaaaaattacaacaataatttattcgttttgtcttttcactatggatactggatttacaacattatccttaaacatttgtatcgcttgagaatattgggtccaatcaccccccccccccccagtttgcaccctattttgtatggaaatataatatgtttgtatggatttttggttgaatagctttgtatttgctgtaatccaagtttaaaccatttcaatcgattttccggcgtatcttgttctattcctgttcggagatggtcatcaatatctgggtaagccaatatattccgagaaaaaaaacatccactctttcccatataaaattgtccgaaaatatttataatgatggggtttttcgtgagtatagggggattgcatattttaatatcacccggtttggaccgatcggtaacaacggcgcgattataatttttgattggtcgtctgtgagcgtaaacttcactatagggatattttcctcccagggctttggatagtatgtgtgacctaatggcacaacaattcaatatctgtactataatgtaatctgtattggtataggttatatctgtcacacttcccggtgtagttgtcaggttgtccatgttaatgtgcaccttttaaatatatttgtcatccttatatatacatttttcccattttacccaaacttttttactgtagaaaaaaaaatggaagggcccactcggtgaaccaattttgggaactgtaaagatcggcactcggcgccgaaacatcagtcggacccagaaactggaaaagggtccacttacctgaacgctatagcagaccaagactgcgaagaagttgaggaggctcaagtttcgaacgtgctgtcttggccagaaaactctgaatgtgttcgtccagagaactctgtttggcggcgataaccattcccggtttcacgtcgcgtacgggttggccaagttctcgccccccaatgggaagttagttggtcaggagagaaatgaaaggagttttctggttaaatcaaatttattgtaaaacaaatatatatagtacggctctaaataaagggccgtatataaaaccccgaatgtagatttatttttttcattatttatacaattaggcgatggctgattgtaatactagtttactcattttacctaaaaaaaaatcattagaaaataaaatattaaatattctcgataaccaccaacagaaaataaatgactacatgactcctgaagagtcccatcttttcaaggctttgacattctatcataaaataaaaaacatggacgataaaagaattacatttcttaacctttatttttttaatcgagcccttttcagaggactagaatgtcaattatatttaacatattttttttaaatatgtttctttgaattgtcaatgttgaatatattggggcagcataataataataataaaaataataattatgatgatgttaagtgtaatgacataaaacaacgaatagcgctcaagtttattttggtgtcacatttagttacaaattgtaaatcaatcgagttcaccattcaccagcaaaatatcttcacaaaacaatatgataccattttggataaatctggatacaaatctgaactagatgtattatacaagacccaaatccaatcacactatgataataataatgatcaaaatccaattgtttctctcaataactctaccaattatgttatcgtcaactctgaccattttaagctttccactcgcaactttgatttctcttgggattcgccagaattgagtgttagcaatatactaatccgatatgaagatgtaaatgggggacaattagactgtgcactaaacgaacaccacaagataatggaaggctatgctcagtccctggaatggattaaagacctagtcggaagtcaaaatagtataaatgagccaaataatgaagttaaggaaattgataaattaaatttacatctaaatttggtatgttatatatcatctgatttgttaatgttagatgtcataaaacacatataatgatgacagatttaatagatatgacccttttccgtttttcaactatatacaatatgttaaataaatgtataacaattatccataaaagtaattgtagtgatattattaagataaattttaaaaattatatccttgaacaattgaatgtttatacctttaaaattcatggtatttatcaatacaaacacgcgacaactaacaccaccaatactaataccggtaaacccatcaggttacggaacggtaacattttaacggcctccgaggtaaattccataaagacttgtcgatgcgaagatggagagtcgcattcagatttgggaagagataatatgtctatagaggctttttatgcaagaaaaacccaagagttaggatgtttgacttttggcaatagattagaatctgatgtttgtgagctttacaatccattaacggatcccgctttgttaatgagggatgacatgtctaaaaatacagaggtaggacagaaaaatatgatctacataacaccaaccctctatacggaggtaccccattccctgagacatttaatacagaaaaataagtctcatatgtttatcgtgttaaaaataggcatactcatatttagaatatttaatttagaagatgaatttctaaaaagcgtggaaacattattactaaccaaatatgagactaacaaactcgaaaaaaatcacattaatgatttatgcagtgtgttgaatgaaacagatacgtcaaatcatatattcatatatttaaataagctatttggagttgacactgtacaatgtattcgtcacgcgcaatatacaacctccacgggtaagaatgctaaatatacggctttaggaaacggaattacatttcaaaagctggtttacattatgcattttctgcttagggaaactcaaaatattatagaaaaaaaactctatgggtggtggtggtggtggttggggtggaggatacctaccatttcattgtttcaattgaaatagttctgaaaaccaagttgctttttaatggaaatggtagatacaatcgctatggcaactttcgtttcaaattcccgatatcccggtaaagccatttgctcactaaagggctttcttacgccttcgtcggtgcttgactctggtggcggggctagtagattctgggatgttgctgggggtggtaaaagtatgcccggtggttatattgttctcaaaatcgtctccggtgatggtactgacgtcggcgctggtactgatgacaatattatcctcagaatcggcgttgacactactagccccaaaatcaactccggtggtgctatagagcggaatgttgctgctgttggtagattcggtggtggaactcgtcgttattttcggagtggtagcatcattggtagaagaattgaacaaatgaacattggtgttgagcattattatggtgagtgggttggtagattccgggatgttgctggcggtggtaaaaatatcctcggtgtttatattattctcaaaatcgtctccggtgatggtactgacgtcggcgctggtactggtgacaatattatcctcagaattgtctccggtggtggtggtttcggcgttgacactactagactcaaaatcaactccggcggtgctatagagcggaatgttgctgctgttggtagattcggtggtggaactcatcgttattttcggagtggtaacatcattggtagaagaaatgagccaattaataaagggatttatattggtgttgggcattggggggttggtagattccgggatgttgctggcggtggtaaaaatatcctcggtggttatattgttctcaaagctggtactggtgacaatattatacccagaatcgtctccggtagtggtgtcggcgttaaaatcatctccggcggcggtggtggtagaagattcggtgttcggagtggtagcatcattgaaccagagacttatattggtgttgagcattgtttcctcctgaatggtggtgctggcgttatcatcgtatccggtggtataagaagaagattcggaagaaatccaataatgatcaggaa

SEQ ID NO: 153 - DNA, 20774 bp, unidentified
  misc_feature 1..20774: note = Fanzor polypeptide
  variation 7433..9493: note = n is any nucleotide
  variation 10735..10754: note = n is any nucleotide
  variation 12357..14349: note = n is any nucleotide
  source 1..20774: mol_type = other DNA
aggatatttttttgtatcaagagatgagtactctaataaggttttttgtaaaacctcaaaggttgaagcttatcatgagtgcactagataaataaattccattacactcttagggggtgctttcctattctctgctacctttactatggatagaatatgcaaatgtgcagtttttctgtgaggtccactattcggttagacgagtatagtgaaatcaagtcaaaatgcaaaacctgtagaaccaggttggactcgtgcagcttggttcccttggtctatattggtgcagtggtttgggcttggcttgagatcctggaggtcgctggatcaatacccggtggggacaaaatttgagaaagtcgaaaaaaccgaaagttgggtggcttggggtaattgtcgcgtgcaagcgcttcttgggactcgagacataatcaaggaactggcatattccgctctaccttcgggtacgtctcacatagggtcaggcttggaatttgacgggtggaagttgctaccacccatgtataactctgcataagccgtttcaaggagccggatgggattattccttgtgtacgaacgttcccggttggcattctcagcttggtgtaggcttcttcaaatcttgtagtcttcataataaccattgtgtcaggtagtgccttcttcaaattcactcgactctgtcgtgctggtgtcaaagccagcgtcttgtatcagcctctttagctgacgcaagaccagagccgagtgtctttggctttttacttgtagttgctgcttgtacgcgtggatgtggagctggagaagtgcttgtatcctggcttgtgtatcaactgggttggggacttggtcgtggaaacggatatcattgcggtgcatccatatgcagcgagtcacaatggctcgcacaaagttgagcaccacaaagagagtgtatccgtatttgtgtttggcttcctgggtaggtttgagacttgtaaagtagaccaaggtgctccaggtcaactcgcttgtaaacgctctttggagaggctgtataaatgggtcccataaccgcgaggcaaagggacagagccaaaagagatgctgagctgtctcgagatgttcacagtcaaaatgacaagttgtcttggcgtcttggatgtgctggaatcgatagcctaagtgcaaggcattgtgctggagtcgatagagaaaatcggcgtagactgggaggaggtgcttgttcagcttgatatcgcgtttccagaagtcgggttcaggatcttccgagactcctaatcgctgcaatggcagcaaagggggtcttggagacttgagcacgttccggatcttggcaactgtgaggtcttctagggggtggtctccaataacccagttatggaaagcacttgcaaaggcttgacttggacgagggccgattggagggtcgagaaggactcgaagtgcaacatcacagtctacgaggaagttcctgcaatagcgtgtgttgtatgctcttgagtcgcctggttgctggattgctgtggcaagtgccgccggtgttggcgtactaccacagaggccgtatatgtcttctgccgtgtagagctggagttgaccgagtctctgcacaagtgccgagggtcttgtagctaatgtgcggtcttggcttccatgtcgtagtgtggcgttgtgcaatagcagcatagacaataagtcgaattcgcttgtgctggctcgtatcttgggtctcaactttgtatgccagacaaagagcacctggtgccagaagctgtttagagcggaccatcgattttcacgccgagtgctggcgtggttgggactcgtagttactggagcgtacaggatatcgaggggtcggccccatggagtcatagcctgctgaaagacttgaacaacaggggagacccaactgggaagcgagtggtggcactttcgcacactcttgaccacacgtacaagtgcatgtacttgtagcgcgttcaccgagtcttctatctgtgtgagaccgagtcctccttgggatcttggagtgtaccaccagtctgtggccaggatagctgatagtcgggagctcgaagtgctgagtcactgaggaaagtcgcgatgacacccttgatttgatcttgaaagccggattgcgggatatgacacacactggctgtgtaccagagcgtgggtagcacaatttgctggagcaacgccactcggccgttcaaagtccttgcgcggtgcttccatactgtacaacggagctggatacttgcaatgaggtggtgcagtcgatctgtattggagagacgcggtccataacgaataccgagaagcttggcttcaccagtattgtcaatgacttgtactccgagttgctgtagctgagtctcgagttcttcatcttcatctctccattctcgaaaaggtagtatgacagtcttgtgcgtgttgagcttcatcccggccgccgagcaaaagtcttggacacgttgtagaaactcgggtgcaagagagagatcagtgaggagacctgtgcaatcatctgcaaagctgataactgtgtggggttcctctgaagctcgtaacttgagaccacgggacttgaactggactcggaggtagttcaatagcggttcaatgtagagcacaaataaggctggcgagagtggatcaccttgccgaactcctgcaccgagtgcgaaatgaggcaatggagcgccattgaagagaatcgagacgatagtgcttcgaatcatcactcggatccattcccggaaagtcggaccaaacccaaagtgcctcagtatcatctcgagtgcatcccagacaacactgtcaaaggctttggcaaagtcgagtaggagtgcacctgccatttcttggtttcgttggaatagatgctggagagcttggaaccggagatgcgcgttacgaatatcacgtcctgggacgaatccatactgatccgtgtggagcaacttgggcaaaattgactgtaacctcttggacaggattttcggtccgagttttgcatcgatgttcaatagcgtgataggccgatagttactgggcacatgtcggtcaccactcttgtataggagcgagatctgtcctcttctctggaacttggtcattttaccgagttggaattgagacgagtacaccacttcgagtatcttgctccaaagctgaatgtccacgttgtagtacgcaagcgggagaccgtctggacctggagctttgttgggtgttgtgtgtttcagtgcatagcagaagtcattcgcagtgaacggactatctagcatatgctggtcttctgtagtcagtctggtcttggtatgctggaggattctcgatagcttgagtggattccactttggcttagagtgagaatactcacgagatggcgagcaatagataccactccagtaccggttgatgtaatgggctatacctagccattacatgaaggtgcggctgtgccctactttagtgttggacacaccaccttcagcgtgcattgtggtagcaaataacaaagggattacggtacaacagatcccacatgcacgtgtgacgtcatctgatgatgtcacaagtatccatgtactaatcaagtacagagtgatggttccgacttgggaatctacactggtgacgagaccgacgtgtctctatcctctgaagtgagtggctcccgccaatcactttgcagggaatctctgcggtacttcaagttcaagttcccagcagatcccctgggttcaacctcagtgtacccaaggttttatatatcagattcataggttttatttctgcatgtgtaggttttagttgtaaaacctctaggatctctagtggtgtttcatatgtagtgtcaggaaccataaccacattttaattcagttgcaattttacctccaagtcctcaagtcgtcttctctccctccaagtcgggagatcgcttcctcgttgcacaagcgtgtgtgccgtgtattgggaactgttgtgaacagcgtcccattacacctggtagcacttcgagcggtccttccaacgacccagtgaagtgaaaggtttgacgacgcggctttaagcacgtcgcgcattcctgttcaagacctactcttacccatgtccgggaacatggaaggagttgatgtgccactcggttcagcagtaccgcaaactgtcgagttgacgaatgagtatttccctcatttgtctactcatgagtggtcagcgctggagcggatgagagatgtcatcggggaggctgctgtggtcagcctgcttcgatcggcatctcctgaagaccaaaagagcgctgcggtcagtttcatgcaccacgagattgtgatctcgaaagcaggtcgcaaccctgtttcgtcttcaagacgatgcctctgaagctgaacgtgtctccgtatcgcggcggagagaacgagcctctttcgagatggttcgttgagttggatgcagcaatgtctgcaagacaactccgcgacccctcgcagcaagtgttgttcgcaatgtccaaccttgcgggtcgtgcgaagagctgggcttatgggaagcgtttggccgatccaaactgcttctatagctacgacaatttcaaggcagaactcaagatggcgtttgaaccaccgcagagtgagttccgtgcacgcgccgagtttctcaagcttcgccaaggtcgtttcgatctacactcatatgctcagcgagctcgttatctggtctcgagcattgtggacgagccgattgacgtcccaacgcaagttgtgacgttcatgacgggtctgaacgacggtccaatccggaaccaattgttccgtgagtacccaaagacccttgaagaagccatcagccgcgcgatgcaagaagagtttagcatcaaacaagccaagttccaaggttttccgtcaagaccaccaaggcaatcgaacgtcgttcatgatggtccagagccaatggacatctcgtacatttccactcctggaaatgaacgtcctcacaacgatggaaagtgcttccgttgtgggaagtcgggccacttcgctcgaaactgcaaagtgtctttgcctgatcggcaaacggcacagggctcgcgctcgaacaactacggccgtagtaatggtcgtcggttcgatcgttcccaaaggtcaaaaaacgggaacgaccagtaggggcggggcctcctactgggctcgagaagaggactgtggatgttgtggaaacacaggactctggccccaatgtgcatgatgcacatgcagtttccacgagtgagagcagtgtcagtcaaacgtcaagtttgatcgttctcaaagttcatttaggcggtattgcaacgcctctacgtgctttagttgacactggtgcgtcgaacaactttgttcgaaatgaagtgatcaccaggcacaacatctctgtgcctgttgcgaatgaagagaagatgatgattgttcggttggccaacgggtcaactgtgaagatgccaaagcgagttgttcgcttggcaatgaagtatgaagatttccgaggtgaagacgagttcattttactcgacctcgatgacaagtttgatatcatcctgggcatgccatggttgaagcgttaccaacctagcattgactggatgaagatgaagatctccgttgacaagtcgtgcatcgccgacttgagctgcatgacaacggatgaagtggtatgggtttacacatctgtggaagaagtcccagatggcccttgtgatattgcggtgtgcgatggccccccatgctcacaagcggcacccattttgaagaagacgaacggaggtggagcagtcaggcgccataaaaagactgtctcctttgccatcgacgacagagttgcgtgcgatggtagtgtgaagaacgacgggaaaagaggcagagacccatcccaagacaagaagaagaagaccagcaagaagagtgttccgccaagaattttgagtgcccctgatcaaggtacaagtcaagatgacgaaggaagtgtccaagcacaagacatttcaagcgagtttgtgaacgttctggtttcgaacgaagatggtgacgtcgatgtaatccatcacatgaagattgaaaatcccccaagttcagtcgaagaattgatttccttgccatggatgagcaagaagacgctgaagcgtagcctaacgagaggcgaaatctcgcagatctgcatgatcgtcgatgttgacgatgcagaggacatcggcacggtatcagcaacggaagccgaagtgctcgatgaaaagacacggaacgaaaggttcgaggagcagtcgtgggatgctctcagatgaccccgtgtatgcacttgccaggaatttgaagacattttcccagacaaggtgccggacgaattgccatttgatagaggcattcgtcacgagattgacgtacttcctggcacgaagtactgtatcacacgacagtggccgttgccaaaggaacaagtcgaggcaattgacgagttctttgcgcaacgcgcgaaggctgggcatgtgcgggagagcaagtctccgcattgtagtcccactttttgtgtgaagaaggcgactggcggatggcgcattgttcacgctttcaacaagctgaacgacgcgactattcctgctcagactccggttccacgcaaggatatgatccttgatgggatggttggcagcaccgtctttagtgctatcgatctgaaagatggattctatcagattcgaatgcgcaaagacgatgtcccactaactgcagtgagtacccctagcggtatgctgtgggaatggttagtgatgccacagggactgaagaatgcgcccgcgaccttcaatcgaatggtcacgaacgttcttcgtcctttacgaacatttgcaccgagttacttcgacgatatcttcgttcatagtaaggccacaaatgggagatctgatgtcgatgttcatcttgatcatcttcgtcaagttttccaggtcatgcgtgaaaacaaactttacgcaaacttgaagaagtgcatgttcttcgcccccgagatccctgttctcggatgttttgtgggcaagaacggtgttcgagttgatccggagaaggtcaaagctattgacgattggcctgtgccaaagaacgtcaaacagctacgccaatggttgggtctggccaactatttgcacaagtacacgcgcaattatgcagcgttagtgcaacccctcacacagctcttgaagaaagacgttgagtggaagtggtcgaaagaccatcaaacggcgttcgaagaagtcaagaggagtcttcgtgaagctcctgtgttggctctaccgaatcacgacaagccgttccacgtcgtctgtgatgcgagcgattatgccatcggttgcgcattgatgcaacacgatgatgagggtcgannnnnnnnnnnnnnnnnnnnnnnnnnnnnnnnnnnnnnnnnnnnnnnnnnnnnnnnnnnnnnnnnnnnnnnnnnnnnnnnnnnnnnnnnnnnnnnnnnnnnnnnnnnnnnnnnnnnnnnnnnnnnnnnnnnnnnnnnnnnnnnnnnnnnnnnnnnnnnnnnnnnnnnnnnnnnnnnnnnnnnnnnnnnnnnnnnnnnnnnnnnnnnnnnnnnnnnnnnnnnnnnnnnnnnnnnnnnnnnnnnnnnnnnnnnnnnnnnnnnnnnnnnnnnnnnnnnnnnnnnnnnnnnnnnnnnnnnnnnnnnnnnnnnnnnnnnnnnnnnnnnnnnnnnnnnnnnnnnnnnnnnnnnnnnnnnnnnnnnnnnnnnnnnnnnnnnnnnnnnnnnnnnnnnnnnnnnnnnnnnnnnnnnnnnnnnnnnnnnnnnnnnnnnnnnnnnnnnnnnnnnnnnnnnnnnnnnnnnnnnnnnnnnnnnnnnnnnnnnnnnnnnnnnnnnnnnnnnnnnnnnnnnnnnnnnnnnnnnnnnnnnnnnnnnnnnnnnnnnnnnnnnnnnnnnnnnnnnnnnnnnnnnnnnnnnnnnnnnnnnnnnnnnnnnnnnnnnnnnnnnnnnnnnnnnnnnnnnnnnnnnnnnnnnnnnnnnnnnnnnnnnnnnnnnnnnnnnnnnnnnnnnnnnnnnnnnnnnnnnnnnnnnnnnnnnnnnnnnnnnnnnnnnnnnnnnnnnnnnnnnnnnnnnnnnnnnnnnnnnnnnnnnnnnnnnnnnnnnnnnnnnnnnnnnnnnnnnnnnnnnnnnnnnnnnnnnnnnnnnnnnnnnnnnnnnnnnnnnnnnnnnnnnnnnnnnnnnnnnnnnnnnnnnnnnnnnnnnnnnnnnnnnnnnnnnnnnnnnnnnnnnnnnnnnnnnnnnnnnnnnnnnnnnnnnnnnnnnnnnnnnnnnnnnnnnnnnnnnnnnnnnnnnnnnnnnnnnnnnnnnnnnnnnnnnnnnnnnnnnnnnnnnnnnnnnnnnnnnnnnnnnnnnnnnnnnnnnnnnnnnnnnnnnnnnnnnnnnnnnnnnnnnnnnnnnnnnnnnnnnnnnnnnnnnnnnnnnnnnnnnnnnnnnnnnnnnnnnnnnnnnnnnnnnnnnnnnnnnnnnnnnnnnnnnnnnnnnnnnnnnnnnnnnnnnnnnnnnnnnnnnnnnnnnnnnnnnnnnnnnnnnnnnnnnnnnnnnnnnnnnnnnnnnnnnnnnnnnnnnnnnnnnnnnnnnnnnnnnnnnnnnnnnnnnnnnnnnnnnnnnnnnnnnnnnnnnnnnnnnnnnnnnnnnnnnnnnnnnnnnnnnnnnnnnnnnnnnnnnnnnnnnnnnnnnnnnnnnnnnnnnnnnnnnnnnnnnnnnnnnnnnnnnnnnnnnnnnnnnnnnnnnnnnnnnnnnnnnnnnnnnnnnnnnnnnnnnnnnnnnnnnnnnnnnnnnnnnnnnnnnnnnnnnnnnnnnnnnnnnnnnnnnnnnnnnnnnnnnnnnnnnnnnnnnnnnnnnnnnnnnnnnnnnnnnnnnnnnnnnnnnnnnnnnnnnnnnnnnnnnnnnnnnnnnnnnnnnnnnnnnnnnnnnnnnnnnnnnnnnnnnnnnnnnnnnnnnnnnnnnnnnnnnnnnnnnnnnnnnnnnnnnnnnnnnnnnnnnnnnnnnnnnnnnnnnnnnnnnnnnnnnnnnnnnnnnnnnnnnnnnnnnnnnnnnnnnnnnnnnnnnnnnnnnnnnnnnnnnnnnnnnnnnnnnnnnnnnnnnnnnnnnnnnnnnnnnnnnnnnnnnnnnnnnnnnnnnnnnnnnnnnnnnnnnnnnnnnnnnnnnnnnnnnnnnnnnnnnnnnnnnnnnnnnnnnnnnnnnnnnnnnnnnnnnnnnnnnnnnnnnnnnnnnnnnnnnnnnnnnnnnnnnnnnnnnnnnnnnnnnnnnnnnnnnnnnnnnnnnnnnnnnnnnnnnnnnnnnnnnnnnnnnnnnnnnnnnnnnnnnnnnnnnnnnnnnnnnnnnnnnnnnnnnnnnnnnnnnnnnnnnnnnnnnnnnnnnnnnnnnnnnnnnnnnnnnnnnnnnnnnnnnnnnnnnnnnnnnnnnngacttcaaatgtgcagttttttgtgattttgttttcttgggttgtaggggtcgactgcttggttgaaaaccgagaacaagtcaaactctcaaactgacgtaaaatctcccagggaccgctcgcaatgaggcagtataggaaatagtaggcagcactgaagagtcaagatcagagtgcgaagcgaacctcaattcgcggcagctccgaaatgtacacttcgggagagcaatagcactcacagatgagctctaaaagatcgatcccaccaacaagcgtggcagacgaaactgatcactaaccacgtcgtggaaagcaccgagtcgctaatcaaacttcgagaggttcacccgtgtgaactaagggacggtcgaggttgggttggagagggttggcagtcgcttgggaccagctggcgcagaaagtcgatagcaagcgtgggcttgtctattcgacttgtggggtagctggaaaattggaaagtcatgagtgcactagaccatacaataagcaagttcaacaaacagccaatcagagacaggtattcagtcaacactgtgtattcactgcgctttgctggcagatcgctcattttcctttttgctgaagagcaaaatgaagtcaaccaagcgcaaacgaccaccggaagactcggactccgacttcgaagaagacgtcacgccgcgaatcgccagtctgagactgcgcgtggctccaaccgatgagatcgtacaagagtccgaccgcggaagttcttgtgacgagtccgctcctgcagtccgtgaagtgatcatccttgacagctcggacgaggacgacctactcgaagacatccagacaatgactgtccgtcccaagtctgtcaagcgtgcgacgaccagaaagaacgccagtgcgaagaaacccaaggtgtctgccaagacctcacaacaacaagttcgtgttgggaaggagcctgcagcccgcaagaaatcttccggtaccgtactggagaacgcgttcaagaaaggcaagcagttctgcagcatcacgtgtcgtcttgagaccgtctgtccggatcccgacctccgtcagcagatccgcgactgcgtccgacgaatgaaacagatccagatggagtcctggcacctcgcgaacctccacaccctgcggtgtttggaagaaggcatccagcttccgttgtatgatgagacgttcttcgaccaatgttgctctggcgtatcaagcacatcgcgtctcacaacnnnnnnnnnnnnnnnnnnnnggctatacctagccattacatgaaggtgcggctgtgcctactttagtgttggacacaccacttcagcgtgcattgtggtagcaaataacaaagggattacggtacaacagatcccacatgcacgtgtgacgtcatctgatgatgtcacaagtatccatgtactaatcaagtacagagtgatggttccgacttgggaatctacactggtgacgagaccgacgtgtctctatcctctgaagtgagtggctcccgccaatcactttgcagggaatctctgcggtacttcaagttcaagttcccagcagatcccctgggttcaacctcagtgtacccaaggttttatatatcagattcataggttttatttctgcatgtgtaggttttagttgtaaaacctctaggatctctagtggtgtttcatatgtagtgtcaggaaccataaccacattttaattcagttgcaattttacctccaagtcctcaagtcgtcttctctccctccaagtcgggagatcgcttcctcgttgcacaagcgtgtgtgccgtgtattgggaactgttgtgaacagcgtcccattacagttgaattcttcacacatcgagtgcaagtcttctgccgattgtactgggatggtagtcttgtgcaggagcattgggggccggaagaaatacttggtgcacttttcggactggtacaagtcggatgcaaatttttgcttggacttgtggtggtcttcttcttcaatatggactcgtagtttctgttggagcgaactgagggttgttgacacttcttgagacggactgagatgctggaggtgttggagttgattaatacgcatgtgcaggtcttctttctcgacttgtctcttgttcttcttttcgttgaagagctggcgtagatagatgcagtcttgacgcttgtgttcatcgaggagatatcctgggttgtatgtcgatgtaatggtcggatcaattgattccgccagttttatcagggacaacttgagatattcttgcgcctcaggcaattcgatcacccagcttggacatcgccacggtgctcttgttcttggcttgaatagttcagaaccgagggtgaactcgatcccgcagtggtcggctttgttcggctggtgcttccagtcgtgcttgagttgtttgagctgccaattgaatatatcggaactcaataggacgaagtcgatacgagcacttcggttgggactcgtaaattcgcgaacatggggttctgcaggcgccatgcatcaaaaagattcaatgcctgcatccactccaggagttcttgacggccctcacgacgggctcggttgtttgtctgggcttggtcgagctgggtcgagaagactgtgttaaagtctcctagagccatatgtatggcattttcttcaaactgtctggggagactgtcaaagaagcttggtcggtcagttgggtttactggcgcatacactgcgtgaatatacgctggcgagccatccagtgtaccttggagcacgagataccgtgagagagtgtttcgatcactcacttgggtttctgtgatgtcttggatatcttggaccggacaagtgggggtgagnnnnnnnnnnnnnnnnnnnnnnnnnnnnnnnnnnnnnnnnnnnnnnnnnnnnnnnnnnnnnnnnnnnnnnnnnnnnnnnnnnnnnnnnnnnnnnnnnnnnnnnnnnnnnnnnnnnnnnnnnnnnnnnnnnnnnnnnnnnnnnnnnnnnnnnnnnnnnnnnnnnnnnnnnnnnnnnnnnnnnnnnnnnnnnnnnnnnnnnnnnnnnnnnnnnnnnnnnnnnnnnnnnnnnnnnnnnnnnnnnnnnnnnnnnnnnnnnnnnnnnnnnnnnnnnnnnnnnnnnnnnnnnnnnnnnnnnnnnnnnnnnnnnnnnnnnnnnnnnnnnnnnnnnnnnnnnnnnnnnnnnnnnnnnnnnnnnnnnnnnnnnnnnnnnnnnnnnnnnnnnnnnnnnnnnnnnnnnnnnnnnnnnnnnnnnnnnnnnnnnnnnnnnnnnnnnnnnnnnnnnnnnnnnnnnnnnnnnnnnnnnnnnnnnnnnnnnnnnnnnnnnnnnnnnnnnnnnnnnnnnnnnnnnnnnnnnnnnnnnnnnnnnnnnnnnnnnnnnnnnnnnnnnnnnnnnnnnnnnnnnnnnnnnnnnnnnnnnnnnnnnnnnnnnnnnnnnnnnnnnnnnnnnnnnnnnnnnnnnnnnnnnnnnnnnnnnnnnnnnnnnnnnnnnnnnnnnnnnnnnnnnnnnnnnnnnnnnnnnnnnnnnnnnnnnnnnnnnnnnnnnnnnnnnnnnnnnnnnnnnnnnnnnnnnnnnnnnnnnnnnnnnnnnnnnnnnnnnnnnnnnnnnnnnnnnnnnnnnnnnnnnnnnnnnnnnnnnnnnnnnnnnnnnnnnnnnnnnnnnnnnnnnnnnnnnnnnnnnnnnnnnnnnnnnnnnnnnnnnnnnnnnnnnnnnnnnnnnnnnnnnnnnnnnnnnnnnnnnnnnnnnnnnnnnnnnnnnnnnnnnnnnnnnnnnnnnnnnnnnnnnnnnnnnnnnnnnnnnnnnnnnnnnnnnnnnnnnnnnnnnnnnnnnnnnnnnnnnnnnnnnnnnnnnnnnnnnnnnnnnnnnnnnnnnnnnnnnnnnnnnnnnnnnnnnnnnnnnnnnnnnnnnnnnnnnnnnnnnnnnnnnnnnnnnnnnnnnnnnnnnnnnnnnnnnnnnnnnnnnnnnnnnnnnnnnnnnnnnnnnnnnnnnnnnnnnnnnnnnnnnnnnnnnnnnnnnnnnnnnnnnnnnnnnnnnnnnnnnnnnnnnnnnnnnnnnnnnnnnnnnnnnnnnnnnnnnnnnnnnnnnnnnnnnnnnnnnnnnnnnnnnnnnnnnnnnnnnnnnnnnnnnnnnnnnnnnnnnnnnnnnnnnnnnnnnnnnnnnnnnnnnnnnnnnnnnnnnnnnnnnnnnnnnnnnnnnnnnnnnnnnnnnnnnnnnnnnnnnnnnnnnnnnnnnnnnnnnnnnnnnnnnnnnnnnnnnnnnnnnnnnnnnnnnnnnnnnnnnnnnnnnnnnnnnnnnnnnnnnnnnnnnnnnnnnnnnnnnnnnnnnnnnnnnnnnnnnnnnnnnnnnnnnnnnnnnnnnnnnnnnnnnnnnnnnnnnnnnnnnnnnnnnnnnnnnnnnnnnnnnnnnnnnnnnnnnnnnnnnnnnnnnnnnnnnnnnnnnnnnnnnnnnnnnnnnnnnnnnnnnnnnnnnnnnnnnnnnnnnnnnnnnnnnnnnnnnnnnnnnnnnnnnnnnnnnnnnnnnnnnnnnnnnnnnnnnnnnnnnnnnnnnnnnnnnnnnnnnnnnnnnnnnnnnnnnnnnnnnnnnnnnnnnnnnnnnnnnnnnnnnnnnnnnnnnnnnnnnnnnnnnnnnnnnnnnnnnnnnnnnnnnnnnnnnnnnnnnnnnnnnnnnnnnnnnnnnnnnnnnnnnnnnnnnnnnnnnnnnnnnnnnnnnnnnnnnnnnnnnnnnnnnnnnnnnnnnnnnnnnnnnnnnnnnnnnnnnnnnnnnnnnnnnnnnnnnnnnnnnnnnnnnnnnnnnnnnnnnnnnnnnnnnnnnnnnnnnnnnnnnnnnnnnnnnnnnggtgtatccgacgccaaggagaagacgtacttcatggatgctacaactcggaaccgaccaagcttgaggaagtccaagaaatgcgagcgttgctcactccagacggtgtgagttggtgcgaagagtggatcccatggccaaatcttatcacggacgatagcaagatcgagttctacatccgtctcctttggaagttccaacgggtgatagaagaccacatcgaagcgaacccgggaagaagtacgaagggtgtacgggcgttctcactcttcccggtcgctactagctacactgcgtcacacatcaaaatcaacgcgacgacgttagctggtctgtgttctcgtgtgaagaagaaagatcccgagaccggcggtgactgctccatcacgaaatggtggggagtcgaccacatcaagatcgatcacaacgcattcgccgcggagaagtggacggtgatgaggaaggctttcgacatcgatgcgtttgagactttgcgacctgacaccgacgtttccaaggcagacttccgacatatgactgtcgaggagaagtacgctcacgcgagtcacttgtttgcaaaccaagtgacaactgatggatacggcgcgagcgttctgttgttccgaacaaagaacgagctcgatgaggcggagaagcagcagtccgaaaggcttgtccctgaggggtaccgtccagaggtcgtgatcggtctggatccaggcatgcgttccgtgtgtactgcagtgcgcgagcgttttgctccgcggcagatcaagcgagttcgtcggcgttcagtgaggaagaagcgacgacggaaaaggtcgtggattcgacgatacgatggccccaaacgcaagaacggtcgagatatcgtcgaagtgcacgcgaaggagtaccggcatctggccaggttcagaaaacgacgggcgtgggaagaagtactgaagaactccaaccctgagtacgggactgcgattcgggggatgccgtccttcaagacatcaagatacaaggtctacctggaacgtctacattacttctggaagcatgcaggatttctgttggagatctgctggcggaagccgttcctgaagtggaagttctttaacaagcgtagttctcgcatcgcagtggacgcgttggcagcacggattgttcctgatctcagcgtgcagacgtgcattgcatacgggaactggagcagacgagatggaatcaaaggacatgcttccagtccagtcaagggtttacagcaggcgttggcaaagcgcgcaaaggtggtcatcctggatgagttcaagacgagcaagctctgctcgacgtgccaccgcgagctttcgcccgtatcgtacctcgtggaccccgatcttgacaagagacgcaagcgcgcaggcaaaataatctcgcgatatcattccgaggaaaggaagttggtcgagtgtcacgcagtgctgcggtgtgaccagaagaagtgcgaggcctcatactggaaccgagacgtgaacgctgccatcaatatcgtgaactgctcaagtacgagattgaacatggaggacgcatggcggcgtttgcacgagtacaagatcgaagagactgaaaaaaatgcaggctgtatagcctcatcgtggagacgagaacctctccacccaggtattagcgtgagaagacatcgtagacttctctcagtaagctagagtcctgtatattacggattagctagtttttagctagggtgacattctcactgaattccgtaatacctgatagctgcgcatatgcagttgagctcatttcccttcttcgcctgcttttcaatatatatattctttcaacatggtctcaatatatacacaatcctttgatgctctgtttccctattcttgatgcagttgctgctcgtcgtctctccgcggctgtcgctgcgcttccagttggtgcgagtactcgaccaggaagcggttcgagccgacaccaaacacgtcgccgtgcaataaataccggcgtcggctcttctcgccgctcgcacttagcctaacggccgtgccgttcgtgctgtccaggtccgtgatgtagaagccgtcgcctaggtacgagatgacgctgtggcggcccgatattgagccgtcatccgtgatgcagagcgcgttgctggatcgccgaccgagcgtcacggcggttctccctaacgtctggccgatgcccgtcaacggaccttcggtgaagcagatgcgcaggaacggtgtcttggtcgcaggattctcgtcgatcgcaacgacttcaaactctgtgtcgcccagtttcacgcggtcgtggatgcgaaggcgcttcgggacattgggcttcaggaacaggaacgtccccgtcgtactcccgaggtcctgcaggaaatactccttctccatggggtcatactggatctggaaatgataccgactcacgtacgggtcatcagagacgatctggttgctctggtggcgaccgcctcgggcgccattccgcggattcagtacgatcgacttgcccccactcctccgctgctccatcgacggattgctggaattggattgtactgacgagctgcgtcgggcttttgcgggtggcagcagcacattccgctcgggggacagcgacgtcaccacgagcagatcgagctcgtcgatctcgcggtcgacgccgaaatagccccaactgtggcgcctccgatgggcatgcgactgtcgccgctttttagtccgtgtctggtgtctgtcgtggatggctttgatcttttccacaaagccgacaaggcgcttgcccacgcgcttcactgggaagtgcagccgatactcgcgcgacatgatgagcccgaggaaccacgcggccatgatcgcagtcaccagcacataccgaaggtactgtgtcgtgctcagtccactcttcgcaccacctgatgacatgggtgcactcgatgcctgcgacaggacgatccgttgaccaccattctgcgcgaaataatggctcgcttccgtctgcatgtacgcaaaggacgcgacgatcgcggacgagcacgccgtagcgtgcagccagttccacttgaccgtcggctcggggcgcctggacgatgcgccaagaaggatccctgttttactgctgggcggtgtcgtcctgttcgcagcgccgctgctgttgtagctgctgctggaactggatctctcactactgctcgtgctgctgctgctgctgctgcttcggcgggagctcatgggcgtcgacaggaacgtgcgtgtgtgcctctggtgacgtggcgccttcccccctcagtctttgctgctatagtacgtggtatggagagcgcgcttctcctgcgtggcggcgtcggcggcagtgaagagtgccgctggtggcgtgatgtggcttcgcagccccatctcgattgacacaactggacggtgtcatgttgctcgaaggtaacacaatttaaaagtgtagtgatatgcgacgaacgcacaagtgtcacgagtgtaacgtaaaggaataacaaactacacccacgatgtacatgttgcaggaaggtaacgaaagaagaatacaaagggcttgtattcaaggctgcggactttaccgagagcacgatgcttgcgcagcacgcgtcagccccacatcatttcttagaacaccaacagagcattgagcagaatggacctgtggctgctcgcgctcgcgctcattgcagcgtaccccgtggtcgccgcgggcatctgcttcttgttcatctacacggagcgccggcggtacgtgcgccaccacttggtcgcgcagagcgacgtcgcggaccatcactcgggcgagaagaccgtgacgatcggcgtgttccacccgtacgcgaatggcggcggcggcggtgagcgcgtgatgtactgcgcgctggtcgcgctcgtcaagtactttaaagagctcaaggccgagccgacggagacagcgagcggcagtgataacaagccacgcgtgtatcgagtcgaattgctgctgtactctggcgacgacggcctttccaccaaggaactgctcgaccgcgcggccgagcggttcaatctcccggacttgcatcagtatcgagtagatcttcaggttcgcttggtgccgctcgccaaccgcgaggtgctggatccggggctgtacctgcgattcacgctgttctggcagagcattgcgcacatccgattggcgctcacagcgttccgcacgagcgagaaactggggttgtacccgcaagtgtggatcgatacgacgggatgtccgttctcatacctggtagcgagcgtccgctttggatgtaccgtcgtcgcgtacgtgcactacccgatgatctcgaccgacatgattgcgaaagtgcaaacgcgcgccaccgacttcaacaacaacgcgaccgtggcattcagttcgacgcgctcgttcgcaaagtacatctactaccgcatctttgcggccacatacacgcttgtgggcaagtactgcaccgacattgtcatggtgaactcgacgtggacgtacaaccacgtcaagcagctctggggcggcaaacctgcgatcgtgtacccgccgtgcggcagcatggaagagtttatgcagtttgacattgaaaaccgcgagccactggcgttgtcgatctcacaattccgacctgagaagaaccaattgctgcagctgcaagcgatgaaagtgctgctcacaaagtacgcgacaaagatgaacacaacgcacaaggactttaagctgataatgcttggaagctgccgcaatgccgacgatgaagcgcgcatcgagacgctgaaggagcagtgcgtggagctgggtctgacaggtcgcgtggagtttgtcgtgaacgcgagctttgccgagctgaagcagtacctcgcgcgctcgtccgttgggatccacacgatgtacaacgagcattttgggatcggcgtcgtcgaaatgatggcggctgggctgctggtcgtcgccaacaactcgggcgggccggccgccgacattgtgcgtccagacacggggtacctcgcgctcacggcggacgagtacgcggacaagatgctggcgatcctcgagcaggacgcgagtgccgcaagggcgatgcgcgcgcggtgccgccaggcgtcgggtcgtttctccgacagtgagtttggcgcgcagttcattgcggccatggacgccgtcctgcgacgtgtgagcggcaatggtgatcacggccttggcaagaaagccatgtagatcatctacagtagatgtcatcctcactgtttttctttcattgctgccaatcatgtgtcgttattcgtccgtaataccttttttctacgaatcaagtgtcatgaaagattgaaaatgcgactttttcaaccaattagtcatttgcatgttgctatctatgaaaacgtgtcatttcgcgaaaagatcaaatggcgcgcaagacaggcaaggagagtgctgcggatgcgagtgccgccaagcgcgcggcgcgcaaggccagcggaaagagcgccaagcccaagagcctgctcgtgacgatcctcccgtacgtcgtgctcgtcgcggttctcgcggtggcggtcaactatctctacctgcagccagcgcagactacagcaaagaaatcggcggcgaagcgcaacggaagctcgtatctgtcgcgcaaggagatcgtcgaccgcaagcgcgttgatatcccatgctggatgaagaaggttcgtttgctccccctgctgtatatcgtttagtatggtgctcgttcatgattcatgtgcgctattacgaataaatgatagaaaaccaagggctttgtggaaggctgccaccaaatgggcaagtcctgcggccgcgctgtcaaggaccagttcgtgacgcccgaggaggtgatacagctgcgcgagatcgcggaggtcggcatgacgaaccgctcaaagctcggcggacccacgatcatggacgtgaacacggggtacgtgaaggacggtcaggggctcgtcaatatctaccagagccaccgcaacgcgccgccgacgccgcggttcactgcggagcagtttgcgctctaccgtcaagtcatcgagaagatccgattggcgctgatcgaggagttccagctgaagatgctctacttcacggcaccgacgttcatcacgcgcatcgtggggaatgcgtcatggagtccagccgacatgcacgacgagtactggtacgtaggcaatcaaacgatataggcgcacaagcattgactccaaccttgtattattactgcattgcaggcatccgcatgtggataaggacaacacacagcattacgactactcagggctactctacttgtccgactacgaggacgaattcaccggcgggttgtttgcgtttatcgacaagaagagcgagcaaatcgtggaaccggcgcg

SEQ ID NO: 154 - DNA, 20816 bp, Pythium sp.
  variation 1..3978: note = n is any nucleotide
  variation 6263..6282: note = n is any nucleotide
  variation 10847..20145: note = n is any nucleotide
  source 1..20816: mol_type = other DNA
nnnnnnnnnnnnnnnnnnnnnnnnnnnnnnnnnnnnnnnnnnnnnnnnnnnnnnnnnnnnnnnnnnnnnnnnnnnnnnnnnnnnnnnnnnnnnnnnnnnnnnnnnnnnnnnnnnnnnnnnnnnnnnnnnnnnnnnnnnnnnnnnnnnnnnnnnnnnnnnnnnnnnnnnnnnnnnnnnnnnnnnnnnnnnnnnnnnnnnnnnnnnnnnnnnnnnnnnnnnnnnnnnnnnnnnnnnnnnnnnnnnnnnnnnnnnnnnnnnnnnnnnnnnnnnnnnnnnnnnnnnnnnnnnnnnnnnnnnnnnnnnnnnnnnnnnnnnnnnnnnnnnnnnnnnnnnnnnnnnnnnnnnnnnnnnnnnnnnnnnnnnnnnnnnnnnnnnnnnnnnnnnnnnnnnnnnnnnnnnnnnnnnnnnnnnnnnnnnnnnnnnnnnnnnnnnnnnnnnnnnnnnnnnnnnnnnnnnnnnnnnnnnnnnnnnnnnnnnnnnnnnnnnnnnnnnnnnnnnnnnnnnnnnnnnnnnnnnnnnnnnnnnnnnnnnnnnnnnnnnnnnnnnnnnnnnnnnnnnnnnnnnnnnnnnnnnnnnnnnnnnnnnnnnnnnnnnnnnnnnnnnnnnnnnnnnnnnnnnnnnnnnnnnnnnnnnnnnnnnnnnnnnnnnnnnnnnnnnnnnnnnnnnnnnnnnnnnnnnnnnnnnnnnnnnnnnnnnnnnnnnnnnnnnnnnnnnnnnnnnnnnnnnnnnnnnnnnnnnnnnnnnnnnnnnnnnnnnnnnnnnnnnnnnnnnnnnnnnnnnnnnnnnnnnnnnnnnnnnnnnnnnnnnnnnnnnnnnnnnnnnnnnnnnnnnnnnnnnnnnnnnnnnnnnnnnnnnnnnnnnnnnnnnnnnnnnnnnnnnnnnnnnnnnnnnnnnnnnnnnnnnnnnnnnnnnnnnnnnnnnnnnnnnnnnnnnnnnnnnnnnnnnnnnnnnnnnnnnnnnnnnnnnnnnnnnnnnnnnnnnnnnnnnnnnnnnnnnnnnnnnnnnnnnnnnnnnnnnnnnnnnnnnnnnnnnnnnnnnnnnnnnnnnnnnnnnnnnnnnnnnnnnnnnnnnnnnnnnnnnnnnnnnnnnnnnnnnnnnnnnnnnnnnnnnnnnnnnnnnnnnnnnnnnnnnnnnnnnnnnnnnnnnnnnnnnnnnnnnnnnnnnnnnnnnnnnnnnnnnnnnnnnnnnnnnnnnnnnnnnnnnnnnnnnnnnnnnnnnnnnnnnnnnnnnnnnnnnnnnnnnnnnnnnnnnnnnnnnnnnnnnnnnnnnnnnnnnnnnnnnnnnnnnnnnnnnnnnnnnnnnnnnnnnnnnnnnnnnnnnnnnnnnnnnnnnnnnnnnnnnnnnnnnnnnnnnnnnnnnnnnnnnnnnnnnnnnnnnnnnnnnnnnnnnnnnnnnnnnnnnnnnnnnnnnnnnnnnnnnnnnnnnnnnnnnnnnnnnnnnnnnnnnnnnnnnnnnnnnnnnnnnnnnnnnnnnnnnnnnnnnnnnnnnnnnnnnnnnnnnnnnnnnnnnnnnnnnnnnnnnnnnnnnnnnnnnnnnnnnnnnnnnnnnnnnnnnnnnnnnnnnnnnnnnnnnnnnnnnnnnnnnnnnnnnnnnnnnnnnnnnnnnnnnnnnnnnnnnnnnnnnnnnnnnnnnnnnnnnnnnnnnnnnnnnnnnnnnnnnnnnnnnnnnnnnnnnnnnnnnnnnnnnnnnnnnnnnnnnnnnnnnnnnnnnnnnnnnnnnnnnnnnnnnnnnnnnnnnnnnnnnnnnnnnnnnnnnnnnnnnnnnnnnnnnnnnnnnnnnnnnnnnnnnnnnnnnnnnnnnnnnnnnnnnnnnnnnnnnnnnnnnnnnnnnnnnnnnnnnnnnnnnnnnnnnnnnnnnnnnnnnnnnnnnnnnnnnnnnnnnnnnnnnnnnnnnnnnnnnnnnnnnnnnnnnnnnnnnnnnnnnnnnnnnnnnnnnnnnnnnnnnnnnnnnnnnnnnnnnnnnnnnnnnnnnnnnnnnnnnnnnnnnnnnnnnnnnnnnnnnnnnnnnnnnnnnnnnnnnnnnnnnnnnnnnnnnnnnnnnnnnnnnnnnnnnnnnnnnnnnnnnnnnnnnnnnnnnnnnnnnnnnnnnnnnnnnnnnnnnnnnnnnnnnnnnnnnnnnnnnnnnnnnnnnnnnnnnnnnnnnnnnnnnnnnnnnnnnnnnnnnnnnnnnnnnnnnnnnnnnnnnnnnnnnnnnnnnnnnnnnnnnnnnnnnnnnnnnnnnnnnnnnnnnnnnnnnnnnnnnnnnnnnnnnnnnnnnnnnnnnnnnnnnnnnnnnnnnnnnnnnnnnnnnnnnnnnnnnnnnnnnnnnnnnnnnnnnnnnnnnnnnnnnnnnnnnnnnnnnnnnnnnnnnnnnnnnnnnnnnnnnnnnnnnnnnnnnnnnnnnnnnnnnnnnnnnnnnnnnnnnnnnnnnnnnnnnnnnnnnnnnnnnnnnnnnnnnnnnnnnnnnnnnnnnnnnnnnnnnnnnnnnnnnnnnnnnnnnnnnnnnnnnnnnnnnnnnnnnnnnnnnnnnnnnnnnnnnnnnnnnnnnnnnnnnnnnnnnnnnnnnnnnnnnnnnnnnnnnnnnnnnnnnnnnnnnnnnnnnnnnnnnnnnnnnnnnnnnnnnnnnnnnnnnnnnnnnnnnnnnnnnnnnnnnnnnnnnnnnnnnnnnnnnnnnnnnnnnnnnnnnnnnnnnnnnnnnnnnnnnnnnnnnnnnnnnnnnnnnnnnnnnnnnnnnnnnnnnnnnnnnnnnnnnnnnnnnnnnnnnnnnnnnnnnnnnnnnnnnnnnnnnnnnnnnnnnnnnnnnnnnnnnnnnnnnnnnnnnnnnnnnnnnnnnnnnnnnnnnnnnnnnnnnnnnnnnnnnnnnnnnnnnnnnnnnnnnnnnnnnnnnnnnnnnnnnnnnnnnnnnnnnnnnnnnnnnnnnnnnnnnnnnnnnnnnnnnnnnnnnnnnnnnnnnnnnnnnnnnnnnnnnnnnnnnnnnnnnnnnnnnnnnnnnnnnnnnnnnnnnnnnnnnnnnnnnnnnnnnnnnnnnnnnnnnnnnnnnnnnnnnnnnnnnnnnnnnnnnnnnnnnnnnnnnnnnnnnnnnnnnnnnnnnnnnnnnnnnnnnnnnnnnnnnnnnnnnnnnnnnnnnnnnnnnnnnnnnnnnnnnnnnnnnnnnnnnnnnnnnnnnnnnnnnnnnnnnnnnnnnnnnnnnnnnnnnnnnnnnnnnnnnnnnnnnnnnnnnnnnnnnnnnnnnnnnnnnnnnnnnnnnnnnnnnnnnnnnnnnnnnnnnnnnnnnnnnnnnnnnnnnnnnnnnnnnnnnnnnnnnnnnnnnnnnnnnnnnnnnnnnnnnnnnnnnnnnnnnnnnnnnnnnnnnnnnnnnnnnnnnnnnnnnnnnnnnnnnnnnnnnnnnnnnnnnnnnnnnnnnnnnnnnnnnnnnnnnnnnnnnnnnnnnnnnnnnnnnnnnnnnnnnnnnnnnnnnnnnnnnnnnnnnnnnnnnnnnnnnnnnnnnnnnnnnnnnnnnnnnnnnnnnnnnnnnnnnnnnnnnnnnnnnnnnnnnnnnnnnnnnnnnnnnnnnnnnnnnnnnnnnnnnnnnnnnnnnnnnnnnnnnnnnnnnnnnnnnnnnnnnnnnnnnnnnnnnnnnnnnnnnnnnnnnnnnnnnnnnnnnnnnnnnnnnnnnnnnnnnnnnnnnnnnnnnnnnnnnnnnnnnnnnnnnnnnnnnnnnnnnnnnnnnnnnnnnnnnnnnnnnnnnnnnnnnnnnnnnnnnnnnnnnnnnnnnnnnnnnnnnnnnnnnnnnnnnnnnnnnnnnnnnnnnnnnnnnnnnnnnnnnnnnnnnnnnnnnnnnnnnnnnnnnnnnnnnnnnnnnnnnnnnnnnnnnnnnnnnnnnnnnnnnnnnnnnnnnnnnnnnnnnnnnnnnnnnnnnnnnnnnnnnnnnnnnnnnnnnnnnnnnnnnnnnnnnnnnnnnnnnnnnnnnnnnnnnnnnnnnnnnnnnnnnnnnnnnnnnnnnnnnnnnnnnnnnnnnnnnatagcggagatgtcgtacaaaccgggaagccgtccgctgtcgcttcggctcgggctgttcttcgcgcttcacttggttgcttgatcgcttcatggtcaattgaaaagtgagagcggatacctcttccaaaagaagtaaagtccatgatggaactttaagggagggatgatgtaatgggctaaggctgccattacatgcaaggtggctctttgtgtgtgtcacacgccaccttgtggaagtgcattgtgggtgcgaagatattgggtgaaacacataaaaagtgatcccacatgcacagttgacgtcatcgtctgatgtcagagcaatctgtgtctgagttgagtgttgatcgctcgcaatcattgagattcggcgtgattatgcacgagagtactctagacatgtgaatgatggttcctacttggggaaaccacactggtgacgagatcaacgtgtctctaccatctgaagtgagtggcttccgccaatcactttgcagggaatctccgcggtacttcaagttcaagtttccagcagatcccctgggttcaacctcagtgtacccaaggttttatatatcagattcataggttttatttctgcatgtttaggttttacaagtaaaacctctaggagccctagtggtgttttatatgtagtgtcaggaaccataagctcattttcaattcagttgcaattttgccaagttctcccaaagtcttcctctcaagcgtaagcgtgcgtgctgtgtttgaggctgtctcggatagcctcttacacttccatactgtacaacggagctggatacttgcaatgagatggtgcagtcgatctgtattggagagacgtggcccataacgaataccaaggagcttggcttcaccagtattgtcaatgacttgcacccctagttgctgcagttgagtctggagttcttcatcttcacctgtccattctcgaaaaggtagtatgacagtcttgtgcgtgttgagcttcatcccggccgccgagcaaaagtcttggacacgttgtagaaactcgggtgcaagagagagatccgtgagtaaccctgtgcaatcatctgcaaagctgataactgtgtggggttcttcggaagctcgtaacttgagaccatgggtcttgaactggactcgaaggtaattcaatagcggttcaatgtagagcacaaataaggctggtgagagtggatcaccttgccgaactcctgcaccgagtgcaaaatggggcaatggagcgccattgaagagaatcgagacaatagtgcttcgaatcaccactcgaatccattcccggaaattcggaccaaacccaaagtgcctcagtatcatctcgagtgcatcccagacaacactgtcaaaggctttggcaaagtcgagtaggagtgcacctgccatttcttggtttcgttggaatagatgctggagagcttggaaccggagatgcgcgttacgaatatcacgtcctggacgaatccatactgatccgtgtggagcaacttgggcaaaattgactgtaacctcttggacaggattttcggtccgagttttgcatcgatgttcaatagcgtgataggccgatagttactgggcacatgtcggtcaccactcttgtataggagcgagatctgtcctcttctctggaacttggtcattttaccgagttggaattgagacgagtacaccacttcgagtatcttgctccaaagctgaatatccacgttgtagtacgcaagcgggagaccgtctggacctggagctttgttgggtgttgtgtgtttcagtgcatagcagaagtcattcgcagtgaacggactatctagcatatgctggtcttctgtagtcagtctggtcttggtatgctggaggattctcgatagcttgagtggattccactttggcttagagtgagaatactcacgagatggcgagcaatagataccactccagtaccggttgaattcttcacacatcgagtgcaagtcttctgccgattgtactgggatggtagtcttgtgcaggagcattgggggccggaagaaatacttggtgcacttttcggactggtacaagtcggatgcaaatttttgcttggacttgtggtggtcttcttcttcaatatggactcgtagtttctgttggagcgaactgagggttgttgacacttcttgagacggactgagatgctggaggtgttggagttgattaatacgcatgtgcaggtcttctttctcgacttgtctcttgttcttcttttcgttgaagagnnnnnnnnnnnnnnnnnnnngttgattcttcacacatcgagtgcaagtcttctgccgattgtactgggatggtagtcttgtgcaggagcattgggggccggaagaaatacttggtgcacttttcggactggtacaagtcggatgcaaatttttgcttggacttgtggtggtcttcttcttcaatatggactcgtagtttctgttggagcgaactgagggttgttgacacttcttgagacggactgagatgctggaggtgttggagttgattaatacgcatgtgcaggtcttctttctcgacttgtctcttgttcttcttttcgttgaagagctggcgtagatagatgcagtcttgacgcttgtgttcatcgaggagatatcctgggttgtatgtcgatgtaatggtcggatcaattgattccgccagttttatcagggacaacttgagatattcttgcgcctcaggcaattcgatcacccagcttggacatcgccacggtgctcttgttcttggcttgaatagttcagaaccgagggtgaactcgatcccgcagtggtcggctttgttcggctggtgcttccagtcgtgcttgagttgtttgagctgccaattgaatatatcggaactcaataggacgaagtcgatacgagcacttcggttgggactcgtaaattcgcgaacatggggttctgcaggcgccatgcatcaaaaagattcaatgcctgcatccactccaggagttcttgacggccctcacgacgggctcggttgtttgtctgggcttggtcgagctgggtcgagaagactgtgttaaagtctcctagagccatatgtatggcattttcttcaaactgtctggggagactgtcaaagaagcttggtcggtcagttgggtttactggcgcatacactgcgtgaatatacgctggcgagccatccagtgcaccttggagcacgagataccgtgagagagtgtttcgatcactcacttgggtttctgtgatgtcttggatatcttggaccggacaagtgggggtgagtagaatacccactcccgcctgtccggtatacatgttggaatggtcatgggaccaaaaggcggtgttgaagctcgaggactttttccacaaaaagtcggcgcgcttgaggttggctgggttcgtgaacttggtttcttgtagtgcgataatatggaacttggacgagaagtagttgagcgtactctgcgtgactcggttgaagccgttcacgttgatcgagtagcctcgtagggtccagtccacattagagagaaggctggctggagaagagggactggcgcaactcgcagatcgaggtcaaaagttcgcttggaagtcgcatactggccaatttctccatcaaatcggaccgaagcaggtttaacagcgttgtgtcatcccatagtagccaaagtgtatgttgaagtcgctgagccggagcttgcgagattgcacacactttgtatggatcggagtagatgctgggagccatcacttgcaacagcaggtcaaactcggcaatccagacttgctgccagaaaagcgcttgattatggtcgagacactggctgagcatggtctggtagtcttcggggtcttgggggttgaacacggcttggaccttgtcctcgaacgtgtcgagttccggaggcagttcttgcgagctgattttccgtaacaaggcgtgaccgtagaactttccagtcatgacactgtaattgcccggattactggtatcataaagcggacggaaaagacttggctgggttttgaccgtgactatgctcatctcaggactgggttcctcgtcaaattgtcggaggaacgcctggatgtaattgcacagacttgcagctgacattgactcaacattgtagtcaatcgtcgtgcgttgcacctcgatctgaccttccgcttgggtcacttgcgatcgaataggtgaacggtcttggttatggagggtgacgtctatgtccggagagatggacgcgtcctccgagcccagtgtaatccacgcatacacgttatgagacgcgatgagcggatacgtggtttgggatggtggcagtagaaaggcttgtgcctgatccactggtaccgtagagaatatcattttcttgcttctctcgatcagatggtacgcgtcgcacacatctgggagaggtgggatggggatggtggccttctgttcttcggaggtccacatcgaggatgggttgacagacagagatgtcatgtcagagtccgatcccatgtcagcatccgagtcaccactagtgtcagctgggatgatcggctgcatagctgcgtctgaaggagtatcgctactagcttcggcagccggtggatcttcgctgggttgggacgtgttcttgcgccgttctaatagaaacggcggggtcttcttattatacgcttggatacggtggttgacaacacaatagccagacgcagtgaactggatctggcgtaaaggttccttgccgccgatcataaccgctgcaggggagtctttctggttaaagtagacccgccgattgcgtaactgtagtccattggcagaccaagaaggggtgatgtacacgggaggtacaccatgggttgcaaaccaatcatagatgatactatcagtagtatcatccgcgaggcgttgcaactcgacatagtacaagtgagagtacttggagtagggttgaatcttgaacacctttccacagatggaaagttgcagattacccagcttcgtgcagatctcgcgattcgtgcacacgaagcttactccctttcctcggatcactttgaagtcccgaaggtgcacaatactattcgcccacaatgtggacttttggtcaccacccaacgaggtcatgatctctgtgtccgaaaacgtcgaggtcaagtctctcgctgggatccacatgggatagcactggtcgctgttcacaggcgtgggaacgcctcgcaacgcagctgccttccgttccgcagcagtgctgtccttatctaggaacactctttccgcttccgcgaaagtcgcatccgtcgggatagtcacttgcggacgtgatgagttggcacgccattgcttgcgccactcgatgttggcagctgaggtcttcataatgcagggataggtcaaacttgattttttttcttggctggtttctttttcttggctggcttcttttttcttggcttctttttcttgacttcaaatgtgcagtttttttgtgatttttgttttcttgggttgtaggggtcgactgcttggttgaaaaccgagaacaagtcaaactctcaaactgacctaaaatctcccagggaccgctcgcaatgaggcagtataggaaatagtaggcagcacctgaagagtcaagatcagagtgcgaagcgaacctcaattcgcggcagctccgaaatgtacacttcgggagagcaatagcactcacagatgagctctaaaagatcgatcccaccaacaagcgtggcagacgaaactgatcactaaccacgtcgtggaaagcaccgagtcgctaatcaaacttcgagaggttcacccgtgtgaactaagggacggtcgaggttgggttggagagggttggcagtcgcttgggaccagctggcgcagaaagtcgatagcaagcgtgggcttgtctattcgacttgtggggtagctggaaaattggaaagtcatgagtgcactagaccatacaataagcaagttcaacaaacagccaatcagagacaggtattcagtcaacactgtgtattcactgcgctttgctggcagatcgctcattttcctttttgctgaagagcaaaatgaagtcaaccaagcgcaaacgaccaccggaagactcggactccgacttcgaagaagacgtcacgccgcgaatcgccagtctgagactgcgcgtggctccaaccgatgagatcgtacaagagtccgctcctgcagtccgtgaagtgatcatccttgacagctcggacgaggacgacctactcgaagacatccagacaatgactgtccgtcccaagtctgtcaagcgtgcgacgaccagaaagaacgccagtgcgaagaaacccaagaaggtgtctgccaagacctcacaacaacaagttcgtgttgggaaggagcctgcagcccgcaagaaatcttccggtaccgtactggagaacgcgttcaagaaaggcaagcagttctgcagcatcacgtgtcgtcttgagaccgtctgtccggatcccgacctccgtcagcagatccgcgactgcgtccgacgaatgaaacagatccagatggagtcctggcacctcgtgaacctccacaccctgcggtgtttggaagaaggcatccagcttccgttgtatgatgagacgttcttcgaccaatgttgctctggcgtatcaagcacatcgcgttctcacaacaccgcgaataagaatccagcgttgtgggagacgatcaagatctaccgcgcggaaaggtcaagaacaaacttgaaggagtcgaaaatcaagtcggacttcccaagatgaagtatgaactccgacagcagatggttgnnnnnnnnnnnnnnnnnnnnnnnnnnnnnnnnnnnnnnnnnnnnnnnnnnnnnnnnnnnnnnnnnnnnnnnnnnnnnnnnnnnnnnnnnnnnnnnnnnnnnnnnnnnnnnnnnnnnnnnnnnnnnnnnnnnnnnnnnnnnnnnnnnnnnnnnnnnnnnnnnnnnnnnnnnnnnnnnnnnnnnnnnnnnnnnnnnnnnnnnnnnnnnnnnnnnnnnnnnnnnnnnnnnnnnnnnnnnnnnnnnnnnnnnnnnnnnnnnnnnnnnnnnnnnnnnnnnnnnnnnnnnnnnnnnnnnnnnnnnnnnnnnnnnnnnnnnnnnnnnnnnnnnnnnnnnnnnnnnnnnnnnnnnnnnnnnnnnnnnnnnnnnnnnnnnnnnnnnnnnnnnnnnnnnnnnnnnnnnnnnnnnnnnnnnnnnnnnnnnnnnnnnnnnnnnnnnnnnnnnnnnnnnnnnnnnnnnnnnnnnnnnnnnnnnnnnnnnnnnnnnnnnnnnnnnnnnnnnnnnnnnnnnnnnnnnnnnnnnnnnnnnnnnnnnnnnnnnnnnnnnnnnnnnnnnnnnnnnnnnnnnnnnnnnnnnnnnnnnnnnnnnnnnnnnnnnnnnnnnnnnnnnnnnnnnnnnnnnnnnnnnnnnnnnnnnnnnnnnnnnnnnnnnnnnnnnnnnnnnnnnnnnnnnnnnnnnnnnnnnnnnnnnnnnnnnnnnnnnnnnnnnnnnnnnnnnnnnnnnnnnnnnnnnnnnnnnnnnnnnnnnnnnnnnnnnnnnnnnnnnnnnnnnnnnnnnnnnnnnnnnnnnnnnnnnnnnnnnnnnnnnnnnnnnnnnnnnnnnnnnnnnnnnnnnnnnnnnnnnnnnnnnnnnnnnnnnnnnnnnnnnnnnnnnnnnnnnnnnnnnnnnnnnnnnnnnnnnnnnnnnnnnnnnnnnnnnnnnnnnnnnnnnnnnnnnnnnnnnnnnnnnnnnnnnnnnnnnnnnnnnnnnnnnnnnnnnnnnnnnnnnnnnnnnnnnnnnnnnnnnnnnnnnnnnnnnnnnnnnnnnnnnnnnnnnnnnnnnnnnnnnnnnnnnnnnnnnnnnnnnnnnnnnnnnnnnnnnnnnnnnnnnnnnnnnnnnnnnnnnnnnnnnnnnnnnnnnnnnnnnnnnnnnnnnnnnnnnnnnnnnnnnnnnnnnnnnnnnnnnnnnnnnnnnnnnnnnnnnnnnnnnnnnnnnnnnnnnnnnnnnnnnnnnnnnnnnnnnnnnnnnnnnnnnnnnnnnnnnnnnnnnnnnnnnnnnnnnnnnnnnnnnnnnnnnnnnnnnnnnnnnnnnnnnnnnnnnnnnnnnnnnnnnnnnnnnnnnnnnnnnnnnnnnnnnnnnnnnnnnnnnnnnnnnnnnnnnnnnnnnnnnnnnnnnnnnnnnnnnnnnnnnnnnnnnnnnnnnnnnnnnnnnnnnnnnnnnnnnnnnnnnnnnnnnnnnnnnnnnnnnnnnnnnnnnnnnnnnnnnnnnnnnnnnnnnnnnnnnnnnnnnnnnnnnnnnnnnnnnnnnnnnnnnnnnnnnnnnnnnnnnnnnnnnnnnnnnnnnnnnnnnnnnnnnnnnnnnnnnnnnnnnnnnnnnnnnnnnnnnnnnnnnnnnnnnnnnnnnnnnnnnnnnnnnnnnnnnnnnnnnnnnnnnnnnnnnnnnnnnnnnnnnnnnnnnnnnnnnnnnnnnnnnnnnnnnnnnnnnnnnnnnnnnnnnnnnnnnnnnnnnnnnnnnnnnnnnnnnnnnnnnnnnnnnnnnnnnnnnnnnnnnnnnnnnnnnnnnnnnnnnnnnnnnnnnnnnnnnnnnnnnnnnnnnnnnnnnnnnnnnnnnnnnnnnnnnnnnnnnnnnnnnnnnnnnnnnnnnnnnnnnnnnnnnnnnnnnnnnnnnnnnnnnnnnnnnnnnnnnnnnnnnnnnnnnnnnnnnnnnnnnnnnnnnnnnnnnnnnnnnnnnnnnnnnnnnnnnnnnnnnnnnnnnnnnnnnnnnnnnnnnnnnnnnnnnnnnnnnnnnnnnnnnnnnnnnnnnnnnnnnnnnnnnnnnnnnnnnnnnnnnnnnnnnnnnnnnnnnnnnnnnnnnnnnnnnnnnnnnnnnnnnnnnnnnnnnnnnnnnnnnnnnnnnnnnnnnnnnnnnnnnnnnnnnnnnnnnnnnnnnnnnnnnnnnnnnnnnnnnnnnnnnnnnnnnnnnnnnnnnnnnnnnnnnnnnnnnnnnnnnnnnnnnnnnnnnnnnnnnnnnnnnnnnnnnnnnnnnnnnnnnnnnnnnnnnnnnnnnnnnnnnnnnnnnnnnnnnnnnnnnnnnnnnnnnnnnnnnnnnnnnnnnnnnnnnnnnnnnnnnnnnnnnnnnnnnnnnnnnnnnnnnnnnnnnnnnnnnnnnnnnnnnnnnnnnnnnnnnnnnnnnnnnnnnnnnnnnnnnnnnnnnnnnnnnnnnnnnnnnnnnnnnnnnnnnnnnnnnnnnnnnnnnnnnnnnnnnnnnnnnnnnnnnnnnnnnnnnnnnnnnnnnnnnnnnnnnnnnnnnnnnnnnnnnnnnnnnnnnnnnnnnnnnnnnnnnnnnnnnnnnnnnnnnnnnnnnnnnnnnnnnnnnnnnnnnnnnnnnnnnnnnnnnnnnnnnnnnnnnnnnnnnnnnnnnnnnnnnnnnnnnnnnnnnnnnnnnnnnnnnnnnnnnnnnnnnnnnnnnnnnnnnnnnnnnnnnnnnnnnnnnnnnnnnnnnnnnnnnnnnnnnnnnnnnnnnnnnnnnnnnnnnnnnnnnnnnnnnnnnnnnnnnnnnnnnnnnnnnnnnnnnnnnnnnnnnnnnnnnnnnnnnnnnnnnnnnnnnnnnnnnnnnnnnnnnnnnnnnnnnnnnnnnnnnnnnnnnnnnnnnnnnnnnnnnnnnnnnnnnnnnnnnnnnnnnnnnnnnnnnnnnnnnnnnnnnnnnnnnnnnnnnnnnnnnnnnnnnnnnnnnnnnnnnnnnnnnnnnnnnnnnnnnnnnnnnnnnnnnnnnnnnnnnnnnnnnnnnnnnnnnnnnnnnnnnnnnnnnnnnnnnnnnnnnnnnnnnnnnnnnnnnnnnnnnnnnnnnnnnnnnnnnnnnnnnnnnnnnnnnnnnnnnnnnnnnnnnnnnnnnnnnnnnnnnnnnnnnnnnnnnnnnnnnnnnnnnnnnnnnnnnnnnnnnnnnnnnnnnnnnnnnnnnnnnnnnnnnnnnnnnnnnnnnnnnnnnnnnnnnnnnnnnnnnnnnnnnnnnnnnnnnnnnnnnnnnnnnnnnnnnnnnnnnnnnnnnnnnnnnnnnnnnnnnnnnnnnnnnnnnnnnnnnnnnnnnnnnnnnnnnnnnnnnnnnnnnnnnnnnnnnnnnnnnnnnnnnnnnnnnnnnnnnnnnnnnnnnnnnnnnnnnnnnnnnnnnnnnnnnnnnnnnnnnnnnnnnnnnnnnnnnnnnnnnnnnnnnnnnnnnnnnnnnnnnnnnnnnnnnnnnnnnnnnnnnnnnnnnnnnnnnnnnnnnnnnnnnnnnnnnnnnnnnnnnnnnnnnnnnnnnnnnnnnnnnnnnnnnnnnnnnnnnnnnnnnnnnnnnnnnnnnnnnnnnnnnnnnnnnnnnnnnnnnnnnnnnnnnnnnnnnnnnnnnnnnnnnnnnnnnnnnnnnnnnnnnnnnnnnnnnnnnnnnnnnnnnnnnnnnnnnnnnnnnnnnnnnnnnnnnnnnnnnnnnnnnnnnnnnnnnnnnnnnnnnnnnnnnnnnnnnnnnnnnnnnnnnnnnnnnnnnnnnnnnnnnnnnnnnnnnnnnnnnnnnnnnnnnnnnnnnnnnnnnnnnnnnnnnnnnnnnnnnnnnnnnnnnnnnnnnnnnnnnnnnnnnnnnnnnnnnnnnnnnnnnnnnnnnnnnnnnnnnnnnnnnnnnnnnnnnnnnnnnnnnnnnnnnnnnnnnnnnnnnnnnnnnnnnnnnnnnnnnnnnnnnnnnnnnnnnnnnnnnnnnnnnnnnnnnnnnnnnnnnnnnnnnnnnnnnnnnnnnnnnnnnnnnnnnnnnnnnnnnnnnnnnnnnnnnnnnnnnnnnnnnnnnnnnnnnnnnnnnnnnnnnnnnnnnnnnnnnnnnnnnnnnnnnnnnnnnnnnnnnnnnnnnnnnnnnnnnnnnnnnnnnnnnnnnnnnnnnnnnnnnnnnnnnnnnnnnnnnnnnnnnnnnnnnnnnnnnnnnnnnnnnnnnnnnnnnnnnnnnnnnnnnnnnnnnnnnnnnnnnnnnnnnnnnnnnnnnnnnnnnnnnnnnnnnnnnnnnnnnnnnnnnnnnnnnnnnnnnnnnnnnnnnnnnnnnnnnnnnnnnnnnnnnnnnnnnnnnnnnnnnnnnnnnnnnnnnnnnnnnnnnnnnnnnnnnnnnnnnnnnnnnnnnnnnnnnnnnnnnnnnnnnnnnnnnnnnnnnnnnnnnnnnnnnnnnnnnnnnnnnnnnnnnnnnnnnnnnnnnnnnnnnnnnnnnnnnnnnnnnnnnnnnnnnnnnnnnnnnnnnnnnnnnnnnnnnnnnnnnnnnnnnnnnnnnnnnnnnnnnnnnnnnnnnnnnnnnnnnnnnnnnnnnnnnnnnnnnnnnnnnnnnnnnnnnnnnnnnnnnnnnnnnnnnnnnnnnnnnnnnnnnnnnnnnnnnnnnnnnnnnnnnnnnnnnnnnnnnnnnnnnnnnnnnnnnnnnnnnnnnnnnnnnnnnnnnnnnnnnnnnnnnnnnnnnnnnnnnnnnnnnnnnnnnnnnnnnnnnnnnnnnnnnnnnnnnnnnnnnnnnnnnnnnnnnnnnnnnnnnnnnnnnnnnnnnnnnnnnnnnnnnnnnnnnnnnnnnnnnnnnnnnnnnnnnnnnnnnnnnnnnnnnnnnnnnnnnnnnnnnnnnnnnnnnnnnnnnnnnnnnnnnnnnnnnnnnnnnnnnnnnnnnnnnnnnnnnnnnnnnnnnnnnnnnnnnnnnnnnnnnnnnnnnnnnnnnnnnnnnnnnnnnnnnnnnnnnnnnnnnnnnnnnnnnnnnnnnnnnnnnnnnnnnnnnnnnnnnnnnnnnnnnnnnnnnnnnnnnnnnnnnnnnnnnnnnnnnnnnnnnnnnnnnnnnnnnnnnnnnnnnnnnnnnnnnnnnnnnnnnnnnnnnnnnnnnnnnnnnnnnnnnnnnnnnnnnnnnnnnnnnnnnnnnnnnnnnnnnnnnnnnnnnnnnnnnnnnnnnnnnnnnnnnnnnnnnnnnnnnnnnnnnnnnnnnnnnnnnnnnnnnnnnnnnnnnnnnnnnnnnnnnnnnnnnnnnnnnnnnnnnnnnnnnnnnnnnnnnnnnnnnnnnnnnnnnnnnnnnnnnnnnnnnnnnnnnnnnnnnnnnnnnnnnnnnnnnnnnnnnnnnnnnnnnnnnnnnnnnnnnnnnnnnnnnnnnnnnnnnnnnnnnnnnnnnnnnnnnnnnnnnnnnnnnnnnnnnnnnnnnnnnnnnnnnnnnnnnnnnnnnnnnnnnnnnnnnnnnnnnnnnnnnnnnnnnnnnnnnnnnnnnnnnnnnnnnnnnnnnnnnnnnnnnnnnnnnnnnnnnnnnnnnnnnnnnnnnnnnnnnnnnnnnnnnnnnnnnnnnnnnnnnnnnnnnnnnnnnnnnnnnnnnnnnnnnnnnnnnnnnnnnnnnnnnnnnnnnnnnnnnnnnnnnnnnnnnnnnnnnnnnnnnnnnnnnnnnnnnnnnnnnnnnnnnnnnnnnnnnnnnnnnnnnnnnnnnnnnnnnnnnnnnnnnnnnnnnnnnnnnnnnnnnnnnnnnnnnnnnnnnnnnnnnnnnnnnnnnnnnnnnnnnnnnnnnnnnnnnnnnnnnnnnnnnnnnnnnnnnnnnnnnnnnnnnnnnnnnnnnnnnnnnnnnnnnnnnnnnnnnnnnnnnnnnnnnnnnnnnnnnnnnnnnnnnnnnnnnnnnnnnnnnnnnnnnnnnnnnnnnnnnnnnnnnnnnnnnnnnnnnnnnnnnnnnnnnnnnnnnnnnnnnnnnnnnnnnnnnnnnnnnnnnnnnnnnnnnnnnnnnnnnnnnnnnnnnnnnnnnnnnnnnnnnnnnnnnnnnnnnnnnnnnnnnnnnnnnnnnnnnnnnnnnnnnnnnnnnnnnnnnnnnnnnnnnnnnnnnnnnnnnnnnnnnnnnnnnnnnnnnnnnnnnnnnnnnnnnnnnnnnnnnnnnnnnnnnnnnnnnnnnnnnnnnnnnnnnnnnnnnnnnnnnnnnnnnnnnnnnnnnnnnnnnnnnnnnnnnnnnnnnnnnnnnnnnnnnnnnnnnnnnnnnnnnnnnnnnnnnnnnnnnnnnnnnnnnnnnnnnnnnnnnnnnnnnnnnnnnnnnnnnnnnnnnnnnnnnnnnnnnnnnnnnnnnnnnnnnnnnnnnnnnnnnnnnnnnnnnnnnnnnnnnnnnnnnnnnnnnnnnnnnnnnnnnnnnnnnnnnnnnnnnnnnnnnnnnnnnnnnnnnnnnnnnnnnnnnnnnnnnnnnnnnnnnnnnnnnnnnnnnnnnnnnnnnnnnnnnnnnnnnnnnnnnnnnnnnnnnnnnnnnnnnnnnnnnnnnnnnnnnnnnnnnnnnnnnnnnnnnnnnnnnnnnnnnnnnnnnnnnnnnnnnnnnnnnnnnnnnnnnnnnnnnnnnnnnnnnnnnnnnnnnnnnnnnnnnnnnnnnnnnnnnnnnnnnnnnnnnnnnnnnnnnnnnnnnnnnnnnnnnnnnnnnnnnnnnnnnnnnnnnnnnnnnnnnnnnnnnnnnnnnnnnnnnnnnnnnnnnnnnnnnnnnnnnnnnnnnnnnnnnnnnnnnnnnnnnnnnnnnnnnnnnnnnnnnnnnnnnnnnnnnnnnnnnnnnnnnnnnnnnnnnnnnnnnnnnnnnnnnnnnnnnnnnnnnnnnnnnnnnnnnnnnnnnnnnnnnnnnnnnnnnnnnnnnnnnnnnnnnnnnnnnnnnnnnnnnnnnnnnnnnnnnnnnnnnnnnnnnnnnnnnnnnnnnnnnnnnnnnnnnnnnnnnnnnnnnnnnnnnnnnnnnnnnnnnnnnnnnnnnnnnnnnnnnnnnnnnnnnnnnnnnnnnnnnnnnnnnnnnnnnnnnnnnnnnnnnnnnnnnnnnnnnnnnnnnnnnnnnnnnnnnnnnnnnnnnnnnnnnnnnnnnnnnnnnnnnnnnnnnnnnnnnnnnnnnnnnnnnnnnnnnnnnnnnnnnnnnnnnnnnnnnnnnnnnnnnnnnnnnnnnnnnnnnnnnnnnnnnnnnnnnnnnnnnnnnnnnnnnnnnnnnnnnnnnnnnnnnnnnnnnnnnnnnnnnnnnnnnnnnnnnnnnnnnnnnnnnnnnnnnnnnnnnnnnnnnnnnnnnnnnnnnnnnnnnnnnnnnnnnnnnnnnnnnnnnnnnnnnnnnnnnnnnnnnnnnnnnnnnnnnnnnnnnnnnnnnnnnnnnnnnnnnnnnnnnnnnnnnnnnnnnnnnnnnnnnnnnnnnnnnnnnnnnnnnnnnnnnnnnnnnnnnnnnnnnnnnnnnnnnnnnnnnnnnnnnnnnnnnnnnnnnnnnnnnnnnnnnnnnnnnnnnnnnnnnnnnnnnnnnnnnnnnnnnnnnnnnnnnnnnnnnnnnnnnnnnnnnnnnnnnnnnnnnnnnnnnnnnnnnnnnnnnnnnnnnnnnnnnnnnnnnnnnnnnnnnnnnnnnnnnnnnnnnnnnnnnnnnnnnnnnnnnnnnnnnnnnnnnnnnnnnnnnnnnnnnnnnnnnnnnnnnnnnnnnnnnnnnnnnnnnnnnnnnnnnnnnnnnnnnnnnnnnnnnnnnnnnnnnnnnnnnnnnnnnnnnnnnnnnnnnnnnnnnnnnnnnnnnnnnnnnnnnnnnnnnnnnnnnnnnnnnnnnnnnnnnnnnnnnnnnnnnnnnnnnnnnnnnnnnnnnnnnnnnnnnnnnnnnnnnnnnnnnnnnnnnnnnnnnnnnnnnnnnnnnnnnnnnnnnnnnnnnnnnnnnnnnnnnnnnnnnnnnnnnnnnnnnnnnnnnnnnnnnnnnnnnnnnnnnnnnnnnnnnnnnnnnnnnnnnnnnnnnnnnnnnnnnnnnnnnnnnnnnnnnnnnnnnnnnnnnnnnnnnnnnnnnnnnnnnnnnnnnnnnnnnnnnnnnnnnnnnnnnnnnnnnnnnnnnnnnnnnnnnnnnnnnnnnnnnnnnnnnnnnnnnnnnnnnnnnnnnnnnnnnnnnnnnnnnnnnnnnnnnnnnnnnnnnnnnnnnnnnnnnnnnnnnnnnnnnnnnnnnnnnnnnnnnnnnnnnnnnnnnnnnnnnnnnnnnnnnnnnnnnnnnnnnnnnnnnnnnnnnnnnnnnnnnnnnnnnnnnnnnnnnnnnnnnnnnnnnnnnnnnnnnnnnnnnnnnnnnnnnnnnnnnnnnnnnnnnnnnnnnnnnnnnnnnnnnnnnnnnnnnnnnnnnnnnnnnnnnnnnnnnnnnnnnnnnnnnnnnnnnnnnnnnnnnnnnnnnnnnnnnnnnnnnnnnnnnnnnnnnnnnnnnnnnnnnnnnnnnnnnnnnnnnnnnnnnnnnnnnnnnnnnnnnnnnnnnnnnnnnnnnnnnnnnnnnnnnnnnnnnnnnnnnnnnnnnnnnnnnnnnnnnnnnnnnnnnnnnnnnnnnnnnnnnnnnnnnnnnnnnnnnnnnnnnnnnnnnnnnnnnnnnnnnnnnnnnnnnnnnnnnnnnnnnnnnnnnnnnnnnnnnnnnnnnnnnnnnnnnnnnnnnnnnnnnnnnnnnnnnnnnnnnnnnnnnnnnnnnnnnnnnnnnnnnnnnnnnnnnnnnnnnnnnnnnnnnnnnnnnnnnnnnnnnnnnnnnnnnnnnnnnnnnnnnnnnnnnnnnnnnnnnnnnnnnnnnnnnnnnnnnnnnnnnnnnnnnnnnnnnnnnnnnnnnnnnnnnnnnnnnnnnnnnnnnnnnnnnnnnnnnnnnnnnnnnnnnnnnnnnnnnnnnnnnnnnnnnnnnnnnnnnnnnnnnnnnnnnnnnnnnnnnnnnnnnnnnnnnnnnnnnnnnnnnnnnnnnnnnnnnnnnnnnnnnnnnnnnnnnnnnnnnnnnnnnnnnnnnnnnnnnnnnnnnnnnnnnnnnnnnnnnnnnnnnnnnnnnnnnnnnnnnnnnnnnnnnnnnnnnnnnnnnnnnnnnnnnnnnnnnnnnnnnnnnnnnnnnnnnnnnnnnnnnnnnnnnnnnnnnnnnnnnnnnnnnnnnnnnnnnnnnnnnnnnnnnnnnnnnnnnnnnnnnnnnnnnnnnnnnnnnnnnnnnnnnnnnnnnnnnnnnnnnnnnnnnnnnnnnnnnnnnnnnnnnnnnnnnnnnnnnnnnnnnnnnnnnnnnnnnnnnnnnnnnnnnnnnnnnnnnnnnnnnnnnnnnnnnnnnnnnnnnnnnnnnnnnnnnnnnnnnnnnnnnnnnnnnnnnnnnnnnnnnnnnnnnnnnnnnnnnnnnnnnnnnnnnnnnnnnnnnnnnnnnnnnnnnnnnnnnnnnnnnnnnnnnnnnnnnnnnnnngtcctcagtcgtcttctctccctccaagtcgggagatcgcttcctcgttgcacaagcgtgtgtgccgtgtattgggaactgttgtgaacagcgtcccattacattctgttgttccgaacaaagaacgagctcgatgaggcggagaagcagcagtccgaaaggcttgtccctgagggataccgtccagaggtcgtgatcggtctggatccaggcatgcgttccgtgtgtactgcagtgcgcgagcgttttgctccgcggcagatcaagcgagttcgtcggcgttcagtgaggaagaagcgacgacggaaaaggtcgtggattcgacgatacgatggccccaaacgcaagaacggtcgagatatcgtcgaagtgcacgcgaaggagtaccggcatctggccgggttcagaaaacgacgggcgtgggaagaagtactgaagaactccaaccctgagtacgggactgcgattcgggggatgccgtccttcaagacatcaagatacaaggtctacctggaacgtctacattacttctggaagcatgcaggatttctgttggagatctgctggcggaagccgttcctgaagtggaagttctttaacaagcgtagttctcgcatcgcagtggacgcgttggcagcacggattgttcctgatcccagcgtgcagacgtg

SEQ ID NO: 155 - DNA, 20786 bp, unidentified
  misc_feature 1..20786: note = Fanzor polypeptide
  source 1..20786: mol_type = other DNA
gcttctaatgatagaaaagtacttctggacattagtgctatctgctgtgcatttcagttctttttataccgaatatgaattcaaatcaatatttacgtaccatagagtagttgttattttatataacaacagataaatcttggggaagtagttgaaagtagtaaaagttatcaccagccggctgcaagaatcatttaactaatgatgaacaactaaggtagccactgcaattttgttaatataattatggctccctcagagaagaaggtatacaacagtgctagtagcattaactctctataattattcatatacggtgtagaaacaacatgttttgctaacagttaaccttaactcctcacttctttgaaatctttatttatatccagaacatcaactttaaatgatggtaaagaattaatgatgcccgcaaagggtgcatatgcacaatattggattttaatcatgctttccattggaatgcccttcacagaaacggcaaacttcttaagacgtccagtaacaaaaaagacactcctcgctgcatttgttgaacaaaaaaaggacgctgtcatcaggcacatgcagcaatacatgacgaaaaaagaagccctaaaaagtttgcgcaatatgtatgaaaccgagttcaagcgtcgctacccaaagtccaaacggggcccatctatgcgcttgggaagcagtacgttaggcgaactgttaagcactactgcatccatcacacaagtacttgatggtgctgcatcttctatgatcggtagatcaaaaacaagtgctgctccaatagttgatcgcttgagagatgatgatcctgaaagcttcgcgttgctcttagagaagtttcacatttttgttgtatgcaaagcctacgtttaccagcatgtgccagaagactatatgcacatctggctccacacacacaaacacatggactaacagcgtgtgcctggacaagttacattcactttcgctctagccactcgacatgttgtttgtttacatgttgatcatcgtctgtgcactggtaacacccaactcaacgtgctccaaactctttactgtgaagacccactcaatgcgtatacatcacgctcatcacttcatgtgtgtactctacatcagatattccacacccgaacatattaatctcgctgttggattcttgtaattataacaataagaaaagaaaccagtagaaattacgagatacgaaaactaaagttactttattgaacacttcaatttacatctgctattcatactaattctaaaggacacaaatttctttgggacgattgatttgatcgataggcgtgattagctaattgattgaacttatttctatttgacagattgtatcgctcttaccagacacaatctctgggtctctagacttgacaactcacttgtaatacaatgctacacaatactgtacttcatttcctgatttgaaacaaagactttattcttccaattgtatttcaaacatctacttcaatctccaattgaagatgagcttcctaagctacccactattattctggcagaacacgcgcgttccacccatatattcatcttcaatgtactgtcgtttaaaaaactgcgtcacaaaactttgatttacgatcaatactcatataataaaggtatttatgtgaacttactaccaaagaagccacaagcaatagtaccatcaacatgtataatattaacctcctagcttgaagttgattggatactttggcataaatgaaatttttcaacaattataaaaacgtctaattttaatcaatctctgatttcttcgaaaataatttgggaatagcatcaatttcgtttatgcgtctaatgatgtggtcttcccttattctactgtacataaaaaactgagtttggtgcactgactggcttgtacgcttaattcaaaaaccgttccttcaaaaggaagttgtgccctgtagaacgctgtaaatcgctcggatctccttcaaactcaaagagaagctttttgacaaatttagcaatagccttaatttaaaaaactaccaaatccccctgtcaaatatgcagaaacgttaagcggtatggtgaaaatgctaaattttaagaaaggtcctttgattgcgcgccatttttgccaagcaaagtataactaaactgcataaagcttagctttagtacctctgaaacctaactgtagcattttccagacctttatttgcttgattataaccttagcaatgcaaaaatcacgaaatgcacaatttccctgctaatttcccaaaataaatacttctagttgatcagagcttcaggtaattagagatgaaacctcaaaatcctattatacattctttttgggctcttatctaatctcatcatttcaaacctcactgttctcaaggtggtattgcttaaatttgaattatccctagctctcacacctaatatttagtagctcaataatagctaaaaaatgtatttatcactccctaacgaatcagaatgaccgggtctcgtttgaaacttttgcagtcatatagtggcgttttttgcggttttaatgacaccaaaagtgagcaaatccctccagtatatcgctagctatgctcgatttcagttttatgacgcagttttttaaacaacagtagtagtcatatccagggatctactctatttcaatcaagagatgccctgtaataaagaagtctctttgcttttgtttagatacagttgacaactgattgttcatatcgtttcaatcgactttattaacacgaattcatcaaagtagcttttgtgtcctatagatcgacggcaaccgatgctacaggcttggtcaaggccttaaaccatttgtaattttgagactacacgctgattaccatcagacaaagaacgatggaaattttgcgtatgttttacttgaaaaacgctcagaaataccaaaagttctgcttattgtatttcaatgcaacttttactaatggcctatgcctataaaaagtagtgcagtctgctatgcattttaattcttcgtatatcaaatacacaatttgggtggtcgttgttgcataccgtaaaaaatgtgctcctctctacccaatagaaaaaaaaaatggatctacagtttggaatcgaatataattaacactcctcgactactgttgaactacaagaatcgtttatttaatatacacttgacgtagccactgtaagttttgtcggttttttagcctatcattagatgtcaagccaattccataccactgacatttaaatggaattgtagtaccgtgcgcgaaaaaaacgttcaagtgttttcgattttgggacaccttcttcgtagtgtgtatgcatgtatcttttgagcattatgagatacagaaatgagactactatgtttcaaatgagagcagtgtcctcttttgaaagatatattgtacatcaagatatgcccaatttctattggctaagagcaaaatcaaagcgatgttaccgaaaatcaatttaatcagtttagctgagaaacaaaacctattggaaccaaaccaaggttattttaggtattgccgctacagtatcaacgagtcatagaagagacaaaaccaaagcattgctacgcatcagacaggccagctttatacaccccctccaaataaggcattttacattattgcagattaaatcactgaaaggcgctcaaacttgaaacataatatatcatccgaaagccttttttaagcgctacaaacacctgcaatagcagttactaaaaccaactacttctatgttttagataccaaagaaaaaaatgactaaaaatcaagcattttttggggttaaccatttgccggcaaatgcttttaccgagtcgttttgctgaagattttctaccgtgtggcttggcagctaacgttcatgccttaaaatttaggtttccttcagtttcttattattcgcttagtcaaaataacgaaatctaaaaattagccgtttatttcgtctcaaccaatcaaatctggctattccgcattttcaagctagagatagtaagtggcagttatgagcttcaaattggtataattgaaaagatgctagcactgaaactgatgtagtaatacgaccagaaagattttgtcagggcactatcacttgaacgtttttttcgcgcacagtataaatatgttttgaatccaggacacgattgatcctggcttccttttataagaaacataataaagaccctacgttctacgtgatagaattactactgtctttatattttataatttggaaataatagtgatttcgtattacttaaataactctcaagtttgtttatatgcttataaccgcctcagaataaacatacaacaaggttaatatgagctctccaacagtcatatacggcatgatgaaaacacgctttaccgtattttgtccaacaacgcccaaaacagtgttcaacctgtgccactcttgaacaaagcatgctagattcaagcggttttaaataaactgttgcgcaacatcccctctatcagcctgctactactagatactcgtaatcagcagcttttattatggacattgtcataatcagtcatcaaaatgggctgatttcaaaaaaaaaaacaatcatccatccatcaacaccaactcgtccaatccaaaatccaattataccaccatcgtctcttctctcgcacaattccgcttaaaatatcatctactaatctcattattacatcgattgctcaaaatcgatctcgcatgatgacctgaatctgcataccggaaatacctgcatacaagcaagatatagtgtcgagcacaaagatacagtatacagctttaaataaagtgcttttaagtaccccaactgtcaatccgtcaacactagacacatgtcattatccgcctccctcataaatcttgtctacgagaccagtgctcaaatttggattattattttggaaatcgtccacccatcaacggcaacgcctccagatgactaaagcctgaccacaacacaatcgtgttctttgcaaaatctgacataggtacaggtttatcccataagccagatgattgacatatgaagactttgattgatttgataccaataatataataatgcaaaattgtactttttggatgctatgatgaacaggcgtagatttattcaaaattattttttccaggatagtgaatgtatttgatcatgtctgatacttgtggtggtatcgtgggtagttatcttaatccatttgtaccatgcattttgaatgtttaatcgtgcttttctcatttcatttacatttttagtttcaatacgaatgctttatttctctgagctgtctccaaatttgagccaataaaatcgcttaaaaagctattttaaacgccgcgaactttgaaaaattttgccacagctctcccttgtttttttgttaggcggaattttaaacacagccgaatacactagtattaagctacgttatcatcaaaaacccctaaaatgcaagaatatgccttactacacaccccagctgatagcgcatatgcttgagactctcagttagcaccaagtaagtgataccaatcaagtgagggcagcctatctaccccctagcctctgaatcaaatctagttgtgcttcaatgataggcttatccacacaacgaaaaaggagggtcatggctcaaagaaccacaaaaaggaaaaatgtaaggctactccacagcaatagtgcagcactgccagcgatacgatgcatcaaaagatacaccatagcactatggcacagcaacagaaaaatagttgcgtgcagaaaagggggatagaataaatcacaataaagcaaacaaacgaatgcgcagcatcacgagaaagaaaatagtaaaaggttgaatgaatgtaattcatgacaaccaaacccacaacacccaaagccatgacaacccaatccacggcaaccaaaaaaggggaatatacaaaccaaatacaaaccaaacacaatgaataaatatattccaacgaattggtctaaaataaactgtataattagtattactgtatattgtaccgcgaaaagtggcccctatcggctgatacctactgtaacaaacttgaagaatgtcgtcttgagtactggtggttgcaaaggtatgcttcttttgaccaaacacaatgaataagtatattgcaacgaactggtctgaaataaactgtataattagtattactgtatattgtactgcgaaaagtggcccctatcggctgatacttactgtaacaaacttgaaagatgtcgtcttgggtactggtggttgcaaaagtatgcttcttttgtccaaagtggtgttgtattccatcaaaagtaataaaaagtatatggtttaatagaaaaagtgcagtgcaaaaacagggtctgaaaaaaaaaaaagacgcgttgctgagggtgactgcagccaataagctgagcacacagaatttgagtgacgtgtacactgaacattttgcactgtggtgactgtacccaaatgatttttttgtgataatttttttgaatcaaaatcgatataatttgacatttgtaaacatttttgttaaaattagctatagaaagtgtgctcagcgtatactactttctaataaacttaacgggaaaatttgaaggcgcattcaatggtgtcaattttaaagtacttttagaatgaaaagatagagaatttggagaaaatataaaaagcagtttttccaagaaaagttgagatttagcatatacaacgttcaaaatagcagttgcacaggttaccctacatctgtgcggtcattttgattcaatatacatcatagtaaaaagtgtcgttttcgccttcaaaattgcgatcgtttgatttttaacaaaaactttttttttttttttggatgatattgttttattagaatagtaattagaaataaaacaaatgcatcaaagtaatggacaagtgtatgggatcaaagtgacttgccatgttaatctgggtaataaactaatgagaaagggaccgaagattggacaatcttagcagttctgtgcggatgtggcgacaggcttggatggcatcaaagggaataagatcatagaattggcgatagtgatgccgccagatagtgcgcataattgtggcgaagaagtcatagatggtgatgtgcaggtcatggtgataaagatagtattgattcagtttgaaacgcataattgagctgtagatctgttgtgggtctgctgatttggggtagctgaggaactctttgaaggaggagtcccagacatctagtttatggacgcacttgatgagcaggtgaggagcatcttctatttcattgcagagggtacagcggtcggatgcagcatgtttgagatttcgttgggccatagccagttgattagagctttgtttgtgtatcattctataccaaagattgcgggcggagtagtgcatggtgtttttgtaaaaggacttccactgttgtttcgtcaattggttgcagaaatggcgaccgacattgagattggccatgtcaagaatgacaaagcgtagctctctgtttggcaatttgaagattgcacgctgctggtataccatggagtccacaaatggcagaaagtccatctcaccatcgttgttgtggtgcacgaagtggcaaaatgatagctggttgttcgctagggcacgtcgaactttggtctgggtggttggagctgggcattcggaccgaggtcgaaattggaggttctgttggacaggatcgtaggtgaagaagtcgcggacactactgcgcctgactgagtctttgtgcatgaaatccaaatctgtggtagcgtcaaagtggttgaaaaccgccaggaggggaaggctcatgagggtactgactgtgggacggctggtccaatctcgatggtggctgcatgtatccaaagcattgaacatgggtaggaatgggtggaggccattcaacgtattcttgtagcgagcagaagggaacaggagtggcagggcatgatggacggcatcatttgtgagacgaagggcatgtgtaagcaactgataggtaaattcaggcagaggaccacggttgtcagcaagtaggactcgcaagtatctgaactgtagcgccttttgttgagctccaatgtcaatcaggcctaagccgccttgatctcgaggtaagaagaatgaagtccctttgagcggtggaaacagaccggacatgacaaattggtagatagtggatgtgatcttcttcaaatcctcttgagggatggataccacacggataacatgccacagcttggagaggataagcgtgttggcgatgttggccttgccgtagaaagaaacgttcctggacctgtagatgtcggtcatggccttaatggtaccacgtagctcggagacgaagacttcccgttggtggttggcaaaccatatcgggtaacccaagtacttgatgtagcccgtagagtggctgtcgaacgatttttaacaaaaaccatgaggggtacctcatgaaaaatcgtgaattttcgaggatttggatcgatccaaaaaaaataaaaatgaaggtccaggatgtaaatggtgatcaatagcaatcatttggcactattccgagcatctaaaagggcttacaagacgagatattgagggctgaattcggacgatttggctggggaaagtactttttgtagcctgtagatctatagcaactgatgctacagattcgattaagacctcaaataattagtatgtctaggtaataaacactgaaaacaatcagacatagatcaacgtagatttggtatgtgctttactttacaatccccccagaaatacataccaaaatcacacttgttatggctcaatgcagattctgatagcctatattaatagaaaatactgccaaggtagtagtaaagattatatagaatctattaatgtttaacagcaaaacaaccacgaaatagcgaataacagcaggtctcaataatagcagcgtaaataggattatccaccctgttgcccgtttgtatttattgataattaacaattacccctcctgatggatcagcacttctcttaagtcctgatgtgtttgggtaggtttcttttgcaagtaaagtgtcatagcatctatagactacttgttgagtaatcaatttaattgaatcaaaataaaggaaaccacattactatacactataaaagtactgtatgtatgtacagataatggatactgtatgtatgtacagataatggaaggagcgtttgtgagaatctcgtatcagatcaggtatatatattagcgtacgatatggatgaatgtgccatgttacaacaggcaagtgctacggtatgaacaaacaagcatctatgtaaaatgagcgtctgctcaatcatgaaggaagatcttatttgacagtgcagtccattgggacaaaaacctgtataaaaggtgtctgataaattggataccctttttcttttttacctttctctttatcctatgtatttatccgtcatcttgcccatgcagaaacaacaaagagatgagcaaggtaggtcgagcttcgtttacttcacaaggtctgttactaaaaaaaaggatctaagcatatcaggcgctggtgcctctcatggtccacctagtaagtgaaggcagccatgctcttccactcctgaaagacgttgacttgctgtatcatgtagaaaagcaacgagcatctgaagagaacccatcctcatcaacatctactggttttgaagaagcagcttcctctggtagtgtcaacgagtctttctcatctgctgttcaacccattcaagtggatcctgttcagacacctccactccgtggcctgcatgctcgtatttcaagcattgttccaacaagcccagcaagaaggaaacctatttcattgagtagaagtatgaggtattggtgtatatacgtggtgagcgcttaccaaacgaacagcatactcttgatggcaatcttgtctctgccattgctcatcaaaatgcaagagtgcaaggcatagaccccgggcttgtcactatggctactggtgtggccaccacatctcaatgtctgctcaacagcgtgaatcgcttccaagccttggcggacaacaagctggtactacaccccaaggacaaatacctcccgcttgctttaactgcaaaaatggtaaacaatggcgtcggttccaacattgatcgtaagaagatggaaaagaagaagcccagcttaaagcggatccaaaagaacagggtgaaaaggaagacaaggatcaagaagttctaccagagaaaagtaacggatgactgtggaagaaaaggctcctgtattacactcactggtaactggtccgcttcggtccaacacatcaaaggacacacgagaagaagcacaaagcccttctatagcgaattggccgtctctccacaacatcacgttctcagcgtcgatgaaaaccgctcgaccattacatgctcatcatgcttcaaaaaaacatgtaaacagcctctgatcatcaatggcaaactcaagcgagtcgcgggggccgttatttgttacaatacacaatgcccaagacgcctcacaacgaaagcaacgacaaccaaccgcgaccgaaatggtgcgtacaatattgcttcgattgggttttcctcctttgcttccagagatggtttaccgcccccccccttttagaagaagccgcccagcaaacaagtaagcttgccatttttatattaatgctacactgtttctcatgtattccattgcaggtatagcttgtcaaacgaatttctcgcacaccagagcttggtttacaaccaagatggtgtgagaacacccactcaaggtagtgaccaattagaagccccgagcgggtcataatcaaagctaggtcttttgatatgatagcatcgatatttcaaaaacaaaatctttaatggtcaaaacatttgacatgcaaaacacttctgtacatctagtatttggcgcgaaaagatagtagatagctatactccacaaaagtgaactgcatggtggatccatgttcagaatactacatacttgactatagacgcttgataacactgggaagtgggatggccttgtttgtgaggttgatgccgtattggcaatcagcgaatttgcttatactatataccatacatgtttgtagaattgccgagtccgccttttgtagcttccgggaatttatgtcacatagtaaatgccagagtgcaagcaccacactttgatgcaacttcaaaaaggtggcgaacgtatgccattgtattgcttagggccaagctctaaatctagccatcgtgtttccaaagccatgataactcaaactttgcagcaacagtgatactgtatccttttcgaccgaacatcattgccttcatttagcacacttggtaatcttgtggtataatgggcggcagcaacattcagatcaaaccgggattaaacaaaatcaggggtaatgccattatttttcaaccgtcggtaaagagagccaaattggctattgtgcctgtacaggttgtgaacgccaccatcgatataagcaaacctgtataataatactaataacatcacgtggcaaaacgcaaaaaatgttgggcgaacgacgataaaagttgcggtgttacactttcctttccctctagacttttttctttctttttttaactttttcagcatgactaaatcaaccataatgaagcgtattgtcgctttgttcaagaaaacacacgagaaaaaggaagaacatgcatacccctctgaattagagagcacctacaaggtgaccaaaaagacgctaggcgtcggctcatttgctgttgtaaaagaatgcgtacatcgttcaacagggcaatcatttgcgctcaagatcatactgaagaaagccatcgcaggtaagcgagcctcccatctttacacacatgttaccgatactgttgtttttcccaaggcaaggaacatatgcttagtagcgaattgggtaaccatccacgaaagggacaagcaatgccagtctttgacacctttcaatagatattttgaaacaagttagacatccacatattgtatccatgcataatttgtatgaatcgattgatgctgtatacattgtcactgatttggctagtggtggagaactgttccagcaattactgaagaaaggaacctacacagagaaggatgcatcaaacttaacgagacaaatgctagaggggttgcagtatctacacgaaagagatgtaagccagggaagatcatcaaatttagctgatttggtgattaattgttcggttttagattgttcaccgcgatatgaagccagagaacgtacgttcccatcgagtcgctaattgcagttcttgtaccgactaaattgatgtgtagctattattccaaacagctggcgacgattcgaatttgatgattacggattttggtctatcaaagattttgaaagcacaagatgacatcctgactactgcgtgcggcactcctggctatgttgctcctgaagtattgttgcaaaccggtcataacaagccagtagatctatggagtgtgggcgttatactggtaaaggacaagtgcacactttagaaatgctgccaaaaacttatttagattgtctagtttacattactgagtggatatacgccattttggggagaaggtagtatacagcagagattgattgcacgcgagacttatatcacatgtagatcaagcaagcttgtttgagtccatcatgtcagggcagtacgaatacgatgaggaatactggtcggatatctctgattcaggtttgttatgatgtgcacatgtcttgcaatgcagtgtctgatgcagcatctctattaagcccggaacttgattgacaaactattgacattcgatccaaacagccgaattacagcagaggaggcgcttcaacatccgtggataacaggcactggatccaaagaggctggcccgagaacaagcacgaatcttgcacctgctattcgaaaaggctatagtagtagaggcagcattactgcaattgctcttatcaatcagtacaaaacttctgaggattcatccagtgaagaggagagaagaagcgaagaggttaagaaactcgacatcacaacttgaaacattgcggcttcatgctcttttttaaatcaccaaacagagcacttataccttttaatatgccataaaaaatgcttcaacaaccaatacatttcttatactatcagcttccattttaatgttactcgaacgtaataaagaggatcagataagtgagttggttcctgagcggtaattgggacggagttcacctgtcaaaagcagtgatctacgcatcaaaactttctgaaatggatcaatatagacgcggaagacacacaagggtataagaaagaaaaggcaatgcttttgagcatagataatattaaaaatcatggacacagccaagaagagtaagtagtcgagttgttcaattgactttgaatacagtatacagtagccataataccttgcagatttccatattcactcaacaagccggatggtccagattacaacaagtggatttatttacagtacgagaataagagacctcattggaaacaaacaaacagctctacatgtagcaaacccatgatttgcctgtttttctcagagcaggatctaaactatctaattctataatgtcaaagctttcttggggttgatccttgtatttcaatgagaaatcccagcaatacagcctctcttcatagtgtttctgtccgcgcacctcaatggatgcaaacacctttgaatagtcaggcgttagtcgcacgtctgtgattgtgtaatgttggtaaggcttctctagtgtaggcagtagtctgtaagcgatttttccactctgcagatcccagacgttgatacaagcacttgtggatggcatcagttgctcttcctctgtatcgctgcctcctgttttgttgattgattgatagtactggtagagctgataaggcgtcatttgagcaacgggcggcgcagggctgtctgtttcctctatactatcgctcaatttcttgacgtagccggctgacttcttcttttgtctacgttgctgtacaatgttgtttgtgggcggcaccagcttggttgtgctgctatcgttggctacctttccttttgtgagaagaaagaatggtgtgaggcagaggcgggtgaatgcagtgatgtcttcagcagcccattccgacgtctgcactgtttcttcagggacacgcaactcgtagacaagcgagccagtcaaaagcgaaaagaccagaatagggccagacgcatctggagcgcaggcaacgagatgtccattggcggcaatctcgccaacgccttgataccaatcgcttcttcctgataaataggacgagatatcaatcatgcctcgtcgtgtgggtcgatggtgatttgtccacccagtattgctgtttgaactgttgttcttatccaaatcccaaacacgaatcatgctgtctgaaccaccgctgacgacaactaaacaacagacgcatgcagttagttggtattaccatgaccctcgtttgcaagccaagcctaccatcgtcgttcatactgatacacaaaactcgtccccgatgtccctgccacattctgaccagcgtctttgtttccaggttccatactgccactgtgccgttgagaccgcctgtcactagccatttggaattgggttgcgtataatggcagacgatcgagtgagatcttgcagcctcgggccagccaggtatctcgctggttgcagctgtattgtccagaaagaaccgttgctttgtctgtggggattgaattatcaagctttgcgagcctgatggaccatggtaatttggatttgatctcacaatgcggccatcgtttgcaatcgtcaagctggtgaacatgccctgttcttgcggagcgcctataacagtactgggcagcgtgtccattgaggtggaatcgcacacattgggatagaaccccttcacacagcggccgttataccaatttcgtgtgattctgtacatgtcctgccaacttcgctgatttctgtgagccttgggtgagggaaactggagcgaccaccagcgtcgagcactggctctctcaaagtctcgatggcaggcattgggccaaataagctcatcgtaatgagcaatgacttgagcccattgtcggcacacttggctgcaagatgttagtgtcgcaccgtcgagataggcaaagatggctagcaaaagttccgctggaaagggtccattttcacggtgctgttgctggtttgcagtgctggtttccatggtcttgaactagtatataagatggagaaaaagcctcgagaaaggactttttcctgtttaaatgaaggcgacattggggctcacacacacacactatttgctctggcagtcccgctgttttcttttagtctcgactgtttgagaagtaattgaatagatctttctcaagcgagacttgaaacactcttttgaagcatccacagcgtcatggttggcatataaaatcagtcttttattgcttcttgtactttttctcggggcagcacacgctctttccacccgcggcgatcagctctctgcaacatttgtgcaatgcctccagttcttttgcgcatctggcctcttgataatcgtttttccccaggcagtcttggatggcacaggctaatgcattggtgttgttagaagcagcacatgagaagacgctctcgacatttaccgaatttctgacagtgaggaacctggtagccaagcaccgttagcaatatgctgacaacacattgtatggcttacctgttctgatgatgcagtgggcattgagtttgtttgtttaaaatgtagggggttggtcaaaagtaaaaacacttgtgggtaccgtgcggctggcaaatttcgtcccttttgagcaactaaaagggaggacttgtgaggcaacacaaaagttgttgggaggtagagatgaccgtagtccgaaagatagtcctcctcatgtaaattgagtcaagtttaagatgcaagtcttggatccgaagagttctaaattttgtctgttgacatcttcatccctttatttctcaaagcatggctagttgggacttggaaatgaatacagcccacagattaacacccgtagattcagaaacggggacggatcagaaaggagccatgttctggggccgccttctttggcaaagatgtattgagtggccagttcaagaaggttttcgcagctgtagcaaagctccagctgcaggatgtcaagtttgatgtaataaagcaatgcgaatgcttcaagtaggtcatccttccactttggccagacaattcaaacaccagcttgctcgagacaaagtcttgaaatgtgtcaaatggagaagaggcagcattgaggtggaattggagatggagaaaagctcttgaagccatgcccttccatataatagtcattcttgatcaccaccgcgaagtgtgtgatccggcggatgcttgccctattggcagaaagtcctgggtttgtcgaaagaagagcttgaccacctatgtaatgaagcatgtcaaggtacaaaaatctgcatttctcaaaataatattgtaactaaacccactcgtataatactgcacacaaaagacgtcagttttgcaatgatggaagctgaatttgttacacatttcgtcagttgactcagtaggcacataaactgcaaactttatacttaacatccgtatgaaaagtgttcataatagaacattagacccaagcttttgtgaagagaaaactaaagtttgagccaatgccattatggaaaactagctgtcgcacatttggtgatcatagtaaatagacaagaggaggcaatcctagcgcaaagccaaaaacggacatgtacactgtgtttgattgatgctgctgatggcccgtaaatctgtgctactcacgccaccgctcagcgccaaccgttttactcctgaacaagcgaaaagcgttgacccggcgtttgcatgtatggcctttaaatagcccacgcagcagcagatcggcggcatcaatctagggaggatgtctgctcaggacagacacagctaattgagcccgttcaaaatggcatggcctggctaaccgagctactatatatgatttaatataaaatccaattaaagagatcagagttacctagaccacggcagtagcacaagaaccgtgcaatgggtcaacttggattagtgtatattggacacctttctttttttgggtgtccgaatgtaaattgaaacatggtcaataactactcacagcaattgaacgccctttatttggtttctttttctcttattgcacttgttcttcttccctcacgaaaatttttcctgttcctgaagcatcaatacctcttgaatcatgcctgggcaagagatagtttatacggtccacaaattcgaagcagagaatgtggatgaaatctcgatcaatgtcggcgagcaagtcattgttctcgagaaggacgaaggcttcaatgatggctggtggcaggtaaagtagcttttgtacattgccaatgcagagcaagtaaggggggctgcttctaaactatggatttgtcgctgttagggacgcaatgtgcgaggtgaaatcggccttttccccattacatacacagtaaagcatcctcctcctacagtcaccgcctcctcactcgcactagaaaacaagattgattcactggaaaacgctatatccaagatgaaagcacccacatcaacgagtgctccaccgcaatccaagaagacgatcagctccatgtcgtccatgtcatccatctcatcgaaaaacattcattcgaccgtaaatcagtcgctggagaacccgttgctaggcaacaaagtagaggaatggacgtctgaccaagtgtcaacatggctgatcagcgttggattcgataaacagctggcagacaacttcaaaggtatatatacaacggagctcgccctcatgtcagctgtattaaattggagatgcttattttgtccatcatgtcttagatcaggaaatcactggcgacattctattggaattgactctggattctctgaaagaattggatgttactacattcggcaaacgattcaaaatccacaatgccatcaatgctcttcggcagggaaccagaaagcaaaaggtaggtgcacagagtccagttgatgcggttttctgcgaattaattttatatagcaacacacatctccagctgacaattctgtggcaagcaaaaacacagaagcacgggttgcttctccatttccagacttgggcaatcatcgtagtaacaataatgcgctttcgtcatattacaacaacaacaaacaacagcagccgtatcctgacgatgacttggtatcagactacagcactgtccttcgaaactctcaattagcaccgccaaagacagctgctccaaagagctctatgcctccacctcgcccatcgattcccttggacatggatttaattgcgtcctcgcccaggttgtcaagccttgttgagcgtcaaaatacagagcacttgaaaaacagtagtcagatggatcgacaggagcaacaattgcaattgcagatccaacagaatcaatcgcgtctactgcagcaacagcagcagcaaagaattcaatatcttcagcagcagcagcagcagcagcaacaacagagacccatttcacatcaagtcatctcaacgcctacgcacaataatcaagtatcggcagactggaaacgtagcacaatgaacaatatcaagacacaggaggtatgggaagttatcgtgctcgtcgatattgattgctgacacgtgctgttcgcttcattgtagtctttaccagaaggccgatcgtccacgtcgagtcgatatagcttcatgcgttcgtcattgatgccatccggcaacaacaagctgcaaaacatattgcccaccaatgcgccgagtgtgcgtagatcagaggatgtgtcctcgttatcggaagcaactgctgcaccagatatggaaggctggttatacaagcaaggcgacaaatacaagacttggaacaagaggtggtttgtgctcaaagcgaataatctgttctatttcaagagcccaaaggtatgtggcctcacccgtcagtgcgagtgatatgcgtattaaacagtgagattggcgcaggctgtgcgaatgaaaggcatcatcaatttgaagggatacagaatcgaagtggatgagtccattcatccgggaaagtactgcttcatggcgcatcacgagagggagagaaccttctacttttacaccgagtccgaaaagcccatgaaagactggctcaaagcactgatgaaggcaacgattgctagagactttgccagtaaagtagtgcctggattgcaacatgatgcctgtactaatgattattacttgtagcgcctgtcatgtcgtccagcacaattcctaccatttcattggaaatggcccgtcgaatgcgtccccgccctccctccaccatcttcctctctcaaaacgaccccatgcgcgcaagctctcctgcgccgtaccgcaacaatatgaaccagcacttttcgctcatgtcactagacgaacgcgctcagcctattatgcagttttctcaccaacaagacatgtctgtcaacggcggctctcgtgcgccctccgtcatgagtacacggcccatggaccagcaaaaacgcatgctaccagacaacgcatccgattactccatagatcagcgcagccgactaaaagactcgggattcaatagcacacacgggggaaccggactaacacgatctgccacggagagtagccgcagttcatccggccgccaaagcatatccatggcgtccgtgcagcagcaatccgtcaacgacacaccagccactgtgaatggcactgcattttatctcgacgaagaagacgaagatttgattgatccagagcacatgagcgtcattgagtccaaccgtccaaccgctacaacggctgcttacagagacaacacggatcgcttctcacaagtaactgctgtgctcgatacaaggcctacaaagcaagatgcgtatgttgactggatcaatgcccacattcagggcaacatcaagagcttgacagatttgagctcaggcgacgttctgttggagtttctggaggtcttgaccagcaaggaaatactgagacctatcgtgatgcctggccaaacattgaacgctcagcgcatggaccgtgtgattgcagcattcaagtttatgagcctcgaaggtgttgatatggacggttcttgtaccattcgaggtagtgttgttgagaacgcggtatcaatgtttaatttattcacactactactatgatagatgtcttgaatggcaacgagatcaaaatcatgcacatgctggacgctgtggactactggtccaaatcacaaacgagcgaagccaatggcaaaaagatggccagcggtggcacttttggcgaggatgaccagtgcaaactaagagagttggaggaagagtctgaaaacatccttccacccaactcatttgcctctcgataaaccacacgctccc

SEQ ID NO: 156 - DNA, 20870 bp, unidentified
  misc_feature 1..20870: note = Fanzor polypeptide
  source 1..20870: mol_type = other DNA
gcttctaatgatagaaaagtacttctggacattagtgctatctgctgtgcatttcagttctttttataccgaatatgaattcaaatcaatatttacgtaccatagagtagttgttattttatataacaacagataaatcttggggaagtagttgaaagtagtaaaagttatcaccagccggctgcaagaatcatttaactaatgatgaacaactaaggtagccactgcaattttgttaatataattatggctccctcagagaagaaggtatacaacagtgctagtagcattaactctctataattattcatatacggtgtagaaacaacatgttttgctaacagttaaccttaactcctcacttctttgaaatctttatttatatccagaacatcaactttaaatgatggtaaagaattaatgatgcccgcaaagggtgcatatgcacaatattggattttaatcatgctttccattggaatgcccttcacagaaacggcaaacttcttaagacgtccagtaacaaaaaagacactcctcgctgcatttgttgaacaaaaaaaggacgctgtcatcaggcacatgcagcaatacatgacgaaaaaagaagccctaaaaagtttgcgcaatatgtatgaaaccgagttcaagcgtcgctacccaaagtccaaacggggcccatctatgcgcttgggaagcagtacgttaggcgaactgttaagcactactgcatccatcacacaagtacttgatggtgctgcatcttctatgatcggtagatcaaaaacaagtgctgctccaatagttgatcgcttgagagatgatgatcctgaaagcttcgcgttgctcttagagaagtttcacatttttgttgtatgcaaagcctacgtttaccagcatgtgccagaagactatatgcacatctggctccacacacacaaacacatggactaacagcgtgtgcctggacaagttacattcactttcgctctagccactcgacatgttgtttgtttacatgttgatcatcgtctgtgcactggtaacacccaactcaacgtgctccaaactctttactgtgaagacccactcaatgcgtatacatcacgctcatcacttcatgtgtgtactctacatcagatattccacacccgaacatattaatctcgctgttggattcttgtaattataacaataagaaaagaaaccagtagaaattacgagatacgaaaactaaagttactttattgaacacttcaatttacatctgctattcatactaattctaaaggacacaaatttctttgggacgattgatttgatcgataggcgtgattagctaattgattgaacttatttctatttgacagattgtatcgctcttaccagacacaatctctgggtctctagacttgacaactcacttgtaatacaatgctacacaatactgtacttcatttcctgatttgaaacaaagactttattcttccaattgtatttcaaacatctacttcaatctccaattgaagatgagcttcctaagctacccactattattctggcagaacacgcgcgttccacccatatattcatcttcaatgtactgtcgtttaaaaaactgcgtcacaaaactttgatttacgatcaatactcatataataaaggtatttatgtgaacttactaccaaagaagccacaagcaatagtaccatcaacatgtataatattaacctcctagcttgaagttgattggatactttggcataaatgaaatttttcaacaattataaaaacgtctaattttaatcaatctctgatttcttcgaaaataatttgggaatagcatcaatttcgtttatgcgtctaatgatgtggtcttcccttattctactgtacataaaaaactgagtttggtgcactgactggcttgtacgcttaattcaaaaaccgttccttcaaaaggaagttgtgccctgtagaacgctgtaaatcgctcggatctccttcaaactcaaagagaagctttttgacaaatttagcaatagccttaatttaaaaaactaccaaatccccctgtcaaatatgcagaaacgttaagcggtatggtgaaaatgctaaattttaagaaaggtcctttgattgcgcgccatttttgccaagcaaagtataactaaactgcataaagcttagctttagtacctctgaaacctaactgtagcattttccagacctttatttgcttgattataaccttagcaatgcaaaaatcacgaaatgcacaatttccctgctaatttcccaaaataaatacttctagttgatcagagcttcaggtaattagagatgaaacctcaaaatcctattatacattctttttgggctcttatctaatctcatcatttcaaacctcactgttctcaaggtggtattgcttaaatttgaattatccctagctctcacacctaatatttagtagctcaataatagctaaaaaatgtatttatcactccctaacgaatcagaatgaccgggtctcgtttgaaacttttgcagtcatatagtggcgttttttgcggttttaatgacaccaaaagtgagcaaatccctccagtatatcgctagctatgctcgatttcagttttatgacgcagttttttaaacaacagtagtagtcatatccagggatctactctatttcaatcaagagatgccctgtaataaagaagtctctttgcttttgtttagatacagttgacaactgattgttcatatcgtttcaatcgactttattaacacgaattcatcaaagtagcttttgtgtcctatagatcgacggcaaccgatgctacaggcttggtcaaggccttaaaccatttgtaattttgagactacacgctgattaccatcagacaaagaacgatggaaattttgcgtatgttttacttgaaaaacgctcagaaataccaaaagttctgcttattgtatttcaatgcaacttttactaatggcctatgcctataaaaagtagtgcagtctgctatgcattttaattcttcgtatatcaaatacacaatttgggtggtcgttgttgcataccgtaaaaaatgtgctcctctctacccaatagaaaaaaaaaatggatctacagtttggaatcgaatataattaacactcctcgactactgttgaactacaagaatcgtttatttaatatacacttgacgtagccactgtaagttttgtcggttttttagcctatcattagatgtcaagccaattccataccactgacatttaaatggaattgtagtaccgtgcgcgaaaaaaacgttcaagtgttttcgattttgggacaccttcttcgtagtgtgtatgcatgtatcttttgagcattatgagatacagaaatgagactactatgtttcaaatgagagcagtgtcctcttttgaaagatatattgtacatcaagatatgcccaatttctattggctaagagcaaaatcaaagcgatgttaccgaaaatcaatttaatcagtttagctgagaaacaaaacctattggaaccaaaccaaggttattttaggtattgccgctacagtatcaacgagtcatagaagagacaaaaccaaagcattgctacgcatcagacaggccagctttatacaccccctccaaataaggcattttacattattgcagattaaatcactgaaaggcgctcaaacttgaaacataatatatcatccgaaagccttttttaagcgctacaaacacctgcaatagcagttactaaaaccaactacttctatgttttagataccaaagaaaaaaatgactaaaaatcaagcattttttggggttaaccatttgccggcaaatgcttttaccgagtcgttttgctgaagattttctaccgtgtggcttggcagctaacgttcatgccttaaaatttaggtttccttcagtttcttattattcgcttagtcaaaataacgaaatctaaaaattagccgtttatttcgtctcaaccaatcaaatctggctattccgcattttcaagctagagatagtaagtggcagttatgagcttcaaattggtataattgaaaagatgctagcactgaaactgatgtagtaatacgaccagaaagattttgtcagggcactatcacttgaacgtttttttcgcgcacagtataaatatgttttgaatccaggacacgattgatcctggcttccttttataagaaacataataaagaccctacgttctacgtgatagaattactactgtctttatattttataatttggaaataatagtgatttcgtattacttaaataactctcaagtttgtttatatgcttataaccgcctcagaataaacatacaacaaggttaatatgagctctccaacagtcatatacggcatgatgaaaacacgctttaccgtattttgtccaacaacgcccaaaacagtgttcaacctgtgccactcttgaacaaagcatgctagattcaagcggttttaaataaactgttgcgcaacatcccctctatcagcctgctactactagatactcgtaatcagcagcttttattatggacattgtcataatcagtcatcaaaatgggctgatttcaaaaaaaaaaacaatcatccatccatcaacaccaactcgtccaatccaaaatccaattataccaccatcgtctcttctctcgcacaattccgcttaaaatatcatctactaatctcattattacatcgattgctcaaaatcgatctcgcatgatgacctgaatctgcataccggaaatacctgcatacaagcaagatatagtgtcgagcacaaagatacagtatacagctttaaataaagtgcttttaagtaccccaactgtcaatccgtcaacactagacacatgtcattatccgcctccctcataaatcttgtctacgagaccagtgctcaaatttggattattattttggaaatcgtccacccatcaacggcaacgcctccagatgactaaagcctgaccacaacacaatcgtgttctttgcaaaatctgacataggtacaggtttatcccataagccagatgattgacatatgaagactttgattgatttgataccaataatataataatgcaaaattgtactttttggatgctatgatgaacaggcgtagatttattcaaaattattttttccaggatagtgaatgtatttgatcatgtctgatacttgtggtggtatcgtgggtagttatcttaatccatttgtaccatgcattttgaatgtttaatcgtgcttttctcatttcatttacatttttagtttcaatacgaatgctttatttctctgagctgtctccaaatttgagccaataaaatcgcttaaaaagctattttaaacgccgcgaactttgaaaaattttgccacagctctcccttgtttttttgttaggcggaattttaaacacagccgaatacactagtattaagctacgttatcatcaaaaacccctaaaatgcaagaatatgccttactacacaccccagctgatagcgcatatgcttgagactctcagttagcaccaagtaagtgataccaatcaagtgagggcagcctatctaccccctagcctctgaatcaaatctagttgtgcttcaatgataggcttatccacacaacgaaaaaggagggtcatggctcaaagaaccacaaaaaggaaaaatgtaaggctactccacagcaatagtgcagcactgccagcgatacgatgcatcaaaagatacaccatagcactatggcacagcaacagaaaaatagttgcgtgcagaaaagggggatagaataaatcacaataaagcaaacaaacgaatgcgcagcatcacgagaaagaaaatagtaaaaggttgaatgaatgtaattcatgacaaccaaacccacaacacccaaagccatgacaacccaatccacggcaaccaaaaaaggggaatatacaaaccaaatacaaaccaaacacaatgaataaatatattccaacgaattggtctaaaataaactgtataattagtattactgtatattgtaccgcgaaaagtggcccctatcggctgatacctactgtaacaaacttgaagaatgtcgtcttgagtactggtggttgcaaaggtatgcttcttttgaccaaacacaatgaataagtatattgcaacgaactggtctgaaataaactgtataattagtattactgtatattgtactgcgaaaagtggcccctatcggctgatacttactgtaacaaacttgaaagatgtcgtcttgggtactggtggttgcaaaagtatgcttcttttgtccaaagtggtgttgtattccatcaaaagtaataaaaagtatatggtttaatagaaaaagtgcagtgcaaaaacagggtctgaaaaaaaaaaaagacgcgttgctgagggtgactgcagccaataagctgagcacacagaatttgagtgacgtgtacactgaacattttgcactgtggtgactgtacccaaatgatttttttgtgataatttttttgaatcaaaatcgatataatttgacatttgtaaacatttttgttaaaattagctatagaaagtgtgctcagcgtatactactttctaataaacttaacgggaaaatttgaaggcgcattcaatggtgtcaattttaaagtacttttagaatgaaaagatagagaatttggagaaaatataaaaagcagtttttccaagaaaagttgagatttagcatatacaacgttcaaaatagcagttgcacaggttaccctacatctgtgcggtcattttgattcaatatacatcatagtaaaaagtgtcgttttcgccttcaaaattgcgatcgtttgatttttaacaaaaactttttttttttttttggatgatattgttttattagaatagtaattagaaataaaacaaatgcatcaaagtaatggacaagtgtatgggatcaaagtgacttgccatgttaatctgggtaataaactaatgagaaagggaccgaagattggacaatcttagcagttctgtgcggatgtggcgacaggcttggatggcatcaaagggaataagatcatagaattggcgatagtgatgccgccagatagtgcgcataattgtggcgaagaagtcatagatggtgatgtgcaggtcatggtgataaagatagtattgattcagtttgaaacgcataattgagctgtagatctgttgtgggtctgctgatttggggtagctgaggaactctttgaaggaggagtcccagacatctagtttatggacgcacttgatgagcaggtgaggagcatcttctatttcattgcagagggtacagcggtcggatgcagcatgtttgagatttcgttgggccatagccagttgattagagctttgtttgtgtatcattctataccaaagattgcgggcggagtagtgcatggtgtttttgtaaaaggacttccactgttgtttcgtcaattggttgcagaaatggcgaccgacattgagattggccatgtcaagaatgacaaagcgtagctctctgtttggcaatttgaagattgcacgctgctggtataccatggagtccacaaatggcagaaagtccatctcaccatcgttgttgtggtgcacgaagtggcaaaatgatagctggttgttcgctagggcacgtcgaactttggtctgggtggttggagctgggcattcggaccgaggtcgaaattggaggttctgttggacaggatcgtaggtgaagaagtcgcggacactactgcgcctgactgagtctttgtgcatgaaatccaaatctgtggtagcgtcaaagtggttgaaaaccgccaggaggggaaggctcatgagggtactgactgtgggacggctggtccaatctcgatggtggctgcatgtatccaaagcattgaacatgggtaggaatgggtggaggccattcaacgtattcttgtagcgagcagaagggaacaggagtggcagggcatgatggacggcatcatttgtgagacgaagggcatgtgtaagcaactgataggtaaattcaggcagaggaccacggttgtcagcaagtaggactcgcaagtatctgaactgtagcgccttttgttgagctccaatgtcaatcaggcctaagccgccttgatctcgaggtaagaagaatgaagtccctttgagcggtggaaacagaccggacatgacaaattggtagatagtggatgtgatcttcttcaaatcctcttgagggatggataccacacggataacatgccacagcttggagaggataagcgtgttggcgatgttggccttgccgtagaaagaaacgttcctggacctgtagatgtcggtcatggccttaatggtaccacgtagctcggagacgaagacttcccgttggtggttggcaaaccatatcgggtaacccaagtacttgatgtagcccgtagagtggctgtcgaacgatttttaacaaaaaccatgaggggtacctcatgaaaaatcgtgaattttcgaggatttggatcgatccaaaaaaaataaaaatgaaggtccaggatgtaaatggtgatcaatagcaatcatttggcactattccgagcatctaaaagggcttacaagacgagatattgagggctgaattcggacgatttggctggggaaagtactttttgtagcctgtagatctatagcaactgatgctacagattcgattaagacctcaaataattagtatgtctaggtaataaacactgaaaacaatcagacatagatcaacgtagatttggtatgtgctttactttacaatccccccagaaatacataccaaaatcacacttgttatggctcaatgcagattctgatagcctatattaatagaaaatactgccaaggtagtagtaaagattatatagaatctattaatgtttaacagcaaaacaaccacgaaatagcgaataacagcaggtctcaataatagcagcgtaaataggattatccaccctgttgcccgtttgtatttattgataattaacaattacccctcctgatggatcagcacttctcttaagtcctgatgtgtttgggtaggtttcttttgcaagtaaagtgtcatagcatctatagactacttgttgagtaatcaatttaattgaatcaaaataaaggaaaccacattactatacactataaaagtactgtatgtatgtacagataatggatactgtatgtatgtacagataatggaaggagcgtttgtgagaatctcgtatcagatcaggtatatatattagcgtacgatatggatgaatgtgccatgttacaacaggcaagtgctacggtatgaacaaacaagcatctatgtaaaatgagcgtctgctcaatcatgaaggaagatcttatttgacagtgcagtccattgggacaaaaacctgtataaaaggtgtctgataaattggataccctttttcttttttacctttctctttatcctatgtatttatccgtcatcttgcccatgcagaaacaacaaagagatgagcaaggtaggtcgagcttcgtttacttcacaaggtctgttactaaaaaaaaggatctaagcatatcaggcgctggtgcctctcatggtccacctagtaagtgaaggcagccatgctcttccactcctgaaagacgttgacttgctgtatcatgtagaaaagcaacgagcatctgaagagaacccatcctcatcaacatctactggttttgaagaagcagcttcctctggtagtgtcaacgagtctttctcatctgctgttcaacccattcaagtggatcctgttcagacacctccactccgtggcctgcatgctcgtatttcaagcattgttccaacaagcccagcaagaaggaaacctatttcattgagtagaagtatgaggtattggtgtatatacgtggtgagcgcttaccaaacgaacagcatactcttgatggcaatcttgtctctgccattgctcatcaaaatgcaagagtgcaaggcatagaccccgggcttgtcactatggctactggtgtggccaccacatctcaatgtctgctcaacagcgtgaatcgcttccaagccttggcggacaacaagctggtactacaccccaaggacaaatacctcccgcttgctttaactgcaaaaatggtaaacaatggcgtcggttccaacattgatcgtaagaagatggaaaagaagaagcccagcttaaagcggatccaaaagaacagggtgaaaaggaagacaaggatcaagaagttctaccagagaaaagtaacggatgactgtggaagaaaaggctcctgtattacactcactggtaactggtccgcttcggtccaacacatcaaaggacacacgagaagaagcacaaagcccttctatagcgaattggccgtctctccacaacatcacgttctcagcgtcgatgaaaaccgctcgaccattacatgctcatcatgcttcaaaaaaacatgtaaacagcctctgatcatcaatggcaaactcaagcgagtcgcgggggccgttatttgttacaatacacaatgcccaagacgcctcacaacgaaagcaacgacaaccaaccgcgaccgaaatggtgcgtacaatattgcttcgattgggttttcctcctttgcttccagagatggtttaccgccccccccccttttagaagaagccgcccagcaaacaagtaagcttgccatttttatattaatgctacactgtttctcatgtattccattgcaggtatagcttgtcaaacgaatttctcgcacaccagagcttggtttacaaccaagatggtgtgagaacacccactcaaggtagtgaccaattagaagccccgagcgggtcataatcaaagctaggtcttttgatatgatagcatcgatatttcaaaaacaaaatctttaatggtcaaaacatttgacatgcaaaacacttctgtacatctagtatttggcgcgaaaagatagtagatagctatactccacaaaagtgaactgcatggtggatccatgttcagaatactacatacttgactatagacgcttgataacactgggaagtgggatggccttgtttgtgaggttgatgccgtattggcaatcagcgaatttgcttatactatataccatacatgtttgtagaattgccgagtccgccttttgtagcttccgggaatttatgtcacatagtaaatgccagagtgcaagcaccacactttgatgcaacttcaaaaaggtggcgaacgtatgccattgtattgcttagggccaagctctaaatctagccatcgtgtttccaaagccatgataactcaaactttgcagcaacagtgatactgtatccttttcgaccgaacatcattgccttcatttagcacacttggtaatcttgtggtataatgggcggcagcaacattcagatcaaaccgggattaaacaaaatcaggggtaatgccattatttttcaaccgtcggtaaagagagccaaattggctattgtgcctgtacaggttgtgaacgccaccatcgatataagcaaacctgtataataatactaataacatcacgtggcaaaacgcaaaaaatgttgggcgaacgacgataaaagttgcggtgttacactttcctttccctctagacttttttctttctttttttaactttttcagcatgactaaatcaaccataatgaagcgtattgtcgctttgttcaagaaaacacacgagaaaaaggaagaacatgcatacccctctgaattagagagcacctacaaggtgaccaaaaagacgctaggcgtcggctcatttgctgttgtaaaagaatgcgtacatcgttcaacagggcaatcatttgcgctcaagatcatactgaagaaagccatcgcaggtaagcgagcctcccatctttacacacatgttaccgatactgttgtttttcccaaggcaaggaacatatgcttagtagcgaattgggtaaccatccacgaaagggacaagcaatgccagtctttgacacctttcaatagatattttgaaacaagttagacatccacatattgtatccatgcataatttgtatgaatcgattgatgctgtatacattgtcactgatttggctagtggtggagaactgttccagcaattactgaagaaaggaacctacacagagaaggatgcatcaaacttaacgagacaaatgctagaggggttgcagtatctacacgaaagagatgtaagccagggaagatcatcaaatttagctgatttggtgattaattgttcggttttagattgttcaccgcgatatgaagccagagaacgtacgttcccatcgagtcgctaattgcagttcttgtaccgactaaattgatgtgtagctattattccaaacagctggcgacgattcgaatttgatgattacggattttggtctatcaaagattttgaaagcacaagatgacatcctgactactgcgtgcggcactcctggctatgttgctcctgaagtattgttgcaaaccggtcataacaagccagtagatctatggagtgtgggcgttatactggtaaaggacaagtgcacactttagaaatgctgccaaaaacttatttagattgtctagtttacattactgagtggatatacgccattttggggagaaggtagtatacagcagagattgattgcacgcgagacttatatcacatgtagatcaagcaagcttgtttgagtccatcatgtcagggcagtacgaatacgatgaggaatactggtcggatatctctgattcaggtttgttatgatgtgcacatgtcttgcaatgcagtgtctgatgcagcatctctattaagcccggaacttgattgacaaactattgacattcgatccaaacagccgaattacagcagaggaggcgcttcaacatccgtggataacaggcactggatccaaagaggctggcccgagaacaagcacgaatcttgcacctgctattcgaaaaggctatagtagtagaggcagcattactgcaattgctcttatcaatcagtacaaaacttctgaggattcatccagtgaagaggagagaagaagcgaagaggttaagaaactcgacatcacaacttgaaacattgcggcttcatgctcttttttaaatcaccaaacagagcacttataccttttaatatgccataaaaaatgcttcaacaaccaatacatttcttatactatcagcttccattttaatgttactcgaacgtaataaagaggatcagataagtgagttggttcctgagcggtaattgggacggagttcacctgtcaaaagcagtgatctacgcatcaaaactttctgaaatggatcaatatagacgcggaagacacacaagggtataagaaagaaaaggcaatgcttttgagcatagataatattaaaaatcatggacacagccaagaagagtaagtagtcgagttgttcaattgactttgaatacagtatacagtagccataataccttgcagatttccatattcactcaacaagccggatggtccagattacaacaagtggatttatttacagtacgagaataagagacctcattggaaacaaacaaacagctctacatgtagcaaacccatgatttgcctgtttttctcagagcaggatctaaactatctaattctataatgtcaaagctttcttggggttgatccttgtatttcaatgagaaatcccagcaatacagcctctcttcatagtgtttctgtccgcgcacctcaatggatgcaaacacctttgaatagtcaggcgttagtcgcacgtctgtgattgtgtaatgttggtaaggcttctctagtgtaggcagtagtctgtaagcgatttttccactctgcagatcccagacgttgatacaagcacttgtggatggcatcagttgctcttcctctgtatcgctgcctcctgttttgttgattgattgatagtactggtagagctgataaggcgtcatttgagcaacgggcggcgcagggctgtctgtttcctctatactatcgctcaatttcttgacgtagccggctgacttcttcttttgtctacgttgctgtacaatgttgtttgtgggcggcaccagcttggttgtgctgctatcgttggctacctttccttttgtgagaagaaagaatggtgtgaggcagaggcgggtgaatgcagtgatgtcttcagcagcccattccgacgtctgcactgtttcttcagggacacgcaactcgtagacaagcgagccagtcaaaagcgaaaagaccagaatagggccagacgcatctggagcgcaggcaacgagatgtccattggcggcaatctcgccaacgccttgataccaatcgcttcttcctgataaataggacgagatatcaatcatgcctcgtcgtgtgggtcgatggtgatttgtccacccagtattgctgtttgaactgttgttcttatccaaatcccaaacacgaatcatgctgtctgaaccaccgctgacgacaactaaacaacagacgcatgcagttagttggtattaccatgaccctcgtttgcaagccaagcctaccatcgtcgttcatactgatacacaaaactcgtccccgatgtccctgccacattctgaccagcgtctttgtttccaggttccatactgccactgtgccgttgagaccgcctgtcactagccatttggaattgggttgcgtataatggcagacgatcgagtgagatcttgcagcctcgggccagccaggtatctcgctggttgcagctgtattgtccagaaagaaccgttgctttgtctgtggggattgaattatcaagctttgcgagcctgatggaccatggtaatttggatttgatctcacaatgcggccatcgtttgcaatcgtcaagctggtgaacatgccctgttcttgcggagcgcctataacagtactgggcagcgtgtccattgaggtggaatcgcacacattgggatagaaccccttcacacagcggccgttataccaatttcgtgtgattctgtacatgtcctgccaacttcgctgatttctgtgagccttgggtgagggaaactggagcgaccaccagcgtcgagcactggctctctcaaagtctcgatggcaggcattgggccaaataagctcatcgtaatgagcaatgacttgagcccattgtcggcacacttggctgcaagatgttagtgtcgcaccgtcgagataggcaaagatggctagcaaaagttccgctggaaagggtccattttcacggtgctgttgctggtttgcagtgctggtttccatggtcttgaactagtatataagatggagaaaaagcctcgagaaaggactttttcctgtttaaatgaaggcgacattggggctcacacacacacactatttgctctggcagtcccgctgttttcttttagtctcgactgtttgagaagtaattgaatagatctttctcaagcgagacttgaaacactcttttgaagcatccacagcgtcatggttggcatataaaatcagtcttttattgcttcttgtactttttctcggggcagcacacgctctttccacccgcggcgatcagctctctgcaacatttgtgcaatgcctccagttcttttgcgcatctggcctcttgataatcgtttttccccaggcagtcttggatggcacaggctaatgcattggtgttgttagaagcagcacatgagaagacgctctcgacatttaccgaatttctgacagtgaggaacctggtagccaagcaccgttagcaatatgctgacaacacattgtatggcttacctgttctgatgatgcagtgggcattgagtttgtttgtttaaaatgtagggggttggtcaaaagtaaaaacacttgtgggtaccgtgcggctggcaaatttcgtcccttttgagcaactaaaagggaggacttgtgaggcaacacaaaagttgttgggaggtagagatgaccgtagtccgaaagatagtcctcctcatgtaaattgagtcaagtttaagatgcaagtcttggatccgaagagttctaaattttgtctgttgacatcttcatccctttatttctcaaagcatggctagttgggacttggaaatgaatacagcccacagattaacacccgtagattcagaaacggggacggatcagaaaggagccatgttctggggccgccttctttggcaaagatgtattgagtggccagttcaagaaggttttcgcagctgtagcaaagctccagctgcaggatgtcaagtttgatgtaataaagcaatgcgaatgcttcaagtaggtcatccttccactttggccagacaattcaaacaccagcttgctcgagacaaagtcttgaaatgtgtcaaatggagaagaggcagcattgaggtggaattggagatggagaaaagctcttgaagccatgcccttccatataatagtcattcttgatcaccaccgcgaagtgtgtgatccggcggatgcttgccctattggcagaaagtcctgggtttgtcgaaagaagagcttgaccacctatgtaatgaagcatgtcaaggtacaaaaatctgcatttctcaaaataatattgtaactaaacccactcgtataatactgcacacaaaagacgtcagttttgcaatgatggaagctgaatttgttacacatttcgtcagttgactcagtaggcacataaactgcaaactttatacttaacatccgtatgaaaagtgttcataatagaacattagacccaagcttttgtgaagagaaaactaaagtttgagccaatgccattatggaaaactagctgtcgcacatttggtgatcatagtaaatagacaagaggaggcaatcctagcgcaaagccaaaaacggacatgtacactgtgtttgattgatgctgctgatggcccgtaaatctgtgctactcacgccaccgctcagcgccaaccgttttactcctgaacaagcgaaaagcgttgacccggcgtttgcatgtatggcctttaaatagcccacgcagcagcagatcggcggcatcaatctagggaggatgtctgctcaggacagacacagctaattgagcccgttcaaaatggcatggcctggctaaccgagctactatatatgatttaatataaaatccaattaaagagatcagagttacctagaccacggcagtagcacaagaaccgtgcaatgggtcaacttggattagtgtatattggacacctttctttttttgggtgtccgaatgtaaattgaaacatggtcaataactactcacagcaattgaacgccctttatttggtttctttttctcttattgcacttgttcttcttccctcacgaaaatttttcctgttcctgaagcatcaatacctcttgaatcatgcctgggcaagagatagtttatacggtccacaaattcgaagcagagaatgtggatgaaatctcgatcaatgtcggcgagcaagtcattgttctcgagaaggacgaaggcttcaatgatggctggtggcaggtaaagtagcttttgtacattgccaatgcagagcaagtaaggggggctgcttctaaactatggatttgtcgctgttagggacgcaatgtgcgaggtgaaatcggccttttccccattacatacacagtaaagcatcctcctcctacagtcaccgcctcctcactcgcactagaaaacaagattgattcactggaaaacgctatatccaagatgaaagcacccacatcaacgagtgctccaccgcaatccaagaagacgatcagctccatgtcgtccatgtcatccatctcatcgaaaaacattcattcgaccgtaaatcagtcgctggagaacccgttgctaggcaacaaagtagaggaatggacgtctgaccaagtgtcaacatggctgatcagcgttggattcgataaacagctggcagacaacttcaaaggtatatatacaacggagctcgccctcatgtcagctgtattaaattggagatgcttattttgtccatcatgtcttagatcaggaaatcactggcgacattctattggaattgactctggattctctgaaagaattggatgttactacattcggcaaacgattcaaaatccacaatgccatcaatgctcttcggcagggaaccagaaagcaaaaggtaggtgcacagagtccagttgatgcggttttctgcgaattaattttatatagcaacacacatctccagctgacaattctgtggcaagcaaaaacacagaagcacgggttgcttctccatttccagacttgggcaatcatcgtagtaacaataatgcgctttcgtcatattacaacaacaacaaacaacagcagccgtatcctgacgatgacttggtatcagactacagcactgtccttcgaaactctcaattagcaccgccaaagacagctgctccaaagagctctatgcctccacctcgcccatcgattcccttggacatggatttaattgcgtcctcgcccaggttgtcaagccttgttgagcgtcaaaatacagagcacttgaaaaacagtagtcagatggatcgacaggagcaacaattgcaattgcagatccaacagaatcaatcgcgtctactgcagcaacagcagcagcaaagaattcaatatcttcagcagcagcagcagcagcagcaacaacagagacccatttcacatcaagtcatctcaacgcctacgcacaataatcaagtatcggcagactggaaacgtagcacaatgaacaatatcaagacacaggaggtatgggaagttatcgtgctcgtcgatattgattgctgacacgtgctgttcgcttcattgtagtctttaccagaaggccgatcgtccacgtcgagtcgatatagcttcatgcgttcgtcattgatgccatccggcaacaacaagctgcaaaacatattgcccaccaatgcgccgagtgtgcgtagatcagaggatgtgtcctcgttatcggaagcaactgctgcaccagatatggaaggctggttatacaagcaaggcgacaaatacaagacttggaacaagaggtggtttgtgctcaaagcgaataatctgttctatttcaagagcccaaaggtatgtggcctcacccgtcagtgcgagtgatatgcgtattaaacagtgagattggcgcaggctgtgcgaatgaaaggcatcatcaatttgaagggatacagaatcgaagtggatgagtccattcatccgggaaagtactgcttcatggcgcatcacgagagggagagaaccttctacttttacaccgagtccgaaaagcccatgaaagactggctcaaagcactgatgaaggcaacgattgctagagactttgccagtaaagtagtgcctggattgcaacatgatgcctgtactaatgattattacttgtagcgcctgtcatgtcgtccagcacaattcctaccatttcattggaaatggcccgtcgaatgcgtccccgccctccctccaccatcttcctctctcaaaacgaccccatgcgcgcaagctctcctgcgccgtaccgcaacaatatgaaccagcacttttcgctcatgtcactagacgaacgcgctcagcctattatgcagttttctcaccaacaagacatgtctgtcaacggcggctctcgtgcgccctccgtcatgagtacacggcccatggaccagcaaaaacgcatgctaccagacaacgcatccgattactccatagatcagcgcagccgactaaaagactcgggattcaatagcacacacgggggaaccggactaacacgatctgccacggagagtagccgcagttcatccggccgccaaagcatatccatggcgtccgtgcagcagcaatccgtcaacgacacaccagccactgtgaatggcactgcattttatctcgacgaagaagacgaagatttgattgatccagagcacatgagcgtcattgagtccaaccgtccaaccgctacaacggctgcttacagagacaacacggatcgcttctcacaagtaactgctgtgctcgatacaaggcctacaaagcaagatgcgtatgttgactggatcaatgcccacattcagggcaacatcaagagcttgacagatttgagctcaggcgacgttctgttggagtttctggaggtcttgaccagcaaggaaatactgagacctatcgtgatgcctggccaaacattgaacgctcagcgcatggaccgtgtgattgcagcattcaagtttatgagcctcgaaggtgttgatatggacggttcttgtaccattcgaggtagtgttgttgagaacgcggtatcaatgtttaatttattcacactactactatgatagatgtcttgaatggcaacgagatcaaaatcatgcacatgctggacgctgtggactactggtccaaatcacaaacgagcgaagccaatggcaaaaagatggccagcggtggcacttttggcgaggatgaccagtgcaaactaagagagttggaggaagagtctgaaaacatccttccacccaactcatttgcctctcgataaaccacacgctcccctcccttctatacataataacgccctttatacatatatctatacttatctctatcttgctattctattatacactatacacaa

SEQ ID NO: 157 - DNA, 21050 bp, unidentified
  misc_feature 1..21050: note = Fanzor polypeptide
  source 1..21050: mol_type = other DNA
tcgatcacaaatattgggagttccagccctaagcgcagattcttacatggtccattgcgaaacatggatttgaagcggaatggtgattcctcggtggctgagacatcagggtagcgagtcgttccggatgctctaaattctgagtagaaattttaaaaaatccaccgggaggaaggaacgcccattaagttcaacataaagaaaaatgaatgttgtttaccaacaggtacttttttttcattagttaacttggatggaatacccactcgccgatatcgaatcaacccgtcgtgtagcgacaaaaaatagagttggtggcggtcgatgttcggtgcaatgcgctaactgtggccgcactgggcatgtctataagttttgtaagcatcccgtgagttcatttggaatcatttgcttcagggttcacaacagacgactcgaatacctgatggtgcaacgaaagtactccctctgctttgttgagttcgttcgaggcaactacatgctccaaaaccgcacatacatcctcaaattagtgtctaacatgacggacgaggagcgggacatgttgttggatggtccgttcacgcatatctggaacactttctggcacacagaatccgatgacgtgatcgcgtcgtgctttgtaagggaattcaacaagtcatcgtacctgtacggacagcttagcaaaggctactggttgcgcacaggcgaacctccagaaactaaactaaggttttttaacctagagtcagcgattcttgacacacacgccgcttacatcgaacctgaatgggggtttccgaagggacgtcggaacatcaacgagagtgacatcgagtgcgctaaacgagagttcatggaggagacagcgatggacacctctgacattctctttctccataatatcaagccggttgaggaaacattcttcggcatgaaccgtgtcaattaccgccacatttactacgtggcgtccatacctgtacatggaggaggatgcgtatactccgatgcaacaacacagtacaagcagtccgaatcatcttcaaaaatatgtgcacccgattcgatcaaatcttcttgtaaagatgattccttcgccaccagaaaatggtggtatgggtgtgaacacgagattcggcgagtggaatggtttaacgaaaatgacgtgcgtcgacgcatacgacaagagaacaccacccgccttcgcatgttcaatatgttgcatcaacgcatcgcccgcatggtcatgtcgaacattgatttcgttaggaatgtttgatttcgctgcaatctctaagctcttctaggtgacacacatattggttctcgatgtttgggctgattgtcagaagccatagtgtcaatatggcaaacaagattgttccgaataacctgattatcaaaggcattggtgctagagggaccaagcaagccgatgtatcgaatgcctcatagaacatgctcttgtccagctccccgcttttgatgagcataatgactgaacccaggcgtttgacgttttctatcgatgccatgggatccagcttcaccgtcacgtatattgccacaatcacgaacacaagcattatcattaggtacatgacaatctccggcatggacgagaaccgcgagtctgtattgagatagttgcaacgtttgtggttcgtctgtgcctcgtaaaaatatttgattgcgagtttcgcatcttgcatagacgtgtcacccgcagttgtttcctccgggctgcctgtgctagtaccttcaacgttaattcgtctaatgttaaccaaatactctatggttcgggttgttgcgtttatgagatcgaagctgttaacgtcaacgacgtgagactgacggtccaatatcgctaggcttttcttgaacataacttctgtgattcccacaaccgtgatcgctaaacatgtcagaaataccgtgaacaacaccgtatcccagaacggctgcgctaggttcgttatgaacgagtctatgatgaccatgaagctcgaaagcaggatgaacaagacgattgggacgatgtgccctaggatcgctacgcgtgtgagcttatctttagcagggatgtaacgcggaaagatatttttttggtcgcgcattttttcgataatcggaacgacgttcctaagaaacgcgatccactttgtatctgtcatgtcttgaaccttcctacgcaacccgtagtcggagatgagcgacaccaacggcgattttttcattgccaatattttggtatctgcgacccttagtgtgtcgagcataatccgtcttaggtgcctatcgaagtcctccaacgagtacgccttaattaactgcccctcaatgaccttccggaactctagcaagtcaaacgcaaacccgtacttgtgcatgacgtcggagatatcactggcgatgtagtctcgctggtcgagcaataaaaacgcgcacgagcgcgcgttcttcgccatctgttcaaacaacgtgctgacgtccacgcggaggtagaattctttcacgtcatctccgactcgttccccgccagtcagagggaactgcatgaaaaacgaaagcacggatatttcgttggaagactttaacgctttgttttcgaagaccgcgtcgcattctaaggcgtttctgtattgttgaaacacatccctcttgatattggaaatgacgacattgctctttatctcgaaccccatatttgtcaagttagcagtagtgggtacatatcctccaatgaacagccgttctatcgtgttcttaggaggtttcctcatcgccacaaatatggagccgatttcatttttgttttgttccgtgatgaagcactcttcgatagccgcatacgacttgattttaaacaagtacccctcaggcgattgagggcgtgagcaagcgaaaacggcgacaatacaattatcttctgcagccgctgcgaacattctccacgccgcagctttggtttcgcatctcaccggagggctaatgagccactgttttaacggttgctctagaaaagcgccttgttgtagatcctttggtataaattcgtcgcgtaatcgcatatggatgaattccaacactttggggatgaacaatttcccgatttcttctcgaacgatacctgggaccgtagattttgtgacttggttgtcggcaggttgtttctcgaagaagctccgcaatgcggagaatttggagtgtatctctgtccatacggtgagccgatcgaaacgatcgtaagtgtttttgatttgttgcaacgcaacgagcaccccctctttgtctgcagaacacgatttttccacgagagttacaatgggcggagctgttccctgtttttcttggttgcatgcaagagcaagcgtcttcgttgttgagatttcagtgcgtgggaatacttcatccagaacattgtcaatatcttgtcctgtgattttgcttgcggcgagctttatcaatggattgtcgcttagttctgtgcgatagaaactaagaagggtgtgcgtcggttcgttcacctcgaattcgtattgtcgtactcgttctcccatggtgatcatgactacctttgtgagcaaagatgtcacggctaccaggagaaggatgtggaaaatcttttccagtattccgatgatgtttatagagttgtcgatacctttgcacaagagaaatgatagaatgatcgtcactgaaagaagaacgattgagatcatacccatagtggattgaatatccgatttttgcgcattgacgtaagactctgcttttttcacctcctttcccaatcacaactggggggcgatattgttcaaaagccgtacccaacgcgactttgtgagctcgtcgtccgggttgttaagtgtttcgtaccttagagaataaaggtccaaatctcgaagatcctcgtttagctgcctatgaatctcgcgtaaaatagccataggacgcgcaaacaaacccatttctaccttttatttctcgttacaattttaaaaattgtacattcgcacgtttgagaaccacaactacagtcggcggaacgaaagtgtttacgaacatcagtcgttgaaattctttttaactcaaattaaatgtacgacatcgctgacttgtaaatccacatgttcaaatattggtgggtttagggtgggatatgtgaagaagacggacgtcgcttgggttcaaaagtcacaggtaaggagtcctgtgtctctaaaatgtacatcttgaacgcgctcgacatgcaaaattaaaatgttgtttcaagcagttcaatattgtccaaatcgcgacacccgcaactaatgggtggacaaaacggtgtcaaaccaaaaagactcgaaaagtttaaaaatatgttccgtaagaaaaaagggaagaaaggtgatgaaaaaggggagaaaggtgatgaaaaagggaagaaaagtgatgaaaaaggggagaaaggtgatgaaaaggggagaaaggtgatgaaaaagggaagaaaagtgatgaaaaaggggagaaaggtgatgaaaaaggggagaaaggtgatgaaaaaatgaagaatgggatgagtttaggaggattaggaggaatgtttggtggcgatggtggcggtggcgataatggtagtggcggtattgatgaacgttacgacaacgcttctagtcgcgtaagtgttgttgctgcttcattgaaaaaccttgtttcgaaggggctgagcagctccgttttgaaatggttgtgtgaatgtctgaaatctttcgtggtcattgttgtcgtattgttggtggtatacttgatttattacatgtcgactaaaagtcatttacgtatgtttcagttataccgatccgtcaactttgaagattttagtttcaagtatagcaccgatgttttgacatctatagagaatatccaaacgcagctatcggatcccgatgttgcgggtgctctcatcgtgaacgcatcgaaactgtctagttctattttcagtttaatggggtcaaggagtatagatgaggttcggagtgatctgaacacttgctttagatttgagaattccctccgtaagctaactttggccggaaaagctgatatattgtacaacaccgatagattcaccaccgacgggcttgtggacaagagtcttgtggatgagtttttaaagaatgtaggggaccctgttgatgctatattcgatgcgtccaagagtttctctgaacacttcgaggaaaatatgcgcacacacgaagacccttccaccgtcaaaaagacgtacttgttccgatcgcacgtccacaacctaaaactacaagggtcatacttacctcaattgaagagcatcgcgagcatgcgctccaaggggtctggtttggcagtacagtggtttgtacgttacggcaatttgatcaaggattggtggtcggtaaacgtccctaactcattcaaagagttccccacgcgtttaatgaatacgctcaaactaatgctagagaagtggcaatcacttggccagagtcttgctaaaattccttgcaatgtttcctacctggatgatgcagaacgaaagaaaaactgcgaaggatttcagggttccaaagcgaaggatgatggtgacggtaacttgaatgctggtgatgatgatgatgaggaggaggagatcagggaagggttcatcggtttcctaaatcgatcgcagactttttcacttctttggtggacgtagccaaagcgatcgcatcgttgtttgtcaacttcccaaaggaccctgtaggaactatcataggttttttttgcattataatcggtgtcgccgtaggaatcatcctcatcatctcgtacgctataatcacgtcattgggattggcatatgtatttgcattcatgatcgcctggggttgggcccttgtcgtccctgtttttacggtactattttacctactgctgagcatcatatttcttgtcccattccttgtattgttcataattgacctgatgctccagggcgctttgataaggttattcgcgtgcgaaaaaccttccatccgagtgggttgacaatgcgaactacatgtacgacaactactacacgcgatcgatcgcgtacattggattggtcatgacaccgtgtacgcgccgattccggcccgttggcgtattttgcgaacggatgagacctgacatgcccgactactgcccacaccaactaatatacaagatgttttcgggcaacaaacctactgtgtttggacctaccgtgttcgacaggttccggtcatcggatccctacaatgtgcaccaccccgcgacgaagcggaagttcgtttgcgatagctggaagaccaaagtcatgtggaacaaaaaatgtacggacgttttctcggactacaacaacattgtgaaacacgtgtgcttggatccgtcgcagacggcgaccacacctggcgaagaagacacgttgcgatcgctttgtaaggacgccttctgctctactagggatcttgtcaactcaacatctaacaaatcattttgctccgagatcaagtacccatcgaataaggatgacgaatataagatgaatttctcgtccggaacagccgagatattcaagcaaacgtgcagcgtcatgatgttcacgattttagttgtcatcgttatgatgtcgtttttcactatatcgctcgtcatcggggcccaggcaaagagaggggtgaggaaccaatcgtgaattacccggttttaacaaccatctttgcatgcaaaaggataatcaggatgatcaatgggtatgcaatgcggatcagaacatcttgccaccacttaaaattccgcgacatctttacccgatctgaagcgaccttcaagtaaaaaccagcagtgtggtgcaatgaaaccgcgaacagtatggccagagacaaaatgatgagctttccaacactgctacgccgatcccaaaacatcgcaaggtatcccgaagaattaccagcaccaccatgttcagattggtacgttcgctgctccatttcagcgaattgctcctccaacttgcccaactttgataccgcatccgacctctgatgaggagcctgatgaatatgttgttggtggattccttgaacttggatctgattttgcataattcgttgttgttcatagacatgctgcttctgctgctgttgcaactgtgtttgttgttgttgttgttgttgttgttgttgctccaaatgttgttgttgctccaaatgttgttgttgttgcacgttaagatgcacttcgttctctagttgtttggtcagtttcttggcgtcgtgtttctcaataacggtttggtactcttgtttctgttgctctttctgttgtagttgtggtggctctacagttcccaacttttgtgaatattgttgttcctcgacggattgcggatcatatatatttcgtaaaggttacctgtgtctggacttgaaccgctggtaagttccatcatttttttgtggggatattgatgatactgtctgtgggacagtgaagtgaaacatattatcatatggaaataaatgtgcatcgccgttagaaaaatggttgccgactttgatgtattgaaaacttccactcaaccaagtctttgggattgagcgacctctcgcgtttcgccgagttgtgtcccactttatttgagaacaactgtagtatcgtagtggctgttttgaaggtgcttgtacaacgccatgtactctctgaggaagcctgatgatatgtctagtatggcctccccttccacgtatgcggcgtaagccttttcataaagcacacgcgcctcctcgtgtttgccaagacttccgagacaccgcgcgtgcatcgcccagacgtcggggtgcgccgcgaactgggcaccgttcgggctactagataaagacaagacaaactcgttgattgcggcatttagagcttccggtttgccttctgagtttttgcgtgcgtcgaatagcttgcagaatggctggttccatatcagcaggttgttggactgaatggtggacaccgcggccccaatctttgacccgtccacgaatacgttgtgcgaggagacgtacatgcgtagccccagggtgttggcgacgtagtgcaagtgtatgggcgtggggaggcggaccggaagcatagcccttgccattgcctccgcggcctttggtgtcactaggtaagcgtcgcatgcgggaggggtgctgaagagcgtgtccagtgctgggaagctgaggtccttcgttgggggggatgggaggctgatgaacacgacatcggcgtccgcacgcgcctcctgtgtaataggcaaaggttctgggtgaatagcgtgtcatcttccacgacaagcgagaacctcaggttctgtgtgttgtgatgtcgttgtgcgcctatgcgtgtgagtgcggctctgtgttttagagcattagagatccgtcgcaggttgattgcagggggcgtgaacgacctgaacttttcggggatattgttcgagttgatgtccacgtattggtccttgcatgtcagtagaatgcgtttgagttgctctgtcgggtcatggtcgtctatcatctcgatggtgttgttcatgcttaggggccctagcgcggtggacaggagttgcgcggacgatgcgcgtgttttgcgcaacagactgggggcgtgcactaacatcacgctttgtagaatgggaccttctcccggggacgaagccctaccttgttgtgtttcctcgcgctgcatgatgttttcttttctggataagaacaaaaaatgtgaatggagaccaccgcgcatgtgctgctataatttacttagctcttacacgccactccttcaaaaaggatctcgattcaataacaacgaattttgacgactgtaaggagtccgctgccaaagctattgagctttctcgtctaaaagacattcaaaatgacattattaagaatgagtccgctgccaaagctcttgatagtaaaaaatcccaggaccctgttttggctctgaaaacaaattcatacagttgttctcaaataattttgggacactcagtataatttgaatgatatcccctgaaaccaggtacaggtccgtggttcactacaaatattttttgaggagtctcaggaaggtttgtaatatatacaacgtgtccaagagctcactacatagatgggtcaatgctgatcaggtgggtaaaagtaagcgtttaaaacgaaaaaggaaagaattgtccatgcttttacgttccacgatatccaataatattgcagagaaccccttcataacatgcaaggatttggtcggtataatttgcaagagttgtaatgtgagattatcgatcagtacggcatcgagacacataaaacaatgtggattttctaggaagaaggcgtttcccacagttctctacggacattcaaaagaaaatgtagaaatgttttgtgacaagtacagagaaagctctaacgttgtttgtatcaacgaagcaggattttacgctggcgaacacagcaaatatggatacagcaagatcggttctagattaactacgaagacaatgagtaacctccgtcgtgtgaagttcactttattactcgctatttcatctcagggaataatagattatcagttattggagcacaattgtaaaaaagaagatttcattaaattctttaaaactttggtcatcccaaagaacaccacgatcgtcatggataatattcggtttcaccattcttcagaaataaaggatacatccgaatgcaaagggtggaagcttttgtacacccctccttattgccccagagctaatgcgattgaacaaatatttggaagcatgaagagagactacagggcatcatgtccattgacgtcaacctgtaatatcgattacttaatgcaaatatgttgtgttctagaaatgtggaggcttaaagacttgtcaaaatatatgattaatacgagagattgggttaggaatgttcgagagagcctgtctgcagatccagattacatcaaaacgttttcggggtacaatttgtgatggagaatggtatcggcaagtcatcatcgttggtacatgaggctgaccaacatgatgacgttgcagaacttgtcgattatgaaggggaggaagacgaggagtgtgcacctgggcgagcgatttgtgtggtcaagatgaaattgagtacctttattccccatgattggcttcgtaaaaagatagacacactggtactggacatgaacaagttgcttggagaggtttatattttcgcaaatttccacattgctcgtctttttgagaatggtatcgctgtccctcctgtaaatcgcaacttcttctaccggtgccttattgcagtcagtaccaacaaatgtaaggggtcgactcttggcgaagacttcgagagtagtcggcttctgtttgacttgttaagagagccggggcaatccaaagttgacattcgggggaacatgaagaaccagatcattgcagacctgtctattctcatggccacaatggcctctaaccatctttggaccaaccttgagcgacgcataacgacttacttgaagtggaagtacccacagattgcaaagcgcctgcggtctgacatcgtggctgcagtgatcaagtgccctacaaagaatctcgacgtcatcttcaagatgagccctcatacaaccaagctgccaaccaagctgccaacagctagacttcgatcggcaaaaagtgcagttgctcttgcgaagaagagggtcggtaggaaggaaccagaaggatcccctttgcgtattaggttgactaaacttcaagagaggcttgaaaagttgagcgaagcttggctctcctcgaagaaccttagggtggacgcagataacgcgaaacgcttctttgcacgcgacgtggcattctgtctcaggggggttctacctttaccatccggaaacacttttgggtctcgggctcacatgaagaattgggtctcgggctcacatgaagaattgggtctcgggctcacatgaagaattcaacctcagagccgctggccaatatggatttagaagtggtaggggtactgcagatgcatcattcattcttaaccatattgtagataaatatagagaaaagaaaaaaccactctttgtggcttttgttgatttcaagaaggcttatgattgggtcaacagagacttgctatgggattgcttagcaaggctaggagtcaaggacccctatctcattattctgaagtccatgtataatcatgttgttttccaagttcgcctacatggggacattggatcctcctttccatcccttgtaggagttaaacaaggagaccccctatccccactcctattcggtctgttcattgatagaattgaatcgttcctccaatccaagctcccaaatgtaggggctgagcttaggggaaagattctgcaactgttactttatgctgatgacctatctataatggcagaatccccggcagatatgcaagcgatgcttgactgcctgagagatttctgcgaggctactaagatggctgtgaatataaagaaaactgagattgtcgttttcaacaaacaattctgtgatgaggcccgcatggatcctgattacagatttgtctatgatggagcacaactttctacaaagttatcttttatctacttgggatccctctttgtggatggtgactcaagcaatcgtgcaaaagctgctttttctaggatgctcactaaggcccaaaaggcacaccacatgcttcgtaggcgatgccatactatggagatatacaatattgatattctcacccacctgtttgatctcttgtacaacctatcctgaattttggctgtgaggtgtgggctccttctattctgaacaacacacttatctcaaatgaccatgcttgtgagaaatggcatagagatatacttaaacaaatgttgggtgtttgccaatctactacatctaatattatcatggaagagctgggtagaaccccgttgtgttttgcttggcttaaacaagctttgcgcttctggaacaagaccatacataaagaacctgaggatctcattagaatggctcttgaggaatcttttgactccaacactggctgggttcatgacttgcgttgtgctctccacaagctaggatccagtaaaaacatcaacattttggaggctgtcgatgtcgaaggtattgtgtctgaagttttttagtcatggaggtttaagtacccaagtgacatcaatgcagttagagacatccctgatgagagaagggttggctttaaacgcctccgataccaaaaatggttcgcagccaacagcaatgatgagaatggcttgattccctttacatccgccttacataagcaggatcagattcgttctatagcacagtttagaatgggttcccattggctgaacacagaaagaatgagggtggtggatagagcacacatccctcgctcaatgagacactgtcaaatgtgtgggttccaaaaaactgaggatgaaatgcatatgtttgagtgccctttttataatgatattcgcctccgctaccagaatctgtttacagatatttataggcatgtccatgaggataccgacttaaccgtatggaatgtggaattctgcgattccacattcagaacctttatgaatggaaatggcactaagtctttttggagcaacctagccgactatctttctacttgtagaagagcaagacaggaagccctggactgcttagtggcaccgtaatttattatcccttttttttcttcttgagacttctcatttgttagcttcttacctccgccactgtaagtggttgagatctgggtcctgctctaaggggtttaatacctacgccaccaaaacggtggttgggagtttggtttgtttgtcctcgacacacccctgatgtaatgggtttttttgctttgtgggtgctttttctttttgtttaaagcacagagtctcatacaccctcgcggtgtcaagtagactttaacatgtaatgtaatgtaatgtaatgtaatgtaatgtaatgaccctgcctctgtaccacaagatattgtcggagaccatcgaagaaaaacgaaaaacgaaaaacgaaaaacatcgcacattctcgttgttgccttacaaatctggattcactctgtcgcacattccgatttcgaaaatggcatttttctatatggtcaacgagtgccacttcgattcatgcaaggcagacgttgcttccaaaaaccatcaaggaatatgggagcgcttcgcaaacctcaagaaagtggagacagtttctcggaagttcggttaccgcattgtgacagacggctttgcagtcagcatcttgatgaataagcctacgtgtctgacatgttcgatgcctgcagacgcgttctctacgcgggcgcatgagtatgtgacaacagacgagggtggcattgtatccttccttgacaatgtggtcgtggctgcggtagacccgggtgttactgatatcgtgactgtaacaggactcaacggaggtactagatcgtacagcttggcgcaatattatcgcaagggtctgatcttcaagtctcagcgtcaaactgacgtttggaacctcgagacggctgatatcgtcggtggtatcattccggatagagactcttcgagttctgaacagattggtgcgtacgccagattctacatgggtgccgccccaatccttcttgcccatcgtgcttccagggggtaccgaaacctccgctttcgcaggtactgcaagaaacagaaactcattgttgagattgctgacttcgtagctccgagagagaagagcgctaaggtactcgtcgggtttggtgattggaaaggtctgggggcgacgccaatctctaggcggacttgtggccctctccaagctattcgtttcgagcttcgtagccgagaaaacgtcatcatggaggacatcgatgagttcagaacatctcaacgatgcagctgctgtgagaaccatctttgcaacatggtggcactcactcatcgtaagaagcaagacggtacaggttgggaatgtacagaaggacgcaagcggattcataagattctccactgcaaaagcagtcaaagcggagcgccacgccaacagagcggtggtatgcttcactgcgggaagacttgggaccgcgatgtgaacgcttccaggaaatacctaatgcttacacttcaccaagtctttgggagagagcgtcctctcgcgtttcgccgagacgcgccgagaagatcctcgacaaccccacccccaccccttgatactgatatggggacacagacggttgaacggtttaccaaagaggctactcggaatatcttcgagaacctcttcaacctgctgcaccccccaacgttgcccaaaagcaacgatctgcagtctggatgattataaggtgtcccactttatttgagaacaactgtatggtcgtatagtcggagacgcaatttgtgggacgccctaccggtgacccttgaacccaatgggtagatgtattgacaagatcggttacaaatattgaattggtcaacttgtcagaatccccaaaatataatgtgtcccaatatcaaatgtccctagctgtatgatattcatattcattttttttgtgttgatgtacattgtggcaatcgctgctataatttacttagctcttacacgccactccttcaaaaaggatctcgattcaataacaacgaattttgacgactgtaaggagtccgctgccaaagctattgagctttctcgtctaaaagacattcaaaatgacattattaagaaggagtccgctgccaaagctcttgatagtaaaaaatcccaggaccctgttttgggtctgaaaacaaattcatatggtcggatgggtatttcatacaagatgaatagtagtgtaacacataaaataatgatcaatgctcaggacataatcgatttggtgcagaaggatgggtgccaatcctccatgaaagagataatgggggcgattacaaatataggggaaattctcggtgaaaaaccacttccttgtggtctggtgacctctgtgtccgtacaggaaattaatagtttgcaaggacagtttccagcttcaatattgaacaaggttcatgatctggtcaaaattatcattgacggatcgtgcggaaaagatggcatggtcgacgctgacatgatgatgaccattgtgaagaacgtagttgcatcaatatgtgaagtctctgatgcaaatgtaaaatgtccaaatgacattgtcggtatttcttacacaacgaataacgagctcacccgaagaatattgatcagtgcaaatggaattgctgatgcgatgacgaaggaggggtgccgaacctccatgaatgagattatgtcattgattaaacattcaggggagatacttggcgaagtaccactcacttgtgttctgtcgaagtccattttcggacaagaaattgttaaggctttgggtggacaggttgaggttgcagtaatcgagaagattcaaaatatggtcgacactatcattgacggatcatgcgggaaagatggaatggtcaacgttgacactgtgatgaacattatgaagaacgtagtttcatctctgtgttaaaagtcaacggaacaatacaataaaacatatatcagatgacatcgacagaacacaatacagtcggagacgcaatttgtgggacaccctaccggtgacccttgaacccaatgggtagatcagctaaaggcgagtacatatttttgcccttcatctctgtatttcagcatttaagctggccaaaaggataacaaggcaagctgctgacaaacccaggtgggtcggtcggtttagcgctcacactcgcctcgatgaaaactgtggttttggggggaggcgagggaacacagaatgcctcaggtcgctctctcccgttcatccacgttgtcagaagtattctgtcgactgtaatctcttccgttaattcaatgaagtgaacggagaactctaactttttcttgtacatcttcaatgcgacgatcgcaattgcgtacgctggcattacagctacttcgcactcgatcaatgtctgcataatcgatgacgcagcacacttattgattcgtcttggcgtatttggtgaaattgcaaagcgtgaagcatggcgcctaagaaatatagggttcgcgttcattgcgtctcaccacctttcttaacaagttacaaattgtatttttatttacaccattaaatggcaggattagatcacgaaaacgaccatcatccaggcgatgatacctacggggatacaaagtccatgctccctagtctacttctagacggtaccaccacttcgtccgaatagactgtgcgatcatgcggggacgcaacttggtcactatcggacgtctccgagttgttgcgcgaccaggagcttttctctaattccagtgaccaagataaagaagatggtctctttagtggaatggcgaccccccacatttccatgcgcgcatgcggcgctcctatggctctcctgaaggaaatgatagctaccccttcgggagacgcaaccctcctagaagagcttctaagtaaaagcgaatcatcatcatcatcatcatcatcatcatcatcatcatcatcatcatcgtcgtcgtcaacatcatcatcatcatcatcatcatcatcatcatcatcatcatcatcatcatcatcatcatcatcatcatcatcatcatcatcatcatcatcatcatcatcatcatcatcgtcgtcgtcatcatcgtcgtcgtcatcatcatcatcatcatcatcatcatcatcatcatcatcatcatcatcatcatcatcatcatcatcatcatcatcatcatcatcatcatcatcatatcatcatcatcatcatcatcatcatcatcatcatcatcatcatcatcatcatcatcatcatcatcatcatcatcatcatcatcacatcatcatcatcatcatcatcatcatcatcatcatcatcatcatcatcatcatcatcatcatcatcatcatcatcatcatcatcatcatcatcatcatcatcatcagtcatccatcatcatcatcatcatcatcatcatcatcatcatcatcatcatcatcatcatcatcatcatcatcatcatcatcatcatcatcatcatcatcatcatcatcatcatcatcatcatcatcatcatcatcatcatcatcatcatcatcatcatcatcatcatcatcatcatcatcatcatcatcatcatcatcatcatacatcatcatcatcatcatcatcatcatcatcatcatcatcatcatcatcatcatcatcatcatcatcatcatcatcatcatcatcatcatcatcatcatcatcatcatcatcatcatcatcatcatcatcatcatcatcatcatcatcatcatcatatcatcatcatcatcatcatcatcatcatcatcatcatcatcatcatcatcatcatcatcatcatcatcatcatcatcatcatcatcatcatcatcatcatcatcatcatcatcatcatcatcatcatcatcatcatcatcatcatcatcatcatcatcatcatcatcatcatcatcatcatcatcatcatcatcatcatcatcatcatcatcatcatcatcatcatcatcatcatcatcatcatcatcatcatcatcatcatcatcatcatcatcatcatcatcatcatcatcatcatcatcatcatcatcatcatcatcatcatcatcatcatcatcatcatcatcatcatcatcatcatcatcatcatcatcatcatcatcatcatcatcatcatcatcatcatcatcatcatcatcatcatcatcatcatcatcatcatcatcatcatcatcatcatcatcatcatcatcatcatcatcatcatcatcatcatcatcatcatcatcatcatcatcatcatcatcatcatcatcatcatcatcatcatcatcatcatcatcatcatcatcatcatcatcatcatcatcatcatcatcatcatcatcatcatcatcatcatcatcatcatcatcatcatcatcatcatcatcatcatcatcatcatcatcatcatcatcatcatcatcatcatcatcatcatcatcatcatcatcatcatcatcatcatcatcatcatcatcatcatcatcatcatcatcatcatcatcatcatcatcatcatcatcatcatcatcatcatcatcatcatcatcatcatcatcatcatcatcatcatcatcatcatcatcatcatcatcatcatcatcatcatcatcatcagcatcatcatcatcatcatcatcatcatcatcatcatcatcatcatcatcatcacatcatcatcatcatcatcatatcatcatcatcatcatcatcatcatcatcatcatcatcatcatcatcatcatcatctcatcatcatcatcatcatcatcatcatcatcatcatcatcatcatcatcatcatcatcatcatcatcatcatcatcatcatcatcatcatcatcatcatcatcatcatcatcatcatcatcatcatcatcatcatcaatcatcatcatcatcatcatcatcatcatcatcatcatcatcatcatcatcatcatcatcatcatcatcatcatcatcatcatcatcatcatcatcatcatcatcatcatcatcatcatcatcatcatcatcatcatcatcatcatcatcatcatcatcatcatcatcatcatcatcatcatcatcatcatcatcatcatcatcatcatcatcatcatcatcatcatcacatcatcatcatcatcatcatcatcatcatcatcatcatcatcatcatcatcatcatcatcatcatcatcatcatcatcatcatcatcatcatcatcatcatcatcatcatcatcatcatcatcatccatcatcatcatcatcatcatcatcatcatcatcatcatcatcatcatcatcatcatcatcatcatcatcatcatcatcatcatcatcatcaatcatcatcatcatcatcatcatcatcatcatcatcatcatcatcatcatcagcatcatcatcatcatcatcatcatcatcatcatcatcatcagcatcatcatcatcatcatcatcatcatcatcatcatcatcatcatcatcatcatcatcatcatcatcatcatcatcatcatcatcatcatcatcatcatcatcatcatcatcatcatcatcatcatcatcatcatcatcatcatcatcatcatcatcatcatcatcatcatcagcatcatcatcatcatcatcatcatcatcatcatcatcatcatcatcatcatcatcatcatcatcatcatcatcatcatcatcatcatcatatgacctttgctgtatgtgatcgttccttacatcatgttgcgtttcaagttcaagatccgcatcggcctgaccgcatttttgaagatgatgtactcgatcgtctctgcccagctgcaaaaccttagtggtgctcggcaacacatatcgcagtacgtgtccatcggcgtctcgcttgtcttttacttccattgcgtgttctcaagcatgcaggtgtcgcaaatgcttcacggcgtgtgttcaggtgtggcgcagcgtgtttcagccatccgtctgttcgcccgaaataccctagaggcctgggagggcataggcgacgcgtcctcttgggcggaggccgctgcttgctggacgggaccccaattcgcttggtgcgatcctgatgtgcttccgtgcgaacgtgcgttggcgacaagtgtctcccagggacaacttataaaccggtacggaggcgacctcgagttcttccagcggtccgtcatcggtagccgcgaggccatctcgtgcgtgttgaggcgcgcgtacgtgatggacgcattggggaccgtcatgcgcatggtcgggtccctctctctcgcccccgtagaattcttgcattccccttctccatagctgaagatgaccggtctatggcaccccggtgtgaagggcgcggttcctaacgattggtcgttctcaccgtccgagcgaaacgctatcttgactggtcccaacgcgggaggcaagagcactctaatgaagatcacattgttatctgtgctaatggcacagacattatcgtttgtgccttgcaagagcatgcagcttcggcctttcggagcgctgtgcagccacatcaacgtccctgacagccacgtccgcggggagtccctcttccaggccgagatgaaccgcgccaagcggtgcgtgctctctattgaacaggccaggaaataggtctcacatgtctcgttgtgattgacgagatattcagcagcacaaatcctgtcgagggcatagcgggggctgtagctacggcctccaagatcggcgctttcgagaacgctatcaacatcgtcagcacgcactttacacacttggctaaattggcacgcggtcccgaaccttgctacagggcctttaagatgcccgtgaatgtagacaaacaaacaggagcgattacatccgagtacaagctgcatcgcggcgtttccacacagtacgtggctctggagatcatgagggcgtcagacatggacagcgacattgttcgcgaagctattcgagtgaaggaggaattgttgcaagcggcgtcgaggaaacagaagcccgagcctgagatttccacgacatctgaaaaaaaaactcctcatgatcctcaaactcctccatcgtctcccgtgtctcctcgtcattctctttcggacttgaccgtttcatcgccatgatgaatcaagtttccgggagggttcgtctcgaataatgaaacctcgtcaacttctgttccagagtacccagtgtcctcatcctccacattgaaccccgacgcccgacgtagattttcgtttacttggatgcacgcaat

SEQ ID NO: 158 - DNA, 20990 bp, unidentified
  misc_feature 1..20990: note = Fanzor polypeptide
  source 1..20990: mol_type = other DNA
cgacatcatcttgcaaataattcacatcatcactgctactagcgcccgcatcgacgacatcatcttgcaaatcattcacatccgacaatcctacctgatcagtcattacaacttattattattcattggaaacatatatacggctttcgaaacgcacacatttagcggggtgttgagataactttgttggacggaccatccactcatatttcaaatttatttgtgaaaaaaaattgacgagtttttaattcatttaagatgacaacaaccaactattgaaaaatattgaaaacacccatcatgtcttcttcaacttctacacagatcatcaatgaattcgtcaatgagacgggtatcattggtttcctccagattaacagaaagaagatcgtttcgaaggcaacagtctctgaactagagaatgtttgcaacaaattggtttctattgaaatcattccggattgcctcaccgactctgtcggtgcactgaaggtggcgtacgagaagttccttcaaactccccccagtggggggagaaaaggacctctacaagctatgcttctcccggttgccgtcgctacggctgctgccaaggatgctgctctcaatgcagcttctgacactgcagtcggtctcaaagaaactgctgaagtcgacctcccagaggactacgaaagcattgaagctttctctgcttacaaagcatatcttgacaaggcattcgttgccgaagtatctgcttacaaggaagatgtcaacaaggcatccgctgataaagaagctgctctcattgcacaaatcgatcaagtatctgctgtttaccaacaggtaatcgaagctgctacgcatcagtcgccttccccctccagtgggaccacctccacttattgtggagggtcctacactcatacacgcctagactccgacactatcgaggagttcgtcaataagacgaatatcttcggtgtagtgcagaagaaggacaagggtaagatcgcacaaggcgcaacagtcacaattcttcagactgtttgcaaggcagtcatttcattggaaaacgtgcctgagtgcatggccgactctgtcggcgcactcaaggtggcgtacgagaagttccttaaaactccctccaggggtaaaaaggaacctctccaatttatgattctccctgttgcaatcgctgcggcttctgccaccaccaaaatgtagtgcccaacgcgccgcatactttttttttggatcacgttcgtggatttcatgatgtaactcatatacaaactgtacaaagtcgactttcttgcaattgtgatcaaggatcttgtaatgaacgatacctttagcagaaccttcttctgcttctgacttcttctgcttcaagggtcaccggtagggcgtcccacaaattgcgtctccgactgtaaggcacacactccggtgtacactccagaaagcggtttcatttatatgttccgtcgagtgtagtcccatcaattccatgcagtgcatgcaaccttgcgattgtgagagcagaagagcgatctcgaattcggaagacagacttgtgacgcccaaccgtgctgccacggccttgttgtacatgaaccggttgcaccccgcaaactctgccagcatcgatttctgagccttggttgggttcagcttcatttttaaggtcctcaaattgggtttggcatttgactttgtagcgtcttcgacctctttgaaaattcttcccaaggtctcaacacggggaaaaaaataccattttacagtacacataaaacatgggaggaactcaaccaatcgaaattccctcgtccgccgacaagtggcggtactcgctgtacacagcaatcgtgttcatcgtcatctctctgccactgacataccatgccacctcattggtgtacaagggaatcaggaacgcatcgggtggaccaagctacattggcgtgttcctgcactcgatcgtgttcctgataattgtgcgtgcaatgatgggtgtaaaggggctctgatccccaaccaatgatatatcaattcacggccgtcacgccatgaatcgctctcccgaagactcggaaaatgagtcatcgtcatccgcttggaggaacgagatcaacggagcgtgcgacgtcatcagaggctcgcagacgcatatcctgcaaaaggcgaacgagatgctggatctgctccgaccactgaatcactatgcaggaggaggagacaacgactccgataccggtgaaaacgatagtaatagtgtaatagaccggtgctgcgaagcagcgcacggggctgtctttgacaagaaagcgtcggcgtccgaaaaacgcatggtgcaaaaactgctcgagttcctctactacgcacggcacaccacggaaagcctcagggccagtattaccagtcttcgaaacgtcgatagggtacaacaacgtgagagcgacaatgacgaattggtagacgatgaacaaacaaaaaggttgaacgaggacatcatgtccagcgtcgctcgcttctcaccacagagcatcgaaaacgccaacaaggtccagcaactgctcatgtacatcctgaatagcctacaccaaatgggataccgacgctacaacgggggggagtgctacgccgtgaggtacaccgatgacaacttgtgcacgtacgcgtggcgccgggtgtgcaccatcaaggagttcgtctaccagaatacgcagaaggaactcaatttcgacatgtggctcaacctgacaagcgtgaggaccaacatcaacgccgttgtggatcacctcacgtgttgcagggacgtgcagttccccgacctagtgcgcgaccgccatgtcttctcgttcaagggtggtgtgtactttgcccccactgatacttacgtgccctatgaaaaaatgagcgagcggggagatgacgtcgtggcggcgaagtacttcgacctcgactttccatgcgccgaggaagaaaccgaagaggattggcagccaccgacaccctacctacagagcattctcgatttccagaagatgagtcccgatgtcagctggtggatgtacgtcttcattggacggcttatctacgaggtgggtgaacttgatgagtggcaggtcctcccatacctgaagggagccgcgagcaccggcaagagcaccattctcacacgcgtgtgcagggagatctacgacgcacatgacgttggtgtgttatcgaacaacatcgagaagaagttcgggttgtccgcgcttgacgaaaaactcatcttcatcggaccggagatcaaatcggacatcgctctagaacaggcagaattccagagcgtggtgtctggagagactgtacaggtcgccgtgaagtactcgaccgcgcgcaccatccagtggaaggtgcccgggattctagctggcaatgaggttccaggttgggtggacaactccggtagcatcaatcggcgcatcgtgctcttcgaattcgaccactgtgtgaccagaggagacatgctcctggggcagaagctctctcgggagatggggtgcatcctaagacgcaccaacaggtcgtacctcaaggctgtccgattgtacgcgcgtgataacgtttggctccacttgccttcagaattccaccgcgccaaggatgagctcagtgagagcgtcaactcgatgatatccttcctccgtagcggcagactcacctttgaccccgagctgtacatgccgtacgtggacttcatggagacgtacaaggaatactgccgacagacgggacaccgcgccatcgccaaaggagacttcaagaaccacctgaaatcgatgtcgtgcgtgattattaacaagaccacgctcaggtaccccagaggcgcaaccgggacgtttgtcgccaacgccaagtttgtgatgggagtggacctctcggtctactgcgaaaacaacaacgacgtccaggatacaccatcgccacttgagtgaactacacaaaaagttcggtgtacgatatatgtatgaattgctaactctaaaaaaacataatggcaccatccttaacatcccatcaagacatcgcccttttgggattgaagatgtcgcagccagcagtagtagccctagtaggctacatagcactgatcatcattgtgttgctaccctttgatatgtacacctacaatgtaaatgagaagaagtacatcagagtcccctacaactttgcctacagactgctcatcgcccttctcctaatgcttccattcttcctaggcgtctattcgatcaactgcatgatacacggtcactgccacgcatggtcgtggatcgtggcgatcctgaccatcgtgtgggcattcaccatcgcgatagtgaccatctccaagggatccttcacgatcgaccaacttgtttgaacatcattcattatcgcgttcggtcagaagcataaaaaaaaaaaaaaatccagatacttgttgtgtagacaacaaataaacaaacatggatgttttttcaggaattgacctgctttccaactctaaactcgatcaaaccagtatgcatccccccccgccaatgcatatcagtctggtgcacaactcgaacacaaccgataccgcgtacaacgcacccagaccaccacaacagtatcagccaactatcgtatcccgtacatcgtccgtgtgctccatgtccgttcgagatatcggaggagatgcagacagtgtagacgaactgatcgacatgacacacacgaacactaatagtaagccagtcccgataaacacaggtggctttatgaaccacaatattcctagcatcatcggggggggtctcgctgataaaaacagcagcagtgacgacgattgtagcattatgtctgaatctgatgcgtcctcatctcgatcaaaagcttcgcgtattaggagccacgaccgaacacaaatgggtagagagcggggtcgtgcgaactctaatgatagcggaggaggaggctacaacaaacctacgagagaggatgagaccaaaaagaagcagctcatttaccgattggaccgtatggaacagaaaggcgcacaccttccccggcgctacaccatgaacgacccgctagagaatatcgaggcagagtacgagcgtctgaagcagaaccgcgacatagacgtgagcgttcgtttccagaggcgcatgctcgtggcctgtgtcaccggaatagaatttatgaacaacaagttcgaccctttcgacgttaagctgagcggatggtctgattcaatcaacgagaacctggacgactacgacgacgtgttcgaggagctctttttgaagtaccgtggcaaggccaagatggccccggagattaacctgatgatgatggtaggaggcagcgggctcatgttccacttgacaaactcgatgttccgctctagcaacatgcccgatcttggggatgtcatgaagcgcaaccctgacctcatgcgacagttcacaaaggcgacgctcgacaccatgaacaaccctaatgctagtcaagggagtcaccgacctcctcccccaccacgtacgggagggggaggtatcatgggagcgatcggatccatgttcggactaggaggggggggaggaggaggaggaggagacatccgaattaagccacatcatcctcccgcacctccccagaacttcatgcgcggacccaagaacgtggacgaaatcctgcgcgagctacagagcgatgtcttcgaaagcaagagtgatgttgctgtaaaaagcgacgatgtaagaagtaatgatcgagatagactcatcattccgcctacaacaaccacattctcattgtctcctgtgcatagcatggacattggctcaatggacgatcttgtcaaagaaacaatcaaggctcccgcatccaatgcaaagaacgcaacaaaaaccaagaccaaggcgactgggggaaagcgtgccgctgcaggcacacgcaccgcatcgaacaaaaaggccatcgacatttaatgcgaaaaattttcagggcaagtccatccagacccgcctccacctcctgatgacccccaagacaagtgaaccccggacctgtatctggtttcaggggatatcattcaaattatactaagtgtcccaaaattatttgagaacaaagttgtacagtctggatgattataaggtgtgtcccactttatttgagaactactgtaacaaaaggtggcacaacaaccatttataaattgtgtacataaaaatagatatgccatcttttcacgtattgtccgatcttcacctcaagcactttcccgggtttcgcctcgaccctgcgaaaatcgaggcgccgctcctggttctggccggagatgtgggcagtccgtctgacagcgagtacgtcgcattcctagagcactgctctcagctattcgaggaggtgttcgtcgtgatgggtaaccacgaggcgtacggcatgggcactctcgaagacggtattgccgccgtgacactgctgatcgaccgcgaccttcccccaacgtccactttcttaatcgttcagcgcacgatttgcaaatccaaaataccaataataccaaagtaaggattttgggaaccacgctgtggtctcaagtccccgatatggacgcaatacgcgtgcagtgctgcttgtccgactaccgcatgatttccggcttcacagtgcagaagaacaacgccgtccacatcgaagacgttcgctggctcgagggcgaaatctctcgcgcggaaaccgatggcgtcgatcttgtcgtcgtcactcaccacgcgccgagctttcaaggaaccagtcaccccaagacgagagggagcttgctgaacagcgccttcgcaacggacctgcaccatctcctcaagaggagccccggtgaagctgtgggtgcacggacacacgcactactcaaacgaccagaaaataggtcaatgcaaccttgtctccaaccaacgaggctatttgagcaatccggaagaaggacacagattcgatccttacaaggtgtttgaaacataaactacaacaatcagtccggaactcccgtggaggatgagccgaggatcctgaacagctccgattttcctccgggaggctggaacgcccattacatctgtacagatagattatattacattacattacattttggttcggtgaaatcatgtacttcttcaaacaaacaattgacgttaccaccaagaacacggtaataatcctataaatcgttaattcgctgatgtattcttttgcaacgatgtacgatccaatcccaattccaacgagagatgccaaagtgaccattatactaggccaatcgatgtgctcccggtaattgtacaccccgataatagattgaggaagcaactgcatcaccatggccactgctacggcggtttttatgttcacgcaagcgaaagttagaagggtgatcgttaggacacctgcaccaatgcctgtgatacccatcgctaaccctacaacaattccgatcagcgaatacaaaagatacattgtgatgtgatttggtatagttgttcagataatacatccggagacacaaattttgggagcccccccgatagttctcaaataaagtgggacacacccaagtcagcgaccattcttaacgccaattttctaacggcgatgtcgtacatccatatgatatatgtttcattttactgttccgccgactgtttgcggactagctacccccccaaagtattaggcatgtcttattttagctgcctaatacttggcaggaaagtgggccatatataattggcgaaaccaccaatcctcatgactctctgcattgcgcgaatcctccacatgcgcaaacagtccggtctctgcatcttcgagggtggattggagggctgcgagggactctgcgtctcgagtgcgttgttggatcttttcgaactccttctccagataattgagggaacggaaagaaatttgaggctgtcgagcacgccacgctttcattgcggcggcaacgatacactccgccttcagacaaaatacagtttcgcgcaggctttcaggcatgtcagggacctcgtcagggtcgtgtatctcggcccacagcttgatggcggccgatttggcagacacacacatcttatcaggatcgatgtagtcgtctttatcgtcttcatcatcatcttcatcccgggagtctatctctaggagggcgtctctccacttgttgtccagaataagcttgaactcggtgtggtcgaataaaaaccgcatctcgtgcatcgacttggcgatgtccaccaggtttcccacggccaggtcaatgaaggtgcagcacaaacgcgaatccgtacgaagattgcacccacgctctttcaaggcgcgctcgagagtgagcatgcggttgctcgccccaatgatggtcgcggtagccctcgcgacccctccacctctcccggaattcacgtaagcgtcacgggccatgctcgccgcaaaataaaattctgaaaacacgcgcgagtccacaatggacaactccgccaatgtactcgacaacaatacctcgcgcttcgatcatttgaagatagtggggatgtctcctgcttctcgagcgcaacacgagacacgtcgcggacactgtaaagaagcttgggtgtcgctgatttgtacacgagttcgcaacgcagcgtcgagaggtccctctcggttacgcgatactcagacttggccttcgacacacagatgcgagcgtagcgcatagccctcatttcggaacggaatttggcagacaagatgcacccgcgagggggtcgagagacatcttcagcctctttcaacctcctccacaatgctgctttgacaccggaaaccctcaggccacgatcgcgacacgccttcttgagaacattcaccttgcttgtctctgtaagaccctcatcggtaatacgcatcctctcgaacgctgcatcgttcacgaggagtccatcgggctccaacttctcttgcaaacgctaacgaactcgaacgctaagttgcccaccaacatgaggctcgcggcgtcctttgagacatcgcataagcgacggtacttagcatcgctctttgagatatgagacgcgatgatgtagagtgggccttcagggagcagttccatgttttgttaacatggaatcaaaacgtgttctatgtgtataacgtgttcaacgacactttatacaacaaattaagacttggacatgttgtgtgacatttttatcaaaatcatacagttgttctcaaataattttgggacactcagtataatttgaatgatatcccctgaaaccaggtacaggtccgtggttcactacaaatattttttgaggagtctcatgaaggtttgtaatatatacaacgtgtccaagagctcactacatagatgggtcaatgctgatcaggtgggtaaaagtaagcgtttaaaacgaaaaaggaaagaattgtccatgcttttacgttccacgatatccaataatattgcagagaaccccttcataacatgcaaggatttggtcggtataatttgcaagagttgtaatgtgagattatcgatcagtacggcatcgagacacataaaacaatgtggattttctaggaagaaggcgtttcccacagttctctacggacattcaaaagaaaatgtagaaatgttttgtgacaagtacagagaaagctctaccgttgtttgtatcgacgaagcaggattttacgctggcgaacacagcaaatatggatacagcaagatcggttcttgattaactacgaagacaatgagtaacctccgtcgtgtgaagttcactttattactcgctatttcatctcagagaataatagattatcagttattggagcacaattgtaaaaaagaagatttcattaaattctttaaaactttggtcatcccaaagaacaccacgatcgtcatggataatattcggtttcaccattcttcagaaataaaggatatccgaatgcaaagggtggaagcttttgtacacccctccttattgccccagagctaatgcgattgaacaaatatttggaagcatgaagagagactacagggcatcatgtccattgacgtcaacctgtaatttcgattacttaatgcaaatatgttgtgcacctgggcgagcgatttgtgtggtcaagatgaaattgagtacctttattccccatgattggcttcgtaaaaagatagacacactggtactggacatgaacaagttgcttggagagggttatattttcgcaaatttccacattgctcgtctttttgagaatggtatcgttgtccctcctgtaaatcgcaacttcttctaccggtgccttattgcagtcagtaccaacaaatgtaagggttcgactcttggcgaagacttcgagagtagtcggcttctgttcgacttgttaagagagccggggcaatccaaagttgacattcgggggaacgtgaagaaccagatcattgcagacctgtctattctcatggccacaatggcctctaaccatctttggaccaaccttgagcgacgcataacgacttacttgaagtggaagtacccacagattgcaaagcgcctgcggtcggacatcgtggctgcagtgatcaagtgccctacaaagaatctcgacgtcatcttcaagatgagccctcatacaaccaagctaccaaccaagctgccaacagctagacttcgatcggcaaaaagtgcagttgctcttgcgaagaagagggtcggtaggaaggaaccagaaggatcccctttgcgtgttaggttgactgaacttcaagagaggcttgaaaagttgagcgaagcttggctctcctcgaagaaccttagggtggacgcagataacgcgaaacgcttctttgcacgcgacgtggcattctgtctaggggggttctacctttaccatccggaaacacttttgcgtctcgggctcacatgaccctgcctctgtaccacaagatattgtcggagaccatcgaagaaaaacgaaaaactaaaaacgaaaaacatcgcacattctcgttgttgccttacaaatctggattcactctgtcgcacattccgatttcgaaaatggcctttttctatatggtcaacgagtgccacttcgattcatgcaaggcagacgttgcttccaaaaaccatcaaggaatatgggagcgcttcgcaaacctcaagaaagtggagacagtttctcggaagttcggttaccgcattgtgacagacggctttgcagtcagcatcttgatgaataagcctacgtgtctgacatgttcgatgcctgcagacgcgttctctacgcaggcgcatgagtatgtgacaacagacgagggtggcattgtatccttccttgacaatgtggtcgtggctgcggtagacccgggtgttactgatatcgtgactgtaacaggactcaacggaggtaccagatcgtacagctcggcgcaatattatcgcaagggtctgatcttcaagtctcagcgtcaaactgacgtttggaacctcgagacggctgatatcgtcggtggtatcattccggatagagactcttcgagttctgaacagattggtgcgtacgccagattctacatgggtgccgccccaatccttcttgcccatcgtgcttccagggggtaccgaaacctccgctttcgcaggtactgcaagaaacagaaactcattgttgagattgctgacttcgtagctccgagagagaagagcgctaaggtactcgtcgggtttggtgattggaaaggtctgggggcgacgccaatctctaggcggacttgtggccctctccaagctattcgtttcgagcttcgtagccgagaaaacgtcatcatggaggacatcgatgagttcagaaaacgtcatcgtcggtatttagtacttctttgagggtcgtttgaaacaaagaaaatcctgtttgaattgttcgtttgattcattcttagattcaatcggagataaccttgattcaatcgatctttgtttcctgtttgaatcagtcggccatcaaacctaccgattgagatccgtttgaaacaaggttggttgtttcaaacatgactcaaaccatgttcaaatagatcttaatcaagccgtcatcaacgtgccccttgaaaaaggtttgaaacaaggttggttgtttcaaacatgactcaaaccatgttcaaatagatctgtttttttgtaaagcaatgcaagcactgaagactgagggcgcatatttggacagcaggactcttcgatctttgttacagaaattgaaagcaccataatgaatgaatccttagatagttaaacatgatagtaattagtaattgaagagctagatatatatgctactaaggaagtgcagttggccacgaagtagttcctcaggtacgaattgacgaaactccagcatgctgtgcttcttgttcatcaacgacatcgtcttcagcctcaaggtcataagcatccaggcgttctgacgcgagaccagtcgcaagagtgagacctgcagacaaatgttcgttggtgagcgttagttgagatacattggcagcaatgcgcattcttccgactttcaaatagcagccatggttcaaaccaaattcgctatctgaatgcgcacctgttttgcacctcgagcattggaactcttgcggctccatgatgagctggacgataggtcgacttgctgcagctgccttaatgcctgcggaacaactcgaaaaagcgagtcagtcaaagttgagacaaattctggtcaagtaaggcaccacttgacgagacgcaaaacgcagtaccttaaccgcacgcgcgggggcggagaagcaggtcgctacagtcttgggttgaagcacaacaattcccaaagcaaagtaccgctgaagcaaagtgctcgcgcgtgtaggtattgacggatctcagaagtaattcgggaatggctgaagctatgaaagcaagctcagtccaagttaattcaaggaaagcaggcagcatgtcgctatctgactgcgcacctgtttcacacctcgagcattggaactcttgcggctccatgataggtcattttgctgcagctgccttaatgcctgcgacacaactctggtcaagtaaggcaccacttgacgaaacgaaaaatgcagtaccttaaccgcacgcgccggcgtgggcggagaagaaggtcgctacattcttgagttgaagcacaaccattcccaaagcaaagtgccgcggaagcaaagtgctcgcgcgtgtaggtattgacggatctaggaagcaattcgggaatggctgaagctatgaatagatcagtccaagttaattcaaggaaagcaggcagcatggtgcgctattctgcaggaatatcgctgagtcgagaaccaattgacgcgcagtgaacagtgaaagcttgcacagctgctaagttgaagcgctaacccattgcgctgaccagtttgaactgtacagcatgcagtaacgccgtaaccgcacgcgcatgggcggagaagcaggtcgccatatttgaatcggattctcggggcctgcgcctgcggtgcatgcgggatctgcgtcgcaggacctagacaaccctgatgggggtcatgctaatcaaacctgatgaacaatgggggataatgatcccgaaacttctcatgtacccaaatatgattattccgattctggaaaacaaaatatcataaccagattcaaagggacgaggaagttctgagcttagagaactggttacacatccgcgcctttcgaacagcgaccagttgggaccctgcacaccagtaggctatcctccactatgataatggtttctaaacttctcatgtacctatatatgattaattagattcaggaaaacaaaagatcataaccagattcgaagggacgaggaagttctgagcttagagaactggttacagatccgtgcctttcgaacggcgaccaggtgggaccctgcacgccagtaggctatcctacacctagataatggtttctaaacttcttaggtacctatatatgattatatcgattcaggaaaacaaaatatcataaccagaatcgaagggacggggaagttctgagcttagagaactagttacagatccgcgcctttcgaacagctaccagttgggaccctgcacgccagtaggctatcctacactacgataatggtttctaaacttcttaggtacctatatctgataaattagattcaggtaaacaaaatgtcataaccagattcgaagggacggggaagttctgagcttagagaactggttacagatccgcgcctttcgaacagcgcagatcggtaactactgatttaaactcagaagttcctcgttccttcgaatctgcttctgatctttggttttcctgaatcggactgatcacatataggcacctgacaagttcagggaccattttccaactgtaggatagtttatggggttcaggatctcaactggttacggtttaaagagcgcagatcggtaactactgatgtaaactcagaacttcctcgttccttcgaatctgcttctgatctttggttttcctgaatcggactgatcacatataggtacctgacaagttcagggaccattttcctactgtaggatagtttatggggttcaggatctcaactggttacggtttaaacagcgcagatcggtaactactgatttaaactcagaacttcctcgttccttcgaatctgcttctgatctttggttttcctgaatcggactgatcacatgtaggcacctgacaagttcagggaccattttcctactgtaggatagtttatggggttcaggatctcaactggttacggtttaaagagcgcagatcggtaactactgatgtaaactcagaacttcctcgttccttcgaatctgcttctgatctttggttttcctgaatcggactgatcacatataggtacctgacaagttcagggaccattttcctactgtaggatattctatgggggtcaggatctcaactggttacggtttaaacagcgcagatcggtaactactgatttgaactcagaacttcctcgttccttcgaatctgcttctgatctttggttttcctgaatcggactgatcacatataggtacctgacaagttcagggaccattttcctactgtaggatagtctatggggttcaggatctcaactggttacggtttaaacagcgcagatcggtaactactgatttgaactcagaacttcctcgttccttcgaatctgcttctgatctttggttttcctgaatcggactgatcccatatgggtacctgacaagttcagggaccattttcctactgtaggatagtctttgggggtatgttataaacatgttttattacattgatgacctctttgacatatattccaaagcatcccttattcatatctaagtctatgtaacttaaaggaagtacggtatgcaaagatttgaatagttattcattaaataatgcagttgtattcactgctgaaattgggccgaaatacctacggttaataagcaatatagacccttgtgctaaccgtatattccctttcctacccttgctggcccttcaccgttggttcctctcttccctgttccaataaatccgggacgcgaactgttgtagtgctagctggactgttgttccaagcaaccgtgtaccatactcctgtccggctctcagctgtccccgcgcccagtagaagatccctggcaacggagcccacgcacgccaaacccctgaacccacaaactgaaccggccaagtgcaattcgagccaccagattgtaaactcgcattctgaacgctacgctacgatcctcctcttcctctttttttcttcacttcgactggagacaactactaacgaggcaacgatcacaaggcatacatgcatcggtgcgcagccctggtcgccaactgcatcttggccttgtgatcgttgcctcgttagtgcaagctgctcctcgtagttacacgaggctagttcgacaaattgtacaagatttcggaaattacagaatccaagcaggggcaaatttggcccttcaggaagcgacagaggcctacttggtgggcctcttcgagaacactaatctggcggctatacatgccaagcgggtaaccattatgcccaaggatatgcaggtgcgctatctacaggggttgggggtggggtggggggtgggtgggcggggtgtggggtaagagttggatccacacaaaatatgctgcagcttctgggcagatccctaggtgggcagttggcctttggtaaaaatatgctgcagctgctgggacccgtacacgacaaaacacaacagtacactacactacactacacaacagtacacaacactatacaacactacacaacactacacaacactacacaacactatagaacaagggggttgggagggggatgggggggggggggggggggggggggggggactgagctacttgaaacactcactcattcactaactttgatgtctgtttccacttgcagctcgctcggaggattcgaggggagcgaaactaggacttggcaagaagttgtggtgagttatgctttcatgcctgaaccaccctcatgtaacaacttaatgaatgcatgttacttatcaataatatcataatatggcttagctgaacctacccatacagtagcccgataagcgcccttgaggctgcttgctacagaatgggcgggagatacgatttgccttgtatggtatgcctgaaccaccctcatgtaacaacttaattaatgcatgttacttatcaataatatcagaatatggcttagctgaacctacccatactgtagcccgataagcgcccttgaggctgcttgctacagaatgggcgggagatgcgatttgccttgtatggtatgcctgaaccaccctcatgtaacaactcgattaatgcatgttacttatcaataatatcagaatatggcttagctgaacctacccatactgtagcccgataagcgcccttgaggctgcttgctacagaatgggcgggagatgcgatttgctttgtatggtatgcctgaaccaccctcatgtaacaactcgattaatgcatgttacttatcaataatatcagaatatggcttagctgcacctgcccattatgtagccgcataagcgcccttgaggctgcttgctacagaatgggcgggagatgcgatttgccttgtatggtatgcctgaaccaccctcatgtaacaacttaattaatgcatgtcagtaataaaaaaatatggcttagctgcacctgcccattatgtagccgcataagcgcccttgaggctgcttgctacaaaatgggtggtcaatgcgtttagccatgtatgcatccaccaccctctgcacacacttaagtcaccaacatgataagtgcagcacattctaagcagcattatcttactcattctaatgtttttcccttgcaggtcattcatgaatgctggctgttgggagcaagtaaaggacgaatatgcagtagtggagctgcctggaagctgccatcatgtggtgccaagcttagccaatgggatattaaggcatgttagtgccctgaatatatagtagcatggagcagtaatcatagggtgactttagtttgggttttgtttatgagggtttaaaggtactgcctgtccttgttgaccaggacaggcagtacctttaaaccctcatacaaaaaacccaaaaatttaatttgaaatttcaagcacagcagtagataggccaattatcccttccaccaccttggacaatagccgggcctggtagttgacaatatacagccttcttgtgcgatacccacgagagcactgtattgtattcatcaattgtgcgatacccacaacgatgaatactttccctacaactgaattagacctaacttccagccagctccattaggttgtacagcttccagctagctccttaggttgtagaacttccagccagcttcaatagactttcactttgtgtgacaggttgtacagcttctagccagatccattaggttgtacagcttccagccagctgcattaggttgtacagcttctagccagctccattaggttgtagagcttccagccagctccattagactttcacttgtgtggcaggttgtaaagcttccagccagctccataagactttcactttgtgtgccaggttgtatagcttccagccagctccattaggctgtctctctgtatattaggttgttgtgtagcttcgagccagctaagccgtcctcagcaggaaaattaaatatatgacaccaatttgttttctggcattatatttgtttcctttcttgtaaaagtttctttcctaccattgtccaaagtgcgagtacttaaacacgcacacacaccctacttgggctgtttccaaactcctacattcaacttcaacttggttacatagccagacttcaacttggttacatagccagacttcaacttggttacgtagccagacttcaacttggtttacatagccagacttcaacttggttacatagccagttgtgacacttgagattacagccatcatcttgctagcacctacaccccaccctagatttttgtctagccaatgaaagcacaaactaatgtactacaaggtacggatttgtgccggttatcgctaggcgctcgcccgcctcggattcaaagcttcctacctctcggcagcctacatatgggagcttagctacatttcgaagtgcaatatcttcgaccaccttgaattccgtttgatattgtcttgattgacttccgtctgattcaatgaataagctgcttgaattgaatcactgattcaaactgttttcaaggtaccctgattcaaggggaaaaccgcttgataggggttcattgattcaaaccagttgattcaaacgatttcaaaggtctgcctaaataccggcgatcatggaggacatctcaacgatgcagctgctgtgagaaccacctttgcaacatggtggcactcactcatcgtaagaagcaagacggtacaggttgggaatgtacagaaggacgcaagcggattcataagattctccactgcaaaagcagtcaaagcggagcgccacgccaacagagcggtggtatgcttcactgcgggaagacttgggaccgcgatgtgaacgcttccgggaacatcctgatgcttacacttcaccaagtctttgggagagagcgtcctctcgcgtttagccgagacgcgccgagaagttcctcgacaaccccacccccaccccctgatactgatatggggacacagacggttgaacggtttaccaaagaggctactcggaatatcttcgagaacctcttcaacctgctgcaccccccaacgttgcacaaaagcaacgatctgcagtctggatgattataaggtgtcccactttatttgagaacaactgtagactgtataccacaaaataccattcacgttcacagcgacgtttcccttggtcgtcaaagacgagttcaagaaggttgaaacagttgcctcgtttgcgcgtttcagacaccggtctctgcggagctcaaggcccacctggccgagatgatcacatcgaactacttgggtacctgttcatcaacgggctcccgacaaggtcttacttttaagaaacggcaagccccgtcaatgacacgtggccctcgaggggtcaatgtgtaataaaggcaagcaatgcttgaaaatcataatttgtcaaaattatttgaaaacacttgtgtatgagtgcacgatgagcgaagcgcagaggaatgttttcattaaggtttacttcgacctccagaagttcattttcagcaacaagatcatcgtcgctgccgccggattctctatcgccgtggctaccaacgacgcagtaaagaaactgctcaactccattatcctcccattgttcgatttcataaacaatatctccttcgtgagaaaagccctcggtgtgaagatcatctcgatcatattcggtatcatggggacgttgatcatgtggatgctcactatactgctttgctttgtcctgcttgaatactttttgaacaagtctatattcggtatggttacgacgatatccgaagaccacaagacagaattcgtcaaagccaaggaggaggccaagagaaacgataccatttcaaagaaagtagaaaacatcaaaaatgaggaaaatatggttgacgaaatccttaaaatgtcaaagaaagatgacaaaccggtcaaagatattatacgacaagaaatgcacgatgacctcagcaagaagacacaacaaaaacaaaaacaaaaacatgaagaacaacgtaaacagtctcaatattgggatgatgggtcgtacatgcttgtgtaaaaccatctatataatgggcgttcctgcctaccggcagatttttttaaatttctaatcaggatttagagcctccgggacgaatcactagcttgagacatcagcaccaaggaatcacaaatccgctccagaccatgtttcgcaaccagtcaaaatccgccggtaggcagaaacgcccattctgtcttggcaacgatacagcactccgccttcatacaaaagacagttgaacgcaagactcgtacatgtaaaactggttcatgtggtttgttcaacgacatcgcatgtaaatatcgatactaaattcaaaaattcaaaaaatcattgcaaaagatagagtgtaaagccatattttgcaatctggattgtatcgttttgttcattctccctgtgttgtatcgtcgttacattacattacattacatgttaaagtctacttgacaccgcgagggtgtatgagactctgtgctttaaacaaaaagaaaaagcacc

SEQ ID NO: 159 - DNA, 20921 bp, Chlamydomonas sp.
  source 1..20921: mol_type = other DNA
atgggtcagttagcagcttacaattgttatcctctgggccagcttaaatgctgaaatacgggatgaaggacacgaaggattgggaacttgatacaaaacctttagctgacctacccaatcaattgggttcaagggtcaccggtaagggtgtcccacaaattctgtctctgactgtaggccatcaaattgaatgtacagaggacaccaaattcaatatagattcgaatggtgttgttccaccatggataatagcaagttggtgaaccgggaccattacagaggtacgtagcgcataattacaagctggcatgaacgcagtgtcgagcgtagtgagaagacaaaacacatacagtcggactttggggactcgggataaactcaccaagattggatgtcatcaactaccaaggctgctccgaacaatgaagtaccacgcactcgagggatgcagcctttatagcttttcagctttcctcccacctagagacttattagagtccctgagtattctgggttgacttgggcatgttgcctgtgttacgaaaaaatggagcataaatcagtcagtcaggaaggcagtgcagcagcagcatctaacaactatcctgtaagctagatccgaccagctcaactcgatatagcatcctgtaagctatcgaacactcgcgacagtgcaggaaggcagtgcagcagcagcatctaacaactatcctgtaagctagatcccaccagctcaactcgatatagcatcctgtaagctatcgaacactcgcgacagtacaggaaggcagtgcagcagcagcatctaacaactatcctgtaagctagatccgaccagctcaactcgatatagcatcctgtaagctatcgaacactcgcgacagtacaggaaggcagtgcatcagcagcatctaacaactatcctgtaagctagatccgaccagctcaactcgatatagcatcctgtaagctatcgaaaactcgcgacagtgcaggaaggcagtgcagcagcaacatctaacaactatcctgtaagctagatccgacaagctcaactcgatatagcatcctgtaagctatcgaacactcgcgacagtgcaggaaggcagtgcagcagcagcatctaacaactatcctgtaagctatatccgacaagctcaactcgatatagcatcctgtaagctatcgaaaactcgcgacagtgcaggaaggcagtgcagctgcagcatctaacaactatcctgtaagctatatccgaccaacttcacctggttggttgaacaaacgcgattgattgagcgagcaaaagcacttcctgagcaattagcgaacaggcgatgcaactcgtcgcgaaatcctggaagcttccgaatttccaagaattgagtggtaaccagcgaaagatgtggtgcttcctcgctgcaccgagcatataaaccgactaaacccttatcatgtttcagctgaagatcgcgacgttccacacattttggttacatttcaggtaacatttgcggtatgtctatcctgtgacaggtcacctttcaccgatgcgagtgtttgcggtcagccagctgtaaccaggtcagatccgacacgtgtttctgcgagtccgcagctgaattcccatgccccacaccgtgtgtcccgacatatattgtcaagcagaggtctgcttgagacacgtgtcccccatgatgcgcccatgaaaatacgagtgtaaaccgacatgtcatcagatctgccacgtgtttttcgcgcgcctcgaatcttcacacgagtccgcagctgaattccagttccccactcctcgagaccaagtgtcgtctcaagcaggcttctgcttgacaacactatgggaattctgaagggagaccgcatgcccacggagtggggcagtggaatcttctgcttcccaacagttatagaatttacaggttatattttgggtattctttcatacaatgataattagggggtttaaagaaatatagagtctatggtttaatcgatttacacaagatacagaacacaatacagttaaaaaatagaagagccattcattgcaagtacaatttagatacaaaatatgaagtatatgtgatgtgtttagaaacgagatgtccttgatacttcctggattgattgttggcgggttccatgaatcttttgaccgtgatcttctcaccacccacaacgtcacacatattttgaacgttgctacggaatgcaatgtaacggaacgcgtggggctaatatatgctaaagttgatatgccggatgattgcccatcaactgatatttctgttgcgtttagcaaatgcatggatttcataattgcagctcatcaaaaaaaaagttgtgtgtttgtgcactgccttgagggggttagtcgctctgtttgtgtgacgctgtgttatatggtccaacatgttggatggaagtttgagcatgcatttatgcatatacgttcccgaagaccgcatgtcgatcctttcccaaaatacattgctcagacgcgcaattacctcgtgcaaaagcgcgaggagagcaaaagaagcctcatcatcacaatcgatcacgacaatccggtcgagcaaaatgctctctctcaggatgcaacaaaaacaatctgatggagagtgaggtatgtcttaaagtatgcgtgatcagctgtggcaatcatgaatgacatacctggtctccacagttgtcaagcgagtatacagttgttctcaaataattttgggacactcagtataatttgaatgatatcccttgaaaccaggtacaggtccgtggttcactacaaatattttttgaggagtctcaggaaggtttgtaatatatacaacgtgtccaagagctcactacatagatgggtcaatgctgatcaggttggtaaaagtaagcgtttaaaacgaaaaaggaaagaattgtccatgcttttacgttccacgatatccaataatattgcagagaaccccttcataacatgcaaggatttggtcggtataatttgcaagagttgtaatgtgagattatcgatcagtactgcatcgagacacataaaacaatgtggattttctaggaagaaggcgtttcccacagttctctacggacattcaaaagaaaatgtagaaatgttttgtgacaagtacagagaaagctctaacgttgtttgtatcgacgaagcaggattttacgctggagaacacagcaaatatggatacagcaagatcggttctcgattaactacgaagacaatgagtaacctccgtcgtgtgaagttcactttattactcgctatttcatctcagggaataatagattatcagttattggagcacaattgtaaaaaagaagatttcattaaattctttaaaactttggtcatcccaaagaaaaccacgatcgtaaccaaatggtgtagcaacccacggggcagtggaacaccaatacgattttgaatcaacaaattgcagggtgttaacgagaatatcgtggttcttttttagatcacggctctccatcctgcagactccgtatcgttcttttgtcggtactttcgagagtgtccattgaaggaccagccgcacttaagcgatcgactcttccccggtaccgtggcccaaaagaacacggggtctttgttgatgtgcaatgcgtcatgaaaggaggtttcttttctggacgggccattttgtaggaccatccactcgtacactataatgtctgtcgacgccttataccgtttattgggatgtttcattttactgttccgccgactgtaggtagggttttgaccccttcagaattattagagaatataatggaataacagggttttcagagcggagaagattattagagaatattgcaaacgcctgtgtcagatggtaataatatatttgagttcgcactcaattgcccccaatcccatggattatcggggtttgtttgaacaatgtcaaaggtgatgtttgggggaatcccaaattctgaagcgactgatgttcgtaaacacataagttttaaacacaattcagaaaccattcttaacgccaattttctaacggcgatgtcgtacatttattattacattttttatttatttccatctgatatatgtttcatgtttcattttactgttcagctgactgtagcggttgcaccaattgcgcttttcatatacctccaccgtcgtgacgaggcctatcgtgacgatgcctatcgtgctaaggcccgtgctgacaatgcagctactgcccgtcgtgaggctgaggcccgtgctgacaatgaagctactgcccgtcgtgaggctgaggcccgtgctgacaatgaagctactgcccgttgtgcggaagctgctgcccgtcgtgaggctgaggcccgtgctgatgagtctgaggaccatctcaggcaaaagttgttgtcgttatcgcctgatgacgtcgctgctatgactcctgaacacgtttcggagtatatgaaggcgtgtgcctcggttggggtatcagcatttcatttggatcagccggtattgtgataattgtttttttaaatacatacatgtcacacaatcacccacccccgcagcacatctcctcgcatggtttgtcaaggcagcactgaatcctcggaggagccctgtgggttactgaatgtgagagggggggtgggattgcttgaaaatttcacgtttttcagcaaggaactgatgggggacgtggaggttgcaacacgatttgaggagcggcacctccaatatcagaggaagacacaactctacaacaacctttctcgcatacatgaatgatttgaacttcataaccaataattttgagaactttccatttccagcaaaaccatgtcacagttaagtcattggtgatggcatctattaggctcaggcttcggacgggtttcgtgtttttttccatcaacacacgtaattctcgttcatattcttcttggaacattttgacctttcaatatcaaggaagatattcctttatattccaactcgggatcatgtctccaccaagaccagcaggaatgatgatgtcaccattaggaatgttatttcagtgatcagcaagaagtgccgccgtgtgagaatggacaaggatgatgctgactgtgtaataatgtaattcgtcactgtttcggcatgacaactctcagattggtttcagaatggggagcgcgggcagattggattgtattggattcatttgatgactcgcttgaatttattcaatatactgtaacattattgaccggtctgactgaaacgcttgggactttcactgaaacgcttgggaggggggatgtttcattttactgttccgccgactgtaaatgggcgttcctgcctcccggccgattttgactggttgcgaaacatggtatggagcggatttgtgattcctttgtgctgatgtctcaagctagagagtcgttcaggaggctctaaatcctgattagaaatttaaaaaaatcggccgggaggcagatacgcacatttgtagcaaaattttaaaaagaaaaggatatagaattgaacaacatcagacaaagaagggagcttccattttgcagggatgcgtgttgttgatgaggtgtaccgtacactcccaaaagcggtttcattttagtattccgtcgagtgcaggaatcgatcaatgcttggtcaaccacaacgggtcgccatgaattcatttgattgaccgaaaaaatgtatgaagaatgcctgagaatgtctcacatcaatcaatccctattttaaacgtgttcacatgaacacctctgaaaagactctccatcttgggaacaacaattatttcaacaaacaataagaatcatcaaccaatccctattttaaacgtgttcacatgaacacggtctgagtgtaacgtgtcaggagtgagacgtgggccgggtcgtagtagccaatatgccatgtgaatttccgtgtcttcccgccaaactgcaacgcctcgcgtatgaattgtagcgttccaatgggatccgtttggtggcttattttttgccggacggacggtgtggatgcaacagttttccacagttttgcccgtctccctcgagccatgaaaacaacctctacgtcccctcactcctctgccttgccaggcagaacactgctgcctgaaattccctcttctgctcgggtgtcatgttgcgccagacgatggtcaatccatgagggttgatcaacaaaatgctcagggcgttgctggcaaacaccccagacagcccaccgaagtagaacccggatgctggcagcaacaggctagcaataagcttcaacaccgtgggtgccgtatcatccgatatctgcatttcctcttttacactctctattacaacacgggaaaacatcacccacgcatcctccattgatgctggctgtagcgggggcgtgtgttggcggtcatacgcttcacgcttgtcaggatcactcaacgcttcgtaagccgcgcacaacattttgaaacgctcctgagcagcatcccgttggctgtcaggagatgttgcccatttgtccggatgccatttcagagctgcttgccggtatgctcgccgaatctcctctgtcgttgcagtgtctgctgccacccccaacaattcatagtggctgctgaccacgatggcctgcgttgggcatttattgatgtataataatgcccctcctgcaaaccatttttcgaaggattctggagcacgcatgattggtgtgatgtacatgattcactgcatacagtcaatgacattgaatcccgggacaggttgacgcactgtgttgacatcttgtcgcgtttgttgctctcacacactcactcactcttgcgcgggtcatcatcgattcaatggtcgggtacacgaagtccacaatgtcgtccacatccgcacatttggggaggaaaatcgtattctcggtgcctgcgtttgatggcgtggagaagcgcaccacaatgagcgaaattctcctgcttttcattatgcgcacgactccgtttgaaggccccccgccgaaatccagatctcaggatcgaccatattgaacttcgccatttgtttctcgattgagatggccaagtattaaattacattttttattcattcacgatcccctgaatcttgaccaccatgatgtcgtcatctccgttgtttgtcagtcaccactcccatcgagagagtttagggttaacccatcaatcaatccagtgtgtctcatgcatgtgaactgtgggctcccctccggtcgcccacccgctcggttcctcgcggactcctttgtgggggctcccctccggtcgcccccggtcgctccgctgggggataggtgaaaggggctccgccgcttgtttagtgtgatacggttctcctccaattgttggcaacaatataccatgtttcgcaaccagtcaaaatcggccgggatgcagtaacgcccattccaagtcagcgaccattcttaacgccaattttctaacggcgatgtcgtacatttatttccatctgatatatgtttcattttactgttccgcctactgtagtgttcattcggggcggaaaaaagtgtacacatatgtatatagcatggtagagcacattattacatgtagtgatttgaaaacagtaggcgagcggatcgaacacatagtaaatgagatggcttctttatatgaagcgacaggcgtggagtatttcaaagcccatgcatcaggatggtcccaatgggtgtggatgttacaagatagcaagcgccgagagtggcagatcacataccctggggatcctcagggggtgtggaattcaccaaaagaccggttgtaatgagaaagataactgataacaaagcacataagtgttccaaacgtgttcaaaacaacccataataattttatcagtgaggttgccgaatgctaaggaaatcatatcagacacgtgcgtctttgtttcattcggtatgtagttcaaacggtacggtaccggggaagagtcgatcgcttaagtgcggctggtccttcaatggacactctcgaaagtaccgacaaaagaacgatacggagtctgcaggatggagagccgtgatctaaaaaagaaccacgatattctcgttaacatcctgcaatttgttgattcaaaatcgtattggtgttccactgccccgtgggttgctacaccatttggttacaccgtaaggtgtgccgtacactccagaaaacggtttcattttagtattccgtcaagtgtagtgcattggttcttccatgtcatacaaacgctctttgtgttcccctggaattcggccgggaggtaggaacgcccattacttcatgattcttttaaaatgatgagcagaagctaatcaacatcgtgattgttatggtccacatgatgcctgcgcaaatttgaggtaacttctgtttttttgtcatggcaatccatgtgatgatcacacttgtcgaaaccaaccatgctaacatggacaaggcttccaacatgctttgacatgcgcgtcgagcatagacaagaattagagacgaagcgaaagatattgtgataggcaacgctagatacataacgctacagtcaacggaatacttaaatgaaacatcaaaataaacggtacaaggaggcgacagacgtgtatgagtggatggtcctacaaaatggcccgtccagcaaagaaacctccttacatgacgcattgcacatcaacaaagaccccgtgttcttttgggccacggtaccggggaagaggcgatcgcttaagtgcggctggtccttcaatggacactctcgaaagtaccgacaaaagaacgataccgagtctgaaggatggagagccgtgatctaaaaaagaaccacgatattctcgttaacatcctgcaatttgttgattcaaaatcgtattggtgttccactgccccgtgggttgctacaccatttggttacaccgtaaggtgtgccgtacactccagaaaacggtttcattttagtattccgtcaagtgtaataggtcgtgtacgtgcgcatcgatgggtggtgtgcgaatgacgcgctaggctctgaccgggatcgctcttctgctctcacaatcgcaaggctgcactgcatggaattgatgggtctaggacgacctcttccatttgcccacagcagctctgttgttgttgatgaataaaaacttgtattgttgtagacaccactcggtccccctccggtgatcgcgacaacattaggttacaccgcaaggtgtaccgtacactccgtcgagtgtatgtaccatgacttggacagacggtcgattgttgtacacatgtacacattgctgcaaagtttgaggagtatgtaaaacagaaacaatggataacttcaagaagttggatacaagcatgtatgcgtgtttcacagtttcaggcagtacgtggaatggcaaaaattttattttacatggaacggtggtattcgataatgaggacgacgccaagaaatgtttagaaatactcgacctgtacaaagagacattctacttcaggcgtacatcgaacgtgatgaataagactatgttcacgtttgacggcacgacaatccacctattatctggtgacaaaattgagtacgcccagaatgctgctcgattgaagaagattgtagagatagaaaagacgtacacggcaaacgcgtgggaatacatggatccaatattgattatggacgattacgtaaggctattcgggtatcttccgctcaggaaaagggcattctggagctgcttgctgttatgtttttcgtgcagttgtatattctgtatcgatccatgctattacgaagctaaatatcatcgcacgtaggtgagctcatgcaccccccccccaacgtttttccatttccaagcctgcttgatacacacggctttcgtttgagtacatgcggttgcgtaagacccgccgccgtgcgtgtgtgaggatgcggtcgtccgctgccaactttgaggcatgacgtgttgcagcaggagtcagttatcattaaaaaataccgctttgaatacatgacagtcacatgtacattccgtcgtttgaggagtctcaggaaggtttgtaatatatacaacgtatccaagagctcactacatagatgggtcaatgctgatcaggttggtaaaagtaagcgtttaaaacgaaaaaggaaagaattgtccatgcttttacgttccacgatatccaataatattgcagagatcattccggatagagactcttcgagttctgaacagattggtgcgtacgccagattctacatgggtgccgccccaatccttcttgcccatcgtgcttccagggggtaccgaaacctccgctttcgaaggtactgcaagaaacagaaacttattgttgagattgctgacttcgtagctccgagaaagaagagcgctaaggtactcgtcgggtttggtgattggaaaggtctgggggcgacgccaatctctaggcggacttgtggccctctccaagctattcgtttcgagcttcgtagccgagaaaacgtcatcatggaggacatcgatgagttcagaacatctcaacgatgcagctgctgtgagaaccacctttgcaacatggtggcactcactcatcgtaagaagcaagacggtacaggttgggaatgtacagaaggacgaaagcggattcataagattctccactgcaaaagcagtcaaagcggagcgccacgccaacagagcggtggtatgcttcactgcgggaagacttgggaccgcgatgtgaacgttccgccgactgtaatggtctctctctgtgagtcgactcgacatgttccgccgactgtaatggtctctctctgtgagtcgactcgacatgttccgccgtgatgcgagaggtcggtcgccatgtgactcgcgctcaattctttgacaggaccaccgcatcttattgtgtacctggttcctgacaggtatgcgcaactcttttcatgtcagtactccaccaattagggatatctgtcactgccccacactccgccagtttaatggcaaaacttgaagaccacttcccgagcaggaacgtctttttcaaaacacacatgtactgccatggtgtgtagtacggatgtaagctatcgtcacatttgtgacagggtgtattcagctcctttgcatcagttcggtctagcaagttttcgagagctttcatggaatcggtcatcccccaccatgcatctgaatgttgaaccaggatccccttttgttccgactctttgtatgccctcaccagtgcatcttccacgcacctgattccaatacccatgttgctgtagataagtccatcaagcgtgtgctcttgtgatgcgtcgccactttctatgttcttcaaatagttcttgatttcgcttagctgtaataaagccattttccctcaccatatactattttccacctgaaggaaacgtagcgtggcaagtgcccaagttgagccttacgacccgactgcgacaacccaagaagaaatccagcctaaatcctgatggcatgtggcatgtaatgggcgttcctgcctcacggccgatttttttaaatttctaatcaggatttagagcctcctgaaagactcgctagcttgagacatcagcacaaaggaatcacaaatccgctccataccatgtttcgcaaccagtcaaaatcggccgggcggcaggaacgcccattgtagtacgtcaacgaagtgagtccttgaagcggtgatatgtcgtccacgtcggtgttcgaaatgtccaggtgcaccaacgaagtgagtcctgccagtggtgatatgtctttcacacgtgtgcccttcatgttcaggtgaatcaacgaagtgagtcctgccagtggtgatatgtcttccacgtcggtgcccttcatgttcaggtgaatcaacgaagcgagtcctgccagtggtgatatgtctttcacacgtgtgcccttcatgttcaggtgaatcaacgaagcgagtcctgccagcggcgatatgtcgagctccttgctccggcgacaagacgaaatggagccggacatcggtactcggtcttcgaccacacatgtgtacgacatgttcagatgaaccaacgaagtgaggccggacagtactgatatagagggtacacgtgtgccctccatgttcaggtgaagcaacgcagtgataccggacaccggtgagatgtcttcgagcttgtatttgagacgcgaaatgtcgaggtgaatcaaagaattgagggcggacagagatgataggtattccacttcggtgccctccatgttgaggtgaatcaacgaagtgagtcctgccagcggtgataggtcctgttcgcccacccgtgtgtacgccatgttcagatgaaccaactcggtgagtccggaaagcgttgatatgtcttctagtctgtttccgatatgcgaaatgttgaggtgaaccaacgcattgagtcctgaaatcgctgataatgggtgttcgtccacgtacgtgaggtgcgaaatatctaggtgaatcaacgaagtgagaccggacagcgatgatatgtcggtcacaagtgtgtgcgacatgttcaggtgcgtcaacgaagtgagtccggaaagcggtgataataggtcttcgtccacgtaggtgtgcgacatgttcaggtgcgtcaacgaagtgagtccgtacagtggcgatatgtcggtcacgtaggtgttcgatatgtccagctgaaccaacgaagtgaggacggacagcggagatatgtcttggatcttgtcttcgatagccgacattgattggtagggtacgtctttcccccgattgataccgattttcaactcttcgagcctgcaaatgcgtgataatgcgtattccaaactgttataatgtctcaggtggatccttgtgacacaccggggtgcgacgcatctccactgtttgcaaacgagaggcacttgtttgaggtgggattcgttcgaaatcgcattggctagaatgatctccaatacatcttcattgatttcgtcaaaggaactcatttgtttgtgaagtaatgggcgttcctgcctcccggccgatttttttaaatttctaatctggatttagagcctcctgaacgactcgctagcttgagacatcagcacaaaggaatcacaaatccgctccataccatgtttcgcaaccagtcaaaatcggccgggcggcaggaacgcccattaagtgtgctgtgctgatggttgtttatactgaagaatggttgtttacacttcattcgaggacgatgatccgccaccgcattcgtgtgtcatgaatggacggacggtgtggatgcgacagtttgtacgtgtacagtcagagacagaatttgtgggacacccttaccggtgacccttgaacccaattgattgggtaggtcagctaaaggttttgtatcaatgtcccaatccttcgtgtccttcatcccgtatttcagcatttaagctggcccagaggataacaattaatgggcgttcctgtctcccggccgattttttaaaatttctaatcaggatttagagcctccggaaatactcgctagcttgagacatcagcaccaatgaatcacaattctgctccataccatgtttcgcaaccagtcaaaatcggccgggaggcaggaacgcccattaattgtaagctgctaactgacccaggtgggtcggttggttgagcgcccacatttgcctctccggaagctggggttttagggggggggggggggcgagggaacacagaatacatccggtcgctccacgttatcagaagcagaagaaggttcagcagagttcacgtctaggttccaggctgtatgatgacttgacatgtttctgcaactaaattctccttcccaactccgcgagggcagagatccccccttttcggttaatcaggtgacgttccaggtccgtctcttgctgtaggagaaggaccaggtccgtgtccgtctcttctcttaggtgacgttccaggtccattcccgtgtccgggatggccgcagagacgtgctcttcgacgaacatagccacggcgtcgttcgcgttcaagtacgtcgcactggtcttctttaacgaatcgggcatatcgaacttgtactcgtatgcaaacgcgtgtagaagggtgcgtaggaactccatgcgcatcgctccgtctgccttgaatgcctctacaagccctgcgtctcgtgggaagaggaatttggcggcgtccgcctcatccgcgcccacaaaccgactgatgtagtcgagttttcgtatccgtcgttggactcccttgtcagaaccgtcgaccatcggcggggagttgcatatcatgtgtatattgtgttgcgggcggaagtgtacgatgtcgctggagtgcaagaggcggtaggtgatgccttccccaccggtcatatccttgaggactccggaatttaagacttcgtcgtggtttggctctgtgcaatacataatgcggacccccttccacgtcgcaaactctggcatcgggcgacctggatcgatgcgttgcttgcttgtcagcatttccacgtcgaatttccggatgtagtctcccaatacgatctccatgactttgaagaacttggtcttcccgttagaggcggacgcgttggcgccggcgtgtatgtgaaagagctcttgtccgctgtctccgtacagctgtctagcaaatgtgtggatgaggtattctcgttggtatatatcggggtgcatcgtgtcccagtatttccgcacgcggtctgctgattccacgcacacttcgccattgtaatcgaatcccacggacatggagaccatgtcctccggatgcccttgacggaagacgccgtttttgaggtcccacacgccgttgttgaaccctaagaggtttgggtcggcgtcgaggttcttcatgaagtccgggtcgtaaaagtactcgagcatctcttgcaggacgttattcttgaaggtcgcgtcctggaggcgcgcggtgatgtgcgctagccggtcggcgtcgagtttcttaatgaattccggtttgtaaaagtactcgagcatgtctttcagtacgttattcttgaaagtcgctgactggaggcgggcggtgatgtgcgctatgtaggcggagtcttcctttgtgctctcctcgttgctctgcatgtcgtaatcgctttgggacgctctctccctgttcatagcgataatgaagtgctctagaacaacggtggacagctcgtgcttgacgtggatcgcgtcgacgtccttcttccatcgcccgtcgaatacgtaccataatagctttccgttcgttctcgcggcggcagcgatgcggtttccaattatttttttcgcgatgcgcgcgatctcgttatgactcccgttgcacgcgacgacgtcatcatcaatgtgtatgaccatgacttttaataaaagctaagaaattggaaaagttataataaactcagttccaacagttctcttctattgtttaagtatagtttgtgtctttctggctgtgaagaggataataaggttagttaaatggtcttctgcgttgtttacaccagactggtcccgacagttgtagtgggactcagattgagatcgtggattacagactgatcaacggtggacagctcgtgcttgacttggaacttggtcgtgtgatgtgactcgactctacaggttccgccgtgatgcgagaggtcgctctgttatgtgaattgacacagattctgccgcctgatgcgagaggtcgccatgtaatgtgactcgacaggtgccaccgtgtgtcccgcgattcctctttcatactcctgacatagttgtcaagcagaattctgcttgagacgacacatcggaaacgcccaattgttacagtgatttttttacaaacaacatacacattgtgtaagacttgacagttacactcgacggaatactaaaatgaaaccgcctcctggagtgtacggtacaccttatggtgtaacctttatggtgtagcaacccacggggcagtggaacaccatcatgtttttttgtagcccatcaaccatcaataaaaacaatttcaacaattttctaacggcgatgtcgtacatttatttccatctgatatatgtttcattttactgttctgccgactgtagttatcatggacatctcttgtcccgaaagggcagctgcggcgtgaggtcagtgctcagaagacgaagtttcacgagctcgagcatacggcagacactctcagggcacaggaggtagttcctctcctcctgagttctctttcccttgacctgcacccgcttggtcacgcttggtcacgctcaccatatccagacccacggcgttcaggatcatcttcacagccttggacaccttgcgcaggtcccacccgtcgcgaacgccgcacgatgcatggctgaacagcctagcggtgttgttcacatcatgttgtagccgcagaacatctgtgttcccttgagcttttcgtcgaacaccgtcatcatattccttctctcgctcattctcgcgttccttctctcgctcaacaacggcaaagctggggggggctggcggcacgtcctcggtgccgcaatcaaggctatcgtatgtatattctgagacagacttgatagacatgtcgacgccacctgtccccacgtactggaatacgacatcggccatctcctgaaagacggcacctgaatcacctgcgtcaagttggtagtactcgtacccaacgtcgccacggggcttgactcgagggtctcctcgaaggtaccggagcaggacagtctcagactccacacaagcaagcggattaagtacgtggatttcgaagataatctttgagttcttcgggtactgagaaagtcgcttaccaaagggcttcgacgtccagcccaccttgacgacgatctcatttttctgaatgaacttgttctcaaccaacgcgtacacgaccaacttgtgcgccatgatctctgtcgagctgctcctgtacaattcgttgtgaagaaagaatctgtgaagaagacggacttcgttgcatttattgaatcattgagtttgtgcaataattcagtagcaataatcctatatattgttctcctctctcttcattcgaacacgaccgaccgacatcttcctcctttccatgagcagcatcatatttataatgaagccgccgtggcgtgcgtgagaatgatcaaaattaccgcttaatgggcgttcctgcctcccggccgattttgactggttgcgaaacatggtatggagcggatttgtgattcctttgtgctgatgtctcaagccagcgagtcgttcaggaggctctaaatcctgattagaaatttaaaaaaatcggccgggaggcaggaacgcccattgcttgacacattttcatcaccattttctaatgagtcaggttacaattagcatggtgaacagttggaagagaaacaccagtagaactacactcaaaagattgttgtattgtacacagtttacactcgacggaatactaaaatgaaaccgctttctggagtgtatgctacaccttaaggtgtagcaacccaccttgcagtggaacaccatcatgtttttttgtagcccatcatcaacaacacgcatccctgcaaaatggaagcggtctcccttgacacaacagttccatgcagtgcagccttgcgattgtgggggctgtcaatgggaggtgttagatgatggtcaacgaatgttttttgtagaggtactcctctacaccgagcatctccgcgtttgtgagttccctgtcgaaaacgatgacttctgcacaagcccaatctgacgactcgacggctacaaaatctccataatttatcgttagtcttgtagaattcccattaacaattaggttgtttcgttgtaccttgttcgacctgtaaagctgtttagtatcacatgagacaacccactcatctccatgcaaattttcttgtggagtaaaccaggtaccatgataagctaaaccactaccacctatatgaaatccagacaaccaattgttacccaaaccatcaaacatacgctttcgtattccgcctgtagagtatcgagcgagatggaagagggtgtatgtttcaggtagcacatctgctggaaaccttatacccgagccagtaccacccgatatgcatgttatagatctccccaagggatctgtagagtctccaactgttatggttcccgccctggtttcggtggcgtgcctcccgtttcctgatatatcattccaactctttgtgccgacatcccatctctctggtgtgtaccacgcgtatagcccgatcacgtccgcggggctctcgatgagccctgctccgcggaagtcggcgaatgatatgcgagtcggctcggtcgccgctaacgggatcctcgtgatggacgagatgtaattaggtgtacgagagcccctaaacaacttgtccatggcgtaaggattctcgcctgatgaccctccagggtccacgaagtcgagaatcgatttaatgctcaatgggcctagggtagggatggagtcgccgaagtgcttgatgcgcatgtaagacacgacattggaaagttgagaatctgtgagggaaaggtcgtagaaggccatctcgcgaacatctagacaactataactagaactactagtggatttagcgatcgaattgtcagtggtagtgcgcgacgagtaatttgtgatagttccatttccagtgactttgttatccaataggtatgaagacggatctataaatgcttccactaggttcgcacttggaatcctcaacacaaggagcatccatgacccataagtgaaattttgatgagaagttgatatattctgggtattgcctgaataaacaagactacctaaagtgtttatgacactctgtctgtataatagaaaagaggatggcgaccccgccgatccaaaatcgaatatcctttgaaattgtttgttctcgtaaaatctcacaacgcccacgaaagtgaacccgttctggaggttccatgtttgtgtcccaagattcaaataatttccctttgaatgattagcgtcggtcgtcccgaagcgcacatacctgttgggttcattggtcctgagtttgggtagccccgcgcctccaacctcggcggtcgcgaacgagttccacgaggatacattggtgttatcaatagaaagctgtggcaattgggatgcatccaaatgaatattgcgaatggggaccttgcgaagcagcgggtcgctgaagtatttgtcgtggaggtgccctacgacatcggaaagttcagaatctgtgagagaacggtcgtagaaggccatctcgcggacgtcgagacatgcgtaggaatctgatgaccaattggatctccctatccagttgttagtgagagtgcgtgccgcgtaacttgtgatagttccagtcccagtgactttgttgtctatgaggtttgaagaaggatctttccatgtttctaggaggtttgcgttcgttacacgtatcacaatgaccatccatgaacctggaacaaaattcattgcagtgagtatttggggcgaacctcctgaaaaaacatgactaataagacgcgaaccatctggatgcgtgcaaaataaattgttgttagctataccgttaccaaaatcgaatattctttgccaactctttgattcataaatcctcagaacgcccacgaaagtgaacccgttctggaggttccatgtttgtgtcccaagattcaaataatttccctttacatgattagcgtcggtcgtcccgaagcgcacatacctgtccgtctcgtccgtcttcagtgtgggcaatccggctccgccgacctcgacggtcgcgaacgagttccattcggaaacgtctccccctcctgcgggaagctgtgacgtgtccaggtatatcttcggagccgtcagaatcaaggggtttctgaagttctgcatataatttttttacataagttctgcatacaattttttacataagttctgcatataatttttttacataagttctgtatacagttgttctaaaatatttttgggacactcttaaatgtccctagatttatacgttgaaaaaagagaatgcaaatccgaatgacacgcctgtgacgactgagatcgtcattgcgttgcgcaggatggacaccatttctttatttttcccctcttctggagagtaggaaagtgtaaataccgctgtcactcctgcggctagtactagaaactttctgaagacttcgaacgtcgtccacgaatcgtgtccgatagtgagccaacggatatttgtatatttctgatcgattttaccaaggacaaagctgataacggctactagcccgatctgcaaagcggctatgattactttaatgttctttatgttcgttttgggtaagacgtactttgcgagggagaacattacatgaataggcaagatcatagcacccacgaaccacggtacggcacggatgtctatgggattgggtacaatccatggaattttacaacaaatattgttccacttggtgcatagggattcttctgctgacttgatgataatgttaaactgtctaaacagcaaaagattaatatcattgaatggataaagcaaaaatgggggaaaaatgtggataaactgttgacgtgtatgctatcacgacatctgtgctactttggtgatgtaccctccgaaagtttcctactttttttttcattttctgcgagatgaaagaaatagatgtttttacctagaatcgcgaaaacgatcttcttgaagcacccttctacctgttcgatctcggcagacat

SEQ ID NO: 160 - DNA, 21386 bp, Chlamydomonas sp.
  source 1..21386: mol_type = other DNA
tccaatgaaattggaggctgacttctatgctgcatactcaatttctgatctagctccgtgcatgcgcccgatttgcctcgatgaggtccatgaccaacgtgttgtagcgttccgacataagagacgacggatatggggaacccttttccatccggagtcaatctgcgctcataccgagctgatattgaataacttcatacagacagtacaaaaatgggcacccccgaagacctctgaaaagactctccatctcgggaacaacactaaaaaaaaaaaaaaaaaaatgaagaatgccggaggatcacatcaatccctattttaaacgtgttcacatgaacacctctgaaaatacctgttgttgtcctgtgttgggaaaattaacaataatatggctgatctcaataagatgcatatcgataacttgttcaaagtgtgcgacaatctttacctatcagaccaagaagcagctctcaaccaccaactttgtaaaacgttgcaattcaagcttgttgtgaactgcacaaaccacacaccgtatataaaaccaaggaacccaaacacaacatacattaaggttgctgttgaagacaactgcaggcaaaaagaggtcacgaaactcatatcctatctaccatatattgttgaggtgatgcatggagtgttaagtcaaaacaatgtcgtgcttgtgcattgtaggttgggaagacaacggtctgcaacagttgttgctgcttatctgatgtgggaaagatgcattacgatgacagatgcgatcaagcacattcaaaggttgaaccccaccgcattccaaccagaagccaactttaaacggtcccttgaaatgtttgaagttcacctgaggggcaaggtcatccatggcggtgcatccttgtcccatcaagatgacaaccatgaacaagatcctcgtgaattccattgccccactactggggggcgagattcccctttcataacagttgaatccattcaagatccaagttactacactcagaccggtcaataatgttacagtatacttgcgaatgtaacataattcccttgtccgagtgtatacatagagaattggaattgattcaataacattattggaattggaattgattcaataacattattgaccgccgggatgtgtgtaattacagatttatggagacaacaaaacaactaaccgacataattgctgcctttttcgagcaatgtgagaagaagtcaggcgcatacatggattacaaaattttaaagattgcttttttgcagtacatgcacaagcattgtgttccgctgccagatcactttgacaatttttttatcactctgttgggaaaggaaggggtatcgacatatggatatgacccgacagttgtagtgggactcagattgagatcgtggattacagactgatcatgccggaaacagcaattgcacgatgttgcatcacagggcttctcggaggatgaggttacaccataaggtgtaccgtacactccagaaagcggtttcattttagtattccgtcgagtgtagcactccttcgcgctttccatgctgataattgtttagggttatattgtatatttcaaaacacgatcttcagacatggattgcttaccttaccagaatcccacgtacactgtagggtccattgtaccgtagacaacccaacaacgcacaacgacttggataagacaacaagtatcgtgggaatagtgtacgaggcttacattcacaagggatttccgatgtatggtgtgctgatgagaaagaacaatgcgtgctatgacatgaaaaaattcaagcaatcaacatcatgcttgtcaagtgatatatgttgccaacacttggatgagaaccgtatcagtcaaaatcggccgggaggcaggaacgcccagtacttgtgagtacttttgaaaaatgcaacaacacctcttgcggttgtgcattgagttgacaataaaatttcaacaaaccttttttatatttgaattatactacactcttttctgttcttaagatgggtctttttgaatttgtgtacggaacatccaagccgcagctgggttccttgcttgatggtgccacatgggataagtcagtgagtcagcagctcaattccactgtcccccctccgcgggacccgctatccccccttaagaattcccatagtattcttaagaaggagccttcttgatacaatacggtttctttggatgaccggaccatagtgaatgaggttgcgaaagacgcgacacacattaatccgcggtggtgtcttttggagacgatgacatgtttccgccgtttgcatgtggagtcagatgtttttcgatcgtcgtcgtcagtgttcctccgtttgcgggtgttcgttcgtacggaggggtggcttacgcttgaggggcaccatccagattggtatgaatgttccaaaaactcagacatctgggtgatcttaatcagatgactccgacgtctcgccaaattgtataaagggtgtcccacgaataacgtcagaacgttttgtatgaaaaatcaaatatggacaaatgtctcatggtaattcaagcatccactcaacgtgttgctgatgtggatagagttgtttcacgtgaagaatgctataatatacctgtgagtctgagcaatgagatctgtgaagacttcaaagacatagaaattaatctgcctcacatgcgaacaactggagaaccagggagattgttggtaaataaggaaagttatttcttgcaggcaatttgtaacatgagtcacacatttccatgtgacatcgaaacagccctcatatatgttgacatctttggactacatccagatgaactacacttccttcaggtttgcaataaacataaattgcatttgaacaagtatctattcacaaattagtctccttgtacctactacaaaattcattgacaagtggaactaagaactgtccacggagtttgctcctttttcttgtaaaaccaatgagttttatgaaacgttacactgttttagttgataatcgtacattgtgagtacttttgaaaaaaacaacaacgcctcttgcggttatgcattgagttgacaataaaacgattttaacaaatccttattcgtctcaaaaatgttgcttacaaattcacgtcgtcagcgaccattcttaacgccaattttctaacggcgatgtcgtacatttatttccatctgatatatgtttcattttactgttctgccgactgtagaggcaaggtctccgggtcgaccagttgttggagcttagccaccttgtggttagcagtgttcagttgccggcgcaagcgagcaatgagctcatccttttccagtacggaggtctttaactctgcgttctcctccaggacgtcccaataacagttttgcagcttagcgacttgctcgcgagtcgggggatccattgctctgcaatatcacagcaataaattcatgatgattcaaacgtatggcgcacaatcaggggggggtgtttatttgattacaggaacgctttgaaaatattattaatgctcacatcgtgagcactttgacttttcatgctactgtacatcttatttacgtgaatcgtgttacaacccattttttcttcttcgtcgaggcaccagggaatatgtcgttcaggagcccacgcgacttcgacgagctctttcttcatcatcttgttccgaagaaggatgcgcattttcgaacacgacgcctgtgtgttcgatatcgctgtctccaagtcttgcttgatcgtttgaaacttggagtgcgtatcagagtcgccgttgaaacgttcgagtgcgacagtcaacgcatcgacgatttcgtgaagacaatgcatctctacattgtcgtgcagttgtcgtttgcacagcgtgtcgaccatgacccgagggactctcacgatctgaggttcgctgtacgcaaccatgctcaatgtttcgatttcaggaactcgctccgtaagcgccaggacgtattcgaatggaaagtcatcgtcattgcacccttcctcctgcttaaatcgaaagaaaccgtgccatttggggcagaatggataagtgtacaagcgtcgatcagtggtccacatggttgacgtcttttaccagagtggagtacgcttttccgaacacagcacatttcatttatatcgttttttgaggaacgggcggcaaagatcccgtggcacaaaagaacacgggatctttgttgatgtgccctagaagtctacttgaggcggcacatctacaatgccgagacctgtatggatcaaagttgtttacactcgttttttagttgctaatctgtcaacggtagactcggtacctccagcggcgatatgtcttggatcttgtcttcgatagccgacattgattggtagggtacgtattccccccgattgacacctattttcaactctttgagcctgcaaatgcgtgataatgcgtattccaaacttttataatgtcttaggtggatccttgtgaagcaccggggtgtgacgcatctccactttccgcaaacgagcgacatcttcattgatttcgtcaaaggaactcattcgttcccctccggtcgcccacccactcggttcctcgcggactcctttatgggggctcccttccggtcgcccccggtcgctccgctgggggggaataggtgaaaggggatccgccacttgtttaatgtggtacggtggttctcatccaagtgttggcgacatatatcacttgacaagcagttttgaggttggttggttaaggatgagaacaaccgtgatgtcttttttacgccccccttgttcttcatctgccggtggaattaccactttactgtccccgctttcctcgagatacatgtggaacaaggcaacctgaaatcttcctcaaaaaacaaaacttaaattataacacgatggccaacaacatttcaagaaaaatagctttctggatagggtgcataggaatcaggacagctttcgtgattcttgcctttctcgcgacacctatgtatctaaggtacatgggcgtcttggcccttgtgccagcaatagggttctttgtcatatactttggaggccttcggaaaacggggatagaggtggcgccaggtggcgggaagatctggtggtcgaaacttcgccccgttcatggcacgttatacctattgtttgcaatccttgcgctctcccgctggcaaagacatgcatgggtcgccttggctgtcgatgtattcatcggtgtcctcgctaaactgtgtttcgttgtgggttataagtctactcgtggtattcagtaatcagtatgcaccgcgctcctccattcagattggtgcgcgctggtcctcgaattcgtcgtgaatgtgaatgaatgtatgcgcagcacatttttttattcgaaaaccagactaagataaaaggagaagcagaaaaaacacatcatacatgcagactttgggggatttatatcggtgcgtcatggctagagacaaaataataaagcattccattattatggcgtgtgcaaatatacaatcagtacaaacatttgatggcaggataatcttggctataatatgggtggatcaaattcgccgaggtgcttacatgtttgaaaataccatacttcaacttatttgcactgacgaggaaacgactcccgccgttgcatcttcaataggaattgggccctcgtttcagatggttcgtgaattacacaagacattaaacaacatgcaagaaccttctgacaaagacaaagacaaacacaaactgtatgacggagcaaaggcttggctaaaaaacatcatgggtcattggttccgttgtggatacgaattggaatggttgcattccatcaggtactcgcaagtgggccccttcccttccctttgtatctggacccctacagtcaacggaatacttaaatgaaaccgcttcgtgtacggcacaccttgcggtgtaactatttttcttgtcaaaagttgccatgtgatttatcaaagatttgaatctattgcaacaacgcaaagcctgttctttctacgcacccatcgctaataatgggcgttcctgcttcccggccgattttttttaaatttctaatcaggatttagagcctcctgaacgactcgctagcttgagacatcagcaccaaggaatcacaaatccgctgcataccatgtttcgcaaccagtcaaaatcggccgggaggcaggaacgcccatttaatcttaaagaaatccgatgtcttgtaattagaatgtctcccaataatatgaaactccaatatgaactatgtgcgcaaagcatattgggaaacttggacactgtcgattcattattccatgcgggtgctgaaccattcgaccgtgttggaggctgtggtgcattatgttacgcagcattctacgaccaccagaacatagttttaaaggttgtatgtttttggtcttcgtatacaacggacctgacaatctaccaagagccagatgttgcagaaatgattgatcttgcattattcctagctcagatgaaaaagaaccaattcatagctaattatttgaaagatattcacacacatatttgtaaatctcaaaaattctgtacccagaagaaactaaattttgaacttgtgcttcaatgcggactaggagacataatggcagttaaacggttgctcaatgatggtgcggatccatgttatcaacatggtattccattgatgtttgccatatcaaataggcatgattgcgttgtaagttgtttgatgaaacatgatgcataccatgctaaccaatcgatcttcgaaatggcattgcatttggcaaaccgtttgcataatctgagactttgtttttacatcgaaaacatcattaagaatcaataataaatgttgtcgcgaccaccggaggttggaacaggttagggtcaagcaggaacagaaacaaagcactgtcgagtcagtcacactctcatcaaggacggcagcggcacacgtcgagtcgagccactcacagggagacctctctcatctcatcaaggacggcggcggcacccgtggcttacattcgcaagtatagccactctcctcaaacttttcagcaatgtgtaaatgtgtacaacaatcgaccgtctgtccaagttgtacatagagaattggaattgattcaatatactgtaacattattgaccggtctggctgtaacatgaccaggttgcggataaacttggatgatggtgttgacccggtggacgtcggtgctgcagtggagatgctagaccaggcagtgtatgccaaggtgtcaccattggtagtgaagctgattggattcagtcaggacggaatcctagttggtcagttcagcggcttcatgcatggggaagtcatcgtggcagcaggacacatgcaggggttctgcggcaagaccctaggtagtacatcaccggctgtggcctttaaggcaaggtacccaaccgacggctttgaggaggatttggaggtcgtggccccctcacctccaggcaatgtgcctgacctcattctgttgaagggttcccgctctgccacgagcctttggtccactgatcttgaaatcatggcgtcagtgtacgcactggggtacacaggcacagagaacaagcccagttgctccaagggatcactatccagcaccatgcctggatcagtggccatcactgcacacgcagatgacgggttttcaggcggaccagtggtcgacaagcatggccgcctgctgggggtcgtgaagggcgcacttggcaccacaatcatgcgcatcggcatcacccccaactacgaccttcacacctacctgcttcaatcaggatatccaggcttgatctaagcccatgtttgcaagcaccagtggcatgatgcaggatgcctattttggacccatgtagcagagtgcataagcggtgatacacagtcaacggaatactaaactgaaaccacttcgtgtacggcacaccttacggtgtatacagttgttctcaaataattttgggacactcagtataatttgaatgatatcccttgaaaccaggtacaggtccgtggttcactacaaatattttttgaggagtctcaggaaggtttgtaatatatacaacgtgtccaagagctcactacatagatgggtcaatgctgatcaggttggtaaaagtaagcgtttaaaacgaaaaaggaaagaattgtccatgcttttacgttccacgatatccaataatattgcagagaaccccttcataacatgcaaggatttggtcggtataatttgcaagagttgtaatgtgagattatcgatcagtgctgcatcgagacacataaaacaatgtggattttctaggaagaaggcgtttcccacagttctctacggacattcaaaagaaaatgtagaaatgttttgtgacaagtacagagaaagctctaacgttgtttgtatcgacgaagcaggattttacgctggagaacacagcaaatatggatacagcaagatcggttctcgattaactacgaagacaatgagtaacctccgtcgtgtgaagttcactttattactcgctatttcatctcagggaataatagattatcagttattggagcacaattgtaaaaaagaagatttcattaaattctttaaaactttggtcatcccaaagaaaaccacgatcgtcatggataatcggtttcaccattcttcagaaatcaaggatatatccgaatgcaaagggtggaagcttttgtacacccctccttattgccccagagctaatgcgattgaacaaatatttggaagcatgaagagagactacagggcatcatgtccattgacgtcaacctgtaatttcgattacttaatgcaaatatgttgtgttctagaaatgtggaggtataaagacttgtcaaaatatatgattaatacgagagattgggttaggaatgttcgagagagcctgtctgcagatccagattacatcaaaacgttttcggggtacaatttgtgatggagaatgggatcggcgagtcatcatcgttggtacatgaggctgaccaacatgatgacgttgcagaacttgtcgattatgaaggggaggaagacggggagtgtgcacctgggcgagcgatttgtgtggtcaagatgaaattgagtacctttattccccatgattggcttcgtaacaagatagacacactggtactggacatgaacaagttgcttggagagggttacattttcgcaaatttccacattgctcgtctttttgagaatggtatcgctgtccttcctgtaaatcacaacttcttctaccggtgccttattgcagtcagtaccaacaaatgtaaggggtcgactcttggagaagacttcgagagtagtcggcttctgttcgacttgttaagagagccggggcaatccaaagttgacattcgggggagagtgaagaaccagatcattgcagacctgtctattctcatggccacaatggcctctaaccatctttggaccaaccttgagcgacgcataacgacttacttgaagtggaagtacccacagattgcaaagcgcctgcggtcggacatcgtggctgcattgatcaagtgccctacaaagaatctcgacgtcatcttcaagatgagccctcatacaacaaagctgccaaccaagcttccaacatctagacttcgatcggcaaaaagtgcagttgctcttgcgaagaagagggtcggtaggaaggaaccagaaggatcccctttgcgtgttaggttgactaaacttcaagagaggcttgaaaagttgagcgaagcttggctctcctcgaagaaccttagggtggacgcagataacgcgaaacgcttctttgcacgcgaagtggcattctgtctcaggggggttctacctttaccatccggaaacacttttgcgtctcgggctcacatgaccctgcctctgtaccacaagatattgtcggagaccatcgaagaaaaacgaaaaacgaaaaacgaaaaacgaaaaacatcgcacattctcgttgttgccttacaaatctggattcactctgtcgcacattccgatttcgaaaatggcctttttctatatggtcaacgagtgccactttaattcatgcaaggcagacgttgcttccaaaaaccatcaaggaatatgggagcgcttcgcaaacctcaagaaagtggagacagtttctcggaagttcggttaccgcattgtgacagacggctttgcagtcagcatcttgatgaataagcctacgtgtctgacatgttcgatgcctgcagacgcgttctctacgcgggcgcatgagtacgtgacaacagacgagggtggcattgtatccttccttgacaatgtggtcgtggctgcggtagacccgggtgttactgatatcgtgactgtaacaggactcaacggaggtaccagatcgtacagctcggcgaaatattatcgcaagggtctgatcttcaagtcccagcgtcaaactgacgtttggaacctcgagacggctgatatcgtcggtggtatcattccggatagagactcttcgagttctgaacagattggtgcgtacgccagattctacatgggtaccgccccaatccttcttgcccatcgtgcttccagggggtaccgaaacctccgctttcgaaggtactgcaagaaacagaaacttattgttgagattgctgacttcgtagctccgagaaagaagagcgctaaggtactcgtcgggtttggtgattggaaaggtctgggggcgacgccaatctctaggcggacttgtggccctctccaagctattcgtttcgagcttcgtagccgagaaaacgtcatcatggaggacatcgatgagttcagaacatctcaacgatgcagctgctgtgagaaccacctttgcaacatggtggcactcactcatcgtaagaagcaagacggtacaggttgggaatgtacagaaggacgcaagcggattcataagattctccactgcaaaagcagtcaaagcggagcgccacgccaacagagcggtggtatgcttcactgcgggaagacttggaaccgcgatgtgaacgcttccagaaacatcctgatgcttacacttcaccaagtctttgggagagagcgtcctctcgcgtttcgccgagacgcgccgagaagttcctcgacaaccccacccccaccccctgatactgatatggggacacagacggttgaacggtttaccaaagaggctactcggaatatcttcgagaacctcttcaaccttctgcaccccccaacgttgcccaaaagcaacgatctgcagtctggatgattataaagtgtcccactttatttgagaacaactgtagccagggtttagaatatacccctgtcttttgaggcttttgaaaagttgaccaaccgcgcgagagtcacttcctctcacgatgtccactgacgttctgttgttttctgggctaatacccggatgtttcaatctgttgaccgtccagtgcaggtatacactcatccacgctgtcgtgaatgcacctcgaacccgcacgttacatgatgagtccccaaaagtccgcgtgtatgtgttttccccgcacgcgcaagagcacacaagccgcccatgcatgcatcatcataaaataatcggagcataaagatacttgtggatctattactatctattactatctattactatctattactatctattactatctattactatctattactatctattactatctataataatgatttcagtggaaataaataaccacatctcaagacgggtcaaatgtatggaatacaagtggtattggagtttattgagctcaaaccccaatatcacatgggatatcatcgaatccaatcccaacaaaccatgggattggaactggttcagcagaaaccccaacatcacatgggagattatacaagccaacccagataaaccatgggactggtattatatcagcagaaaccctacaataacgattgatattgtcattacaacccccagtaaaccttgggattggggtgggttgagcataaaccccaacatcacatgggaaattatacaagccaacccagataaaccatgggactggtattatatcagcagaaaaccctacatcacgtgggaaatgatcgaagccaaccccgacaaaccgtggaattggtattggatcagcagaaacccatgcattaaatgggatattgtcattacaaacccagacaaaccgtgggaatggggtggattgagttcacacccgaacatcacactagatattatacaaaccaacccagataaaccatgggactggttttttatcagtaaaaaccccagtatcacatgggatattatacaagccaacccagataaaccatgggactggtttttgatcagtaaaaaccccagtatcacatgggatattatacaagccaatccagatataccatgggactggtattttatcagcagaaaaccctacatcacgtgggaaatgatcgaagccaatccagataaaccatggaactggaactggatcagcaaaaaccctgtcataacgatggatattatcgaaaccaacccagacaaaccgtggaattggggtggaatgagcgaaaaccccaacatcacgtgggagattatacaaaccaacccagataaaccatgggactggtatgagttgagcagaaaccccaatatgttgctatcttcccaagacatatgtgatctcatacgtagatacagatcagcaagaactatacaaaaaatatggcgccatgtcaatactaacccaagttataatgcatgtcaacacagactctatagagaatataatgaaatggtttaaaattaaccccgttacactcagggagaggggcgtgccgattccagaggaactaagagctcacttgacagaaaagtaattgtccgagtgtatttcctgacatgttcattatttgtaagcttgaatttccattttctcttcaaatgtaaagctcgtacggacatggattcacgcaaggtgtgccgtacacgaagcttccgttgactgtattggcgagaacgaatccgttcatgatcacatgagcgagggtcacgtttatgatggttgcgggcgttttttccgttcttcgcgcggtttatcatttcacaaatgaacgtgtggctctggctcgacgacttgtgcttcaaggaggggcgaccccgtgtgacgacacctcctcgacttgtacaggcgctttcaaggtgactttcgaagcccagcactcatcctcgatcgcttcaacacgacgatagttttcagcgacctgcaccaaatcaactttgccttccattttggcaatagtgttccgctgggttgcgaatttgatttgctgttcgctgtcctgctccaattttaatattctgcgttcaagtacttctttcttgtgcatgaaatggtcatggatggattcaatctccttttgaagctttgcatcgtagtcgacagtgccaacatcttttaatggtgttcgtttgatgcaacgacgacgaaggtaatgaggagtgatcgtgatcgctgagtgatcgttcatgtttgattacttatcccaatcatgatgcatgatgtttttatactcaataatgcaacttgcaagcagtagcagtagcaggcgggtgtatgtcctcagttgttgagtttagtgatacacctgtcccccttgcaactctgtctgaacagtgcagccaacccgataccgaatatgattgaaatgattgatgaccccgtcttggtatcgaatgctttggtaatcatgacatttcgtacgatacgaggcgaggcgatgagggacgagaatccgccaccgcatccgtgcactgaatattaatgaatggccccgacaatgaattctacagagagagattcgagtttgtatggctgtaataatctgtatggattttgcgttgtttacactcgtttttcgaggcgcacatggaacacttgtcgtagattcgttcgccatcctgttcggttgaacctgggtaggacgactcctgcatgttggggagggggattccgtattgtttgcaaagatcctcattgagacgcctgtcattatcgttcagggaattccattgctcgatagtcatgcttgacagatcgtacctcagtagcttctcaagcgcttctgcgcgctcagtctcaagctcaatctccatactattcactcgagcagcatctgccttctttcgaacgcgctcagtctcaagctcaatcttcagtcgagcattctcaagctcaatctccatactattcactcgagcattctcaagctcaatctccatactattcactcgagcagcatctgccttctttcgaacgcgctcagtctcaagctcaatcttcagtcgagccatgtaaataatagcgaaggtagagatgcagataagtagttgagaattgtcaatcattgtttataaattctgatgattgtttcttaagtcgtgtgttacgcaatctcaatctctgggccatgtactgtagtgtaccaccactccggcaaaagacatacaaagtgataaattaaaacaatgtcaacacaagttacagtcagaccggtcaataatgttacagtatattgaataaattccaattctctatgtacaacttggacagacggtcgattgttgtacacaatgccggaggctcacatcaatccctattttaaacgtgttcacatgaacacatctgaaaagactctccatctctgtatcctggggtagaaatcgaaccctgtctgatgagaatgataccatgtttatttttcacaagtaatgggcgttcctgcctcccggccgattttgactggttgcgaaacatggtatggagcggatttgtgattccttggtgcttatgtctcaaggtagcgagtcgttcaataccaatgggtggtattacaactatagtctaatttgtatttgtcttggccacttggaccaagaggctctaaatcctgattagaaatttaaaaaaatcctcaacgttgcccaaaagcaacgatctgcagtctggatgattataaggtgtgtcccactttatttgagaactactgtaaggctccaccgacacctgtatgttagtcgaatgccggccttcattccatttcccccgatccagcagttcagaaacgtcctgaaagagttgccatacatcttcggaatattgtgtataaacattgtgtatgaatgaataccaggcattaatgatgctattagcgggtaagcggccacacctattggtgtcctaccaggtatgcttgagctgcgacaaatttctccgaagggaaagcaatggggagtcatatctacaatacgaactgcctagagagggtgatgtggtgcgcaacatcacattggctggcatggggatccaacatataaagtgggtgcggatcaatataggagatgttgatgcatggacatggaaagctagcttgtcagttgtaggaaaaatccgaccgataacaattcctatagcaatcaatatgatggcgattggaaaccacacttgtgcactacagatttgtatgcatcaaaccacagacgtgttgtggatgcaactacagtatgaactgtacaatgacgaggaacggtaccacctggctacactcgacggaatactaaaatgaaaccgcttttgggagtgtacggtacaccttgcggtgtaacctaatgttgtcgcgaccaccggagggggaccgagtggtgtctacaacaatacgagtttttattcatcaacaacaacagagctgctgtgggcaaatggaagaggtcgtcctagacccatcaattccatgcagtgcagccttgcgattgtgagagcagaagagcgatcccggtccgagtaaatgcatgtttctggagagaatcgcagtcctcgtacctctgggtaccgctcgatcgatttttgagaatcgacaagggaagtggcgaagccacccctcctgtgcttctcttgtgcgcctttacgtttattgtacaaccttacccctaagtggtcgcaatcagcgacctttggcatcgttttcgatttcgtgtgaccaaaacgttcaccacccaacctaagcttcacgtatgctgaacaaacacttgggatcttgtaaacacgttctttttctttacccgtctcccaagacataagagtcgttttgaactcatctgtcacagaaacgtcctctttgaaaattcttttacacgatgcgaacatggccccagtgggaactgcaacttctcccggtccagtaggcttcagtttcgtgatggcagatccgtaggccacgcaaaccttcatatcaggaagttctttcatcatgcaccgcttgatacccgcccagaaagagtcttttacctttcgttttccgatgtaacgctgcaagttgtcacgggattctcggcgtcgcaaagccaatctccaccactcgtcagaaaacttagcgtaatttgacaagtacgcggagatcttatccgtcctcgatgtactcaaagctgctccattttcacgcagagactcccacataggaatcatgtcagcaaaacgcagttccttctgccttgtctgcttcttgatacccgaattgtggtaaaatgcaccacgtgtcagcttccatgtcttatttttatcgtctgccaaatacgttaccgtagcgatgttgctccgtcctgggtccacacccaggacgacgatacccatatcgggcaatatcgttttaagtgagccgtcgtatttttctgcgatcttgataccttcttctttacgagggttcttacaggtcttcttcagatctgagacaaggacctgtactgtcttgctgtactgcatgctcaaggagactccgtcagtacagatgctgcagtcgaaaacccacccattcttgacaggtggtttcttgaagaaggaacctgcgactgtttttcgggcgttcacaagcgtgtcatacaaaccctttgcatgtatgtactcgtcagtagccttgatatccttaacatcatcatcgtactgcttcatgaccgacttgtatgcatcccattcaccaggaccacatgattttttcttcttctgtgctggcctctgggacaacatgaagctgtcgggattctttacatgttcccacttggaaagctcaacgatgttctggtcattggggaacatgtgcctgaacaggtttacgagggtcttcaggtcaaggcgaacatgcacccgttggacattgaagatgggcatcaatcggatacgacgtgcatccatatcctccaaccgtgtctgtatccaataattaaaccggaccatggtcggaaagtccatgtctttgccatagttatcataaactcgacttccatctggaacactcagcatctccctaacttcattgacgaactcttgaacagactctggccatccctccatgttttggacttcttgctgaatagcctgcatcacgtcgtatccccgaatgatcttcgatgtgtccagcgtcttcggggcatttaatttatttaaagtggtggaagtgagtctggccagacgtggtatcaaaggaacccatgcgttgtttgacacgacagtgctcaatgtgtgacctgcatagttcaatacctgatcgaaatagatcggataagacttgatgtagtcagcgtcgtcattaccaattacatcgccgatggagtccttcacagcttcgtacgatatcttgctttcctcatcagggaagattccgtctaccccgatacggagccaatccttccagtaggtatctttcatgttgtacaggtctggaatatccagacctttctctaatagactcgtgatgtggaaagtcagcacaagactggaccgccgtaacatgcggctcaccacattgacgagctggtccacatgctccctaaacttaccgaattcttcatcgtcaagactcattgccttcttcagggcgcatttcacgacacacatcttttccaccgtcttgtattctggagggggtctggcgatgagaccattgtcttcgcataaacggacaatatcgtccttcttgtcctttgatgagtatgctacttcggccaattttagtagctccttcaatttcgcgactgtcggaggtttcgttgccatcttacataatttatacatcacagaactctttatacaaacatcacatacgtgttccatacgtggtcaaaacaacccataatgattttatcagtgaggttgctaaatgctaaggaaatcatatcagacacgtgcgtctttgtatcgtttggtatatagttcaatcgacgaaagtccttcttcaccttagcgaagcacagctcaatagcattgaattctggactgtaaggaggagtgtaacaaatatttacggggcttctgaggaccaagttcttatggatactggcgttgtccattattactactgaattattgcacaaactcaaagagtcaataaatgcagcgaagtccgtcttcttcacagatcctttcttcacaacgaactccttcctaccatctgaaaaaactgccatcaacaaactatggtgtacccacccaccagtagttttaacgataacaggttttcctacaggggaatacccataatgtggcttgagacgctcactaaaaccacattcgtcaactgatactaaaattttccagcattgattgtatccttgtatctactacaaaattcagtgacaagtggaactaagtcccctttacactgtccacggagtttgctcctttttcttgtaaaaccaatgagttttatgaaacgatacactgttttagttgataatcttaaattgtgagtacttttggaaaatgcaacaacacctcttgcggttgtgcattgagttgacaataaaaaaaaattcaacaactcttttgttcgtctcaaaaagtttgcttacaaattcacgtcgttttcgatttacaccaaagcgtttccatctccacagagtagaacgactgatgttcgtaaacacagaagtttttaacacacccaagtcagcgaccattcttaacgccaattttctatcggcgatgtcgtacatttatttccatctgatatatgtttcattttactgttccgccgactgtagaagtcgatggtacgagacggtaaaagttcgtacgaagaatgataccgtagtggcgaatgtgggtcacttggtggcagacaaatcaccagctccaacatagatgttcttgtatccattctggataacataccatccaatctagcagatgtaagtgcattcactacatccatcatgctcacgtctacagtcggcggaacagtaaacgtgttcacatgaacacctatgaaaagactctccatctctggaacaacaattatttcaacaaaaaataagaatcatcaatcaatccctattttctggaagaggctgtgcctctgcctcgttccttgggtgggtctctgacatacaaaggggcatgtgtaggggatacctcagttacatctgctggcattgtattgtcccagtcgagcgggttcaacacttcaaacatttgatgatcggtaaaagacattgattgataaaggaagtgcatttgcgcgttcactgtgccacataatttcccccacatacatggaaagcgattgcttgcctttcttttcctcgcaggatgatggtcaacaacatgtacccaacccttattatagcggttgcaacaaacattgctcttttcatatacctccaccgtcgtgacgaggcctatcgtgacgaggcctatcgtgctaaggccccgtgctgacaatgaagctactgcccgtcgtgaggctgaggcccgtgctgacaatgaaatatactgcccgtcgtgaggctgaggcccgtgctgacatgcatactgccgtcgtgaggctgaggcccgtgctgacaatgaatctactgcccgtcgtgaggctgaggacccgtgctggacaattgaagctactgcccgttgtgcggaagctactgcccgtcgtgaggctgaggcccgtgctgcggaggctaaggccaagtctcaggcaagagttgttgtcgttatcgcctgatgacgtcgctgctatgactcctgaacacgctgcggagtatatgacggcgtgtgcctcggttggggtatcagcatttcatttggatcagccggtattgtgataatgctttttttaaatacatacatgtcacacaatcacccacccccgcagcacatctcctcgcagggtttgtcaaggcagcactgaatcctcggaggagccctgtgggttactgaatgtgagagggggtgtgggattgctttttaatgggcgttcctgcctcccggccgatttttttaaaaattctaatcaggatttagagcctcctgaacgactcgctagcttgagacatcagcacgaaggaatcacaaatccgctccataccatgtttcgcaaccagtcaaaatcggccgggaggcaggaacgcccattttgtcacgtttttcagcaaggaactgatggggggacgtggaggttgcaaaacgatttgaggagcggcacctccaagatgaagagtccagatagatacatccgcttcttggcactgtttattgcattatgtgctcttgtgtcgggattgtttcagaacgcaacatctcttactggatgggcaacattgggtatttcattgattggttttgccacaagcacttcttgagaagcttccgatatcagaggaagacacaactctacaacaacctttctcgcatacatgaatgatttggacttcataaccaataattttgagaactttccattccagcaaaaccatgtcacagttaagtcattggtgatggcatctattaggctcaggcttcggacgggtttcgtgttttttttccatcaacacacgtaattctcgttcatattcttcttggaacattttgaccttcaatatcaaggaagatattcctttatattccaactcgggatcatgtctccaccaagaccagcaggaatgatgatgtcaccattaggaatgttatttcagtgatcagcaagaagtgccgccgtgtgagaatggacaaggatgatgctgactgtgtaataatgtaattcgtcactgttttcggcatgacaactctcagattggttcagaatgggagcgcgggcagattggatgtattggattcatttgatgactcgcttgaatttattcaatatactgtaacattattgaccggtctgactgaaacgcttgggactttcactgaaacgcttgggagggggga

SEQ ID NO: 161 - DNA, 13594 bp, unidentified
  misc_feature 1..13594: note = Fanzor polypeptide
  source 1..13594: mol_type = other DNA
ctccgagaaaagctcagctatgatgatcgaaaacggggtcaacgtatttcacgcaaaggccccaaactcatgcactggaagatggtctgttgccttgcaaaacaactggaaaggtgagatacccgcggtactgttcatctgtagcccacatacacacacaggacagggttctgcaacttgagcttttgcgcttatgcacaatcgccacaataaacggagctgttctgcgtggcggcttggagcttcggccgagtggctggctcaagagtttgtctgcagtgagaacgagagagaaatgtagaggagatgaaggtgctccgaggttttcgggatcccgagttttggagttttggatcgcccggtgctacactgctttcgtccggaccggtaagaaggacatcaaggccatctgcgaggagcacccgggctggaatcgacggacggtcgcgcattactacgccatgtacgaaaatggagagagtttgcagcccaggtgtggcattgtggcaccggtcgagcattctgaaggcgcgtgcagaaggctgcaccattcgcatgatcgtcgacgagcgaagcgcgctccaaaagaaaaaaaacatgacttgggtacgcaagtgcggggatcccggtcaagactggacgcgtggccagcttcatggtccacaacaagtggaccatcgtcaacggcgagttcattttacaaggcacgggcaactacagcgcggttgcgttcgatggagcccgccacgcagagacctttgagacgcgcacgggtcaggcgcaccttgattcgatcaagcgcgagttcgagcagctctgggaagaaggacgggtgcttcaatgggcctcgaggcgtactgcttgcttcatgtacttgggggaggacgaggatgaaacgaaaatgtacccccccccggggagagcaggacgaggacgaggacgtttatgtgtaggatatggttgaacgtgcaagccagtaagtaactttgttggtgcccactttgacttgggcttacattggccgtgcaggagtgccatcgtagttacaatagagctcgaggatcatgatgagtcctctcagtccttaccagccaaaaaaggcaaactgcacctagcgcattgagctggcaacggcagccccatcgacggcggctccagctacaacgggatctccgtcacttgactcgtcccttcagtccactgttgcttcttcgtcgctcgacaatttgatcgcgtctgctggatcgggttcgttcattgatccgagttcagtagtggtaaacggcgagctgctaccagcgagatcaagtcgacgtaccgcaactgggtggggcctcgcgccgtctcccccgacgccgcgtgctaccgtgaagcactcatcatggacgcatgcccgccaacttcgaccagaacgaggttaccaacacgtgctgggccgagtgcccgatcgcctacccggtcgagtgcggcatggaatgcatccgtcagaacgatgactgtgctatggaggtgcttaacaaggtcggtgctgttgctagcacgtctagtcatcgctaccgttggtgcgtctcagaaactgtggcagctttcaaagggtgcgacgcgcgcattcgactgcgctaacatgatgatcggtacgatgagatccatcatccgttacgtgcgtaacatcaagaccacggacccgcaggcctcgacggacaagattctcaacatcctgtaccagtcgaacaacatcgtgacggacctgccgatggccatttacatttgcatgggctgggacttgccgaggcctctcgatgtctcgggtcgtgtgcttacgacgatgaactggatcttgctaaacgccatcgggtacaaggacgacctcgtgtctagctggagcaagttcaaggctttcttgatcggcgccaacttcacggaggccgccaacaagatcaacgagacggagatcaggacgctgagtgacgccctgaaggccaactccacctgcggctacgacttgcgagtgatgacggaccgcacgtgacgaggaaacgcagcataatgcgggtcaagatgagaacgtgatacttgccctcatgctgtccacatcgtgcacacggacggatgctgagtctgtcggtgttgatgcactttcagtcgtcgaccgtaatcgcttccagtttttgagggacgcgaacatttttcttgagtcagggaagaagctggtgttttacctggtgcgtcttcgttatcgagctccgattctccggcagaacgaccagtcggaagtgaaacaattgatgcagagcatgatctggtattcgatcaccggcgcgaagatcgacggtggcaagttgcacgatgccgagtggaccaagaagctggatttcttgaatcctgccaacgaaacactgtcgcagctgtgggaaagtggagagagaagcaccagctcggagcacgaacgttttgcacttattggctggcctgcttccgccgacataatgaacgcagtcgcattgtttggaaaagtgtcctgtgtgcctgtaattcttgcacagtgctacaacgctccgaatgcttctcagcgccgaacttgatgaaaatggatgccatttcgctcaaactctcaaaatcttcgagaagagcaatgcatctgttgagtttgtacccctttgccgggagctaggtgctgccatcgttgacttgggtgacactacactgatccaggcgtttttcaagaagtatgttgcccagctgaaagacaaggacagacagttatttctccaatggcttccagctctcgtgcgcgcatttggatgggcatacgttagtgctgccacactgaatgccatcgacgtgcaatcaactgaaattcgctcggatcgagctttggaactcgcaaacacactccatgacaacgatgctgcacttctagctctcgtagagtttgcgctgaagaaagctcacgcacggtgctctggccacgccgatgcattcgtatcttcgggtaagatcatcacacttttaaagcttgcgctggcgtgtggaaaccctcaaatatttgccggtctatcaaccatactgaacaagatcgatggcaatcttctccacacagtgattaatgcgctctcgaaatacgtcaatgactcgagtttacctgaacaacgtgctacgctggcctcacttgcagcgagacgtcgtgaatggctattcgctgagatcgaagacacgaagcaaccactggacttgacgaagcgcgagatctaggcaatgctagccgacaacacaatcggctccgcgaagtacttttcaatcgtcgctgactttttgaaggtgtcaccgatgagcacgagattcctggggttaaggctctacctagtggacacatcgttcgagttcaagtcggtactcttggggactcgccatttcgcgcctcagtatgggggaccagatggcggaatacgcggaccactttaccggtggattggtgacgtcctggggggggggggggggggggctttggtttgagtcgccataaccttttcggggctacaacagtgatgtcaaatggatgatgagggacggtctaaagttgtagcgggagtagtgcgtgccgcacttcatgcatgcggcaaccaatactgttttcggcatcgtcggtgacaacagctcgtccaagaacccagccatgaccgacatccttcggcgcatcatcaaaacgatgtacaaaacgcagcacgtcgaaggaaagggcactctattaagcgagttatgcagcgttatgaacccggagggtgtgcatccacgctagctcttaaacttccgcacgcatcgattcctgggactcacgcgcgtcgtccgacgcattcttctactctgggatccattggtgcaatggtacgaggagcgggccacaaaagcccgacgtgagaacgtgatgccgccggagtccttcccactagctcgggaaaagatggaatgctctcactgctggagccgatctcgaaactaaatcagattggacaggccgagtcggggggaccaatgcaacgtgcttcttggactctacaagctccgaatatccttgttggacatcaccacagccttgaaggactgaagacggagaatcggttcttccgaccggatgagctgtacgatctcgcatcgacaacccgttcgctacttcacaaagggtttcgtcgggttttcttccggcggtacaccgatcgtgataccatgaacgtctgctcctttgcctttgagatgcaactatttcttcaccccaacttcaagcatccatatggagcgctgataaaggtgttaccaaggtcaatatacaggcaggtgcctcccagcaggtagctgaccgacactacacgaagattcgacgcattatcattgacagcgtccgcagcatcatgacagcggctgacgccgagccgacgtcgactgatatcgttgccccaccgccagctactgggttatcagaggacttcgtggagctcttcacggagacagcgaacgaggtggcaccaccacatagactgcggtgcacgagcaacgcatcgacgatgagctcgaccgctggctgacaacgcctacttcgcttcaagcgattcaacccggtgcgtttgactcagttctgagcttctggaagcgccagcaagagctgggcaacttcctgcttcttcccttggttgcgcgcgtgctgttctcaatgccctcatcatcggcccaaattgaacgcgactttgggatggcaggcaggatggtgacccccaccgcagctcgatggcgccttacaacgtggacatggccacatttctgagctgcagcagaacttacgtgggtatcacccagtacccaaagttgtcgtcgagcacagcaaaggatcaagtaccgtcaaacgccatggtgagcatggagcgagagttggacgacgagttcggatcgttgatgaacaaaggcatcgagttgggactctccgacgacgaaaacgacggtattaccgaaatgtagcgggagcgggctggggcggacgaaaacgtgagagaacgggagcacgtgtggaagtggaaacgggctatagctgccgtggtagagttctagccatgcatgtgcacgaaatgagtgtctttacttttcatcaacacgttctgaccgtgtttggtgttagcttcgctatgcagcatatgtaaatagtatttcgctttcaccttgctttcgtgctggtcgtttgattactagcaactctgtaacacgcattgcagcgcgtacacggatcgcctcctgtgtttcaagctagattcgctcgatttgagatcgatctcgcagtattcgcgaccgtgggcacacaggcgggttgctggaccgggtggaagctgctgaaacccgcgtagttggtgtcctggctgccgctgcttcttttctgcggtttgctccagcggctcgtgataatgcggtggtggagcctcgcgtgcttgcagttgcttctgtagggcccatcgctgcacctgttgaggaagttggcgtcggcgcgaacgttgggacgatggccgtggacttgtctcgacttgatacagatattcacatcggtgttcttgaggacatcactgtattatgctggtcctgtggtacgaactcagagtgccatcagttcacggggttttgtctcggcagtcttcttggccaccacgatggctgggcgaaaccgttcgcctgggtggttgttagccctctcttgctcctgatcctgacgcatgcgaatcgcgatgtcgtgttgatctagcccgccgttgatcagctctactacgcgaacctctgtacgagcggttgttgcctcttgcactacttcaaatttgcaaatgtcgtggcgctcttacgcagcacgcttgtgctcctcctctaccaggttgtgttgcttgaccctggaagactgcaatgtgacttgcaaaacgcctggtgaggagatcaaaagagatcatctttgaccaataaaacgagatcttgtttgccaataaaaaaagcaatttgcagagcgaaccaagttctcgccctagctcggttcgaatgaaaagtaagcgaaccaagccccccccccccccccccccccctccggttcaggtaaaaaagaaaagaagggtgaaaccgtggttccagttcagttcgtcccaggggtgggaaattcacgaagtgtaggaaagtgtaatagacttgcgaggagagctgctggtctttctactcagtccacaaatggaaagttctgtccgtgcagctctctcaagtctaacctaaagctctacactgccagtcatactgtacaccactcgtacaattgcctctctcacattgatggtcgcacgctcttcaattgttttcgtgaacccagcagccgcagtcaacggcaattcgaagatgtcgttgggtacgccccgaggcttcactgctccagcaagttctcacttttcctttcgcaccgtcaagcgcagtcactgtctccaacctccatcgcctgttagtagcgttgtatcaagccctatgtcggggaagggtgcgccaggaaagcgcaagcgcaagtgacacccatttgatgacgggaagagcgatagaaatggcactgaaggtgcatgcccgaactcggagggcgatgatgacctcgatgaggatgacgtagattatgaggacgcccaaccagtaacgacacgtccaagcaagaggcctgacgtcgcggagtgcatgaagggcaacaagaataccagcctcgtatatgtgaagatgtcactaggttccttcttgacaggcgaggagaaactgttgctgtcattcgatggcattctcgtagacttgagcattggattgttaaatgcctacgcgctgctgaacatccacatgatacggtgtgtgacaaaggacttcccattcctcgatttgagcagaacttcgtttgccaatgcttgacagacgtaatgtttaacgacagcaacgtgcacatagacgctgaactacatatatcgttggagctatacaatttgttgagaggctctaacgcttctcacgggcgtcgcgctggtatcaagaacgggtggcaacaggcgcagctcgggagatgatgaccgctatccagcatgcactcaaaaatgagtttccttcgccggtttaataaggtgctgcgggtatggtgtagacagaagcactggtagcacacattattgccccagagttcgagcggactccacccgacattcctgatcgtcagcgcctcgacaacgtagtcaacgagtggcgtggagaagtccctcagcgtcggagtgagctggtcaacttcacggcccaccgactggtgcttctgacttatcgactcctgcaaatgattgaggagcgtaacgacagagttgagcaaagcgtttgcgctgtttaagtgacaggggcgtctgattttgaagttagactaatccaagctgaagttatgaagacgttcactgttctaccaacaaagcttggatttggaattagtcacctcacgatagatttgattagtttccgggaactattagtccgcaacgacattgctgttcctccgtacagatcgaagtggaatgaggtgagatacatttattggagacggttcttccgtattgacaaagtggagactatagagtttggtcatcgcagattcacacgagagatctcggcggacggcaagtcggtgaacatcaagattcggaagcccgaacgtgggccttccgagcccaatgcaaatgacctccaagctgccgacattggctctagatgggggttggatgcgagtaaatgcaacctattggtcaccacaaaccaggacgacgaaacggttgtgtgctctggcaaagagtatcgcgaagacgcttacattacgaagagcagccagaagcatttgagatggatacgggatcgtccgggcactggagctgcttttgcgagcatgccgacgaagaggagcatgttgctaaagcggtggcgggagtacgtcccatttatgacgcagcacctgcatctgctagtgacccccgtgcagcacaaatcgtaccgtcgccatcgacttcgaaggagcttctttaaaaagaagaagctatgtgagctctaccagaaacttgtatgtcacggagagcgaatttttatcgtcattgacaaccggagtaacggcgatccaaatggagcgatcaaagggaagccatcggcactcgtgcagaaattggcgctggagttgtcaaagacgtcgaactgtacggtcatcattattgccgagttccggatcagcaaagtgcactttggttaccaacaagaactgtccaagcaatacccgtatcgaaaggccgctgtccacgtacgcgcagtccacgaaagacgagccacgtacccagtttacggcttactccatttcagaaacaaaggttgttctggtatgagtgtgaacagggacgtgaatgcttcgaagaatatgctgcgcctgctcgattgtgaactcaacgagactcgcccagtcacctacacgcatcaagcaaacagatagataacaatacatttctagtgtcgctgtgtgcctatctaggggtgaggaagattacattgtgatagccggctcagaaattagcccttttggaatctgtaggctacgtacctataggacacccttaggagaataatgggttaaagaaaggctcaatgaagcctggttgatttctgcatgaaatatttttcaaaacggtgatgtcctcctgtggatgaatatacttgtctttccgacagatagctcagcacgattgttgtctgctcgctttgcaggccattttgaccaattttaacacgtaaagccttaattgtgtccaattaaaatggttaaatgtaggtttgacattctgacaccttccgacaaatatgtgtctgaagtatttccaaaatatcaatatcttcatgcaaacaacaactgtaaaacgtatttttcaaatataccagccattcgtacaatgaggagtggccctaatgtaggaacactgaagaagatgaggtcgttggttgggtgtccaccgttggtgtccactttaccagaagagtaacgtagccatggatcgtgcgtgatgcgtgggacataagcaaaataaacaaaggctgtgcttatgtcttcaatatgccacgggaagaccgcaaggtagcctgagtgctgtgcagctggaataaagagatcgcgcctcacgttgtggacgtcgcgacgctggaccatccgacgcgggagcggcttgaacgcttgcaggagctcctgtttagcacatgcacaggacgcaaggaacaccggttcaacgtgagtagaaaagtgcttagcgcttacctggtacggtactactcgcagcttaaagcgctagttcctgcagtgccgatcatcatcctgcttagtatctgcgggcatatcgtcaactgcattgcttgagtggtctgtagctggcggctccacctgctcaagaccaagaacaaactcaagacaaggcgcacacgttgccgagaagatggccaccttttggctgtgagtgatgggcttatcgcctcgaacaaggtcatggctgcatcgtcgaggcggtactactaaataataagggtccacacgcaacaacggaagaaggacaactgcaagagccatcagatcaagaaccaaatcccaagcacagaaaaaagctgcgaacctgtcggccacatggcttgcgtggtacaagaggataccacgcgtgtgggactcaaccgatagaagtcggagtgtcgccacgtggtcgcctccatgaagctctccctcgacgatagcttcgttatgaatgtcacagcggaagaattcaaaaaccaagtcctcaacaccagccgcgcggaaattggactgctggagtttctaaagctagcggcgtcaacgaagggagccgggagtatcctgcgtgcgctgcacccgctgcatatgtccggtatattggacgagcaaatcatggtctacaggcaccaactcgtcataggaagcaccgaagaccctgcacatatcgacgcgcaagacatgctcggcattgtaggtcatgtgtgagaacggtgaagttaattcattccaatatatgtattcattcgacataacatcgctgcttaacaagacaacatattcatgtgtacacatccacgcgcgcaggtcacctaatcaaagcgtaggctgcacaccgcacgatcgcaccgcgctcactcacccaccacatgcacagatcctcagcaatactgcacggttcaaagcactgatcccgacccaatcttgatcataaataccggccaaaacgtggctgttgacgaagctagtattgcgtgtcgttcgcaatacgctcgccatattatagttttctatccccaaaaccagacagggaaatatcacttcaagctgtatgcttgttgctgctcgacatcatggtatgtcgtgagtttcaaattgcactgtgcaagtgaacaaatagaccgtttggacggcgtggttccaagtccagaggtattacagcttgttgatctgacagcgaagtcctttgaaatttgttcccacgtaattgcagttgtggagtctttgaaaggatctaatcgcgttgtcaataccgataatatctacacctcctgcctgctactagaatcactaaggtcgattggcatgtatggtcgtggtacagtgcgcacatccagcaaacacttcccccacttcacaatgatccgaaaagctgatggaaagcctagaggctacatgaaacaaggcgtgtgcttagagaaacatatcgtagcggccagttggatagatggctctattgtgaaagtagtctctaatgctgacgcctcctcttcctctacggtatatcgtcgcataaaggaggaacgtgttgcgtttaaagccccgacctgcatcggtgaatacaacgcggggatgcagggagtcaaccgtcatgatcagcttcgcggtcggatttcgcttgccgatggtcactcatttcagaagtggcataaaaaattagcaatggctatgattgatatcacgagatgtaatgcgtatgtatgcgataacttggcacgtgatacaagcgagatggatgttgcacagcctcgcaataatgcaagggcaagcgcccgtgacgatcaccgggcgtttgtcattccacttgtgcgagaattattcaatggagattggaagaagtgcattgacagtgatgacgtaattgtgtacacttcgaacacaaaacccatgaccactgctgccaatttgaccagaaatacgaatgagttagaaacgccagcacatacatgtgtagcaaaagagtcgtagcttgtgttacaaggaaggagtcgggcaatgcacaaatggactgtatgtaagttcgagggcagggatgacacccagaaaacggattattgcgagacgcatcgagttgcactctgcaagcgtacctatcctactgaccacagaaaaccgcacttgtgtcagcagcaaaattggacgtgctggcaaaagtatcatttgttctacttgccaaaacaggtctatacagttgacggaaatctgagaaggtcgtctccaatttgtaaagcccagtgttcgttcttgaaggagcgtcgagaccaagataatactgaagagatcagcaaccacgactagcattcggctcatatatggtactgaaggtaaaagtaggcactcaatacattgtgtgcacttgaactacgactgaaaaccagccagttacttgtactcacagcatcctccctccttgtacattgaccagtgcaatgtgcgccgctttggtgcctttcgtctaattatagagctcatgcatggtgctgcatgttaccctcagcaccaatgtctcgatgctccctctctaggcggctccagaacctcgatgtcacgtagaattctgtcgccgggcccgtgatgtcgagatcgccttgcggtgaacccgaggcgttccacgagctgtcgctgtcgctagttcgcccctgcaacgggcgccgtctgaaattctgtgtccttgctgcctttcgccttgtagggttgcgccatcatctcgttctgtcggtgtctagcgtatggctgctgcatcgggcgccgttgtgccgcacatgtgcatgatgtagcacaataatgtcgggataggcgccaagcgttacgttcttgttggtgtcggcgcgagtaacttgagagacacaatagcatgggcgcgccgtgtctgatcaggatttagatcccacgttgtgattggcagtcaacgctgacattttcctagagaggcgcaaaaattgttgatcaaaagtcggtgccgtatcttaacttcactataggctagattagtctgctaccttcttttggaaaaatatcttcatgtatcattctggtatcgatagggttaaaccactagtgctacgcgaaggctggaataggatacagataatccgatctacactagtgacaataaagaaacgtaagtacgactctgttgcaagcccacagcattcatctagagaacgggtgtagctctaaagtcatcgaagttcttggcgtcgaagtaagctttattgccttcgaactccgtgacacggcacgcttgcagagccactgttttgtattggtgcctcgtggctacagcgtcaacaaatccccccccccggagtgtgcagcacacctcgcttttggtgctatcaatcatcaaacaactgatctaatcgttctctggtctgtcgaccatcatcgccattgagtacctcatcgccaaatgcaaaacccttcgggtcggcaacacagcaatagtaatagaccaacgcgataggagggtgtcttgtaccagtgttgagcctttcccataaatcgaacctcctcatccgtaaaattaacacaggacagagcgcgaccttcaagctctccaagtctatcctgaataccccgttgtttttgcgcgcggcgggcgcgggccttgccgttcgctctcgaggtgctgctcccgttcctgcaaactttcattggctctttgggtacggcgcttcttgctgcggtcttcagtgtcggccattgccttcccacgttgttattggtcgtcagccctctacaaaacaaactgttggataaagcctaaatcatacggcgccatgctcccccgactacaccaatttgaatgcgctcccattagtatagtcactacaaattatccatacaatcatgtagcaaaatccccatctatgctgcccgagtgtccagtacccaaatcgattcaccggtaaaactatcccgtcgcattgagatttttgaggcattttgctcgatggttcgcgaaagggttaacacgctgatggcgcatttcttgaagcctgtcggcggcagtaccgacagcacaaactgcgtgtcgtggtcggtccaacggcactggcgaattccagttcaacgtgcttcgtgtcggcccactgcttcgtgcagctcggacagtgcgtgtgttgctgatgtccttgcagcatatgtgactcgcaatccgttcctcatcaacaagctcatcaacatggcttgtgcacattgcagggcagagccgccgtctttccc

SEQ ID NO: 162 - DNA, 9732 bp, unidentified
  misc_feature 1..9732: note = Fanzor polypeptide
  variation 2514..2783: note = n is any nucleotide
  source 1..9732: mol_type = other DNA
caacaagatcaacgagacggagatcgggacgctgagtgacgccctgaaggccaactccacctgcggctacgacttgcgagtgatgacggaccgcacgtgacgaggaaccgcagcataatgcgggtcaagatgagaacgtgatacttgccctcatgttgtccacatcgtgcacacggacggatgctgagtctgtcggtgttgatgcactttcagtcgtcgaccgtaatcgcttccagtttttgagggacgcgaacatttttcttgagtcagggaagaagctggtgttttacctggtgcgtcttcgttatcgagctccgattctccggcagaacgaccagtcggaagtgaaacaattgatgcagagcatgatctggtattcgatcaccggcgcgaagatcgacggtggcaagttgcacgatgccgagtggaccaagaagctggatttcttgaatcctgccaacgaaacactgtcgcagctgtgggaaagtggagagagaagcaccagctcggggcacgaacgttttgcacttattggctggcctgcttccgccgacataatgaacgcagtcgcattgtttggagaagtgtcctgtgtgcctgtaattcttgcacagtgctacaacgctccgaatgcttctcagcgccgaacttgatgaaaatggatgccatttcgctcaaactctcaaaatcttcgagaagagcaatgcatctgttgagtttgtacccctttgccgggagctaggtgctgccatcgttgacttgggtgacactacactgatccaggcgtttttcaagaagtatgttgcccagctgaaagacaaggacagacagttatttctccaatggcttccagctctcgtgcgcgcatttggatgggcatacgttagtgctgccacactgaatgccatcgacgtgcaatcaactgaaattcgctcggatcgagctttggagctcgcaaacacactccatgacaacgatgctgcacttctagctctcgtagagtttgcgctgaagaaagctcacgcacggtgctctggccacgccgatgcattcgtatcttcgggtaagatcatcacacttttaaagcttgcgctggcgtgtggaaaccctcaaatatttgccggtctatcaaccatactgaacaagatcgatggcaatcttctccacacagtgattaatgcgctctcgaaatacgtcaatgactcgagtttacctgaacagcgtgctacgctggcctcacttgcagcgagacgtcgtgaatggctattcgctgagatcgaagacacgaagcaaccactggacttgacgaagcgcgagatctaggcaatgctagccgacaacacaatcggctccgcgaagtacttttcaatcgtcgctgactttttgaaggtgtcatcgatgagcacgagattcctggggttaaggctctacctagtggacacatcgttcgagttcaagtcggtactcttggggactcgccatttcgcgcctcagtatgggggaccagatggcggaatacgcggaccactttaccggtggattggtgacgtcctggggggggggctttggtttgagtcgccataaccttttcggggctacaagcgacggaggcagtgatgtcaaatggatgatgagggacggtctaaagttgtagcgggagtggtgcgtgccgcacttcatgcatgcggcaaccaatactgttttcggcatcgtcggtgacaacagctcgtccaagaacccagccatgaccgacatccttcgacgcatcaccaaaacgatgtacaaaacgcagcacgtcgaaggaaagggcactctattaagcgagttatgcagcgttatgaacccggagggtgtgcatccacgctagctcttaaacttccgcacgcatcgattcctgggactcacgcgcgtcgtccgacgcattcttctactctgggatccattggtgcaatggtacgaggagcgggccacaaaagcccgacgtgagaacgtgatgccgccggagtccttcccactagctcgggaaaagatggaactcattcaggtgctctcactggtggagccgatctcgaaactaaatcagattggacaggccgagtcggggggaccaatgcaacgtgcttcttggactctacaagctccgaatatccttgttggacatcaccacagccttgaaggactgaagacggagaatcggttcttccgaccggatgagctgtacgatctcgcatcgacaacccgttcgctacttcacaaagggtttcgtcgggttttcttccggcggtacaccgatcgtgataccatgaacgtctgctcctttgcctttgagatgcaactatttcttcaccccaacttcaagcatccatatggagcgctgacaactatttcttcaccccaacttcaagcatccatatggagcgctgataaaggtgttaccaaggtcaatatacaggcaggtaggtagctgaccgacactacacgaagattcgacgcattatcattgacagcgtccgnnnnnnnnnnnnnnnnnnnnnnnnnnnnnnnnnnnnnnnnnnnnnnnnnnnnnnnnnnnnnnnnnnnnnnnnnnnnnnnnnnnnnnnnnnnnnnnnnnnnnnnnnnnnnnnnnnnnnnnnnnnnnnnnnnnnnnnnnnnnnnnnnnnnnnnnnnnnnnnnnnnnnnnnnnnnnnnnnnnnnnnnnnnnnnnnnnnnnnnnnnnnnnnnnnnnnnnnnnnnnnnnnnnnnnnnnnnnnnnnnnnnnnnnnnnnnnnnnnnnnnnnnnnnnnctgcttcttcccttggttgcgcgcgtgctgttctcaatgccctcatcatcggcccaaattgaacgcgactttgggatggcaggcaggatggtgacccccaccgcagctcgatggcgccttacaacgtggacatggccacatttctgagctgcagcagaacttacgtgggtatcacccagtacccaaagttgtcgtcgagcacagcaaaggatcaagtaccgtcaaacgccatggtgagcatggagcgagagttggacgacgagttcggatcgttgatgaacaaaggcatcgagttgggactctccgacgacgaaaacgacggtattaccgaaatgtagcgggagcgggctggggcggacgaaaacgtgagagaacgggagcacgtgtggaagtggaaacgggctatagctgccgtggtagagttctagccatgcatgtgcacgaaatgagtgtctttacttttcatcaacacgttctgaccgttgttggtgttagcttcgctatgcagcttatgtaaatagtattttgttttcacctatgctttcgtgctggtcgtttgattactagcaactctgtaacacgcattgcagcgcgtacacggatcgcctcctgtgtttcaagctagattcgctcgatttgggatcgatctcgcagtattcgcgaccgtgggcacacaggcgggttgctggaccgggtggcagctgctgaaacccgcgtagttggtgtcctggctgccgctgcttcttttctgcggtttgctccagcggctcgtgataatgcggtggtggagcctcgcgtgcttgcagttgcttctgtagggcccatcgctgctcctgttgaggaagttggcgtcggcgcgaacgttgggacgatggccgtggacttgtcttgacttgatacagatattcacatcggtgttcttgaggacatcactgtattatgctggtcctgtggtacgaactcggagtgccatcagttcacggggttttgtctcggcagtcttcttggccaccacgatggctgggcgaaaccgttcgcctgggtggttgttagccctctcttgctcctgatcctgacgcatgcgaatcgcgatgtcgtgttgatctagcccgccgttgatcagctctactacgcgaacctctgtacgagcggttgttgcctcttgcactacttcaaatttgcaaatgtcgtggcgctcttacgcagcacgcttgtgctcctcctctaccaggttgtgttgcttgaccctggaagactgcaatgtgactcgcaaaacgcctggtgaggagatcaaaagagatcatctttgaccaataaaacgagatcttgtttgccaataaaaaaagcaatttgcagagcgaaccaagttctcgccctagctcggttcgaatgaaaagtaagcgaaccaagcccccccccccctccggttcaggtaaaaaagaaaagaagggtgaaaccgtggttccagttcagttcgtcctaggggtgggaaattcacgaagtgtaggaaagtgtaatagacttgcgaggagagctgctggtctttctactcagtccacaaatggaaagttctgtccgtgcagctctctcaagtctaacctaaagctctacactgccagtcatactgtacaccactcgtacaattgcctctctcacattgatggtcgcacgctcttcaattgttttcgtgaacccagcagccgcagtcaacggcaattcgaagatgtcgttgggtacgccccgaggcttcactgctccagcaagttctcacttttcctttcgcaccgtcaagcgcagtcactggtctccaacctccatcgcctgttagcagcgttgtatcaagccctatgtcggggaagggtgcgccaggaaagcgcaagcgcaagtgacacccatttgatgacgggaagagcgatagaaatggcactgaaggcgcatgcccgaactcggagggcgatgatgacctcgatgaggatgacgtagattatgaggacgcccaaccagtaacgacacgtccaagcaagaggcctgacgtcgcggagcgcatgaagggcaacaagaataccagcctcgtatatgtgaagatgtcactaggttccttcttgacaggcgaggagaaactgttgctgtcattcgatggcattctcgtagacttgagcattggattgttaaatgcctacgcgctgctgaacatccacatgatacggtgtgtgacaaaggacttcccattcctcgatttgagcagaacttcgtttgccaatgcttgacagacgtaatgtttaacgacagcaacgtgcacatagacgctgaactacatatatcgttggagctatacaatttgttgagaggctctaacgcttctcacgggcgtcgcgctggtatcaagaacgggtggcaacaggcgcagctcgggagatgatgaccgctatccagcatgcactcaaaaatgagtttccttcgccggtttaataaggtgctgcgggtatggtgtagacagaagcactggtagcacacattattgccccagagtttgagcggactccacccgacattcctgatcgtcagcgcctcgacaacgtagtcaacgagtggcgtggagaagtccctcagcgtcggagtgagctggtcaacttcacggcccaccgactggtgcttctgacttatcgactcctgcaaatgattgaggagcgtaacgacagagttgagcaaagcgtttgcgctgtttaagtgacaggggcgtctgattttgaagttagactaatccaagctgaagttatgaagacgttcactgttctaccaacaaagcaaggatttggaattagtcacctcacgatagatttgattggtttccgggaactattagtccgcaacgacattgctgttcctccgtacagatcgaagtggaatgaggtgagatacatttattggagacggttcttccgtattgacaaagtggagactatagagtttggtcatctcagattcacacgagagatctcgacggacggcaagtcggtgaacatcaagattcggaagcccgaacgtgggccttccgagcccaatgcaaatgacctccaagctgccgacattggctctagatgggggttggatgcgagtaaatgcaacctcttggtcaccacaaaccaggacgacgaaacggttgtgtgctctggcaaagagtatcgcgaagacgcttacattacgaagagcagccagaagcaattgagatggatacgggatcgtccggacactggagctgcctttgcgagcatgccgacgaagaggagcatgttgctaaagcggtggcgggagtacgtcccatttatgacgcagcacctgcatctgctagtgacccccatgcagcacaaatcgtacagtcgccatcgacttcgaaggagcttctttaaaaagaagaacctatgtgagctctaccagaaacttgtatgtcgcggagagcgaatttttatcgtcattgacaaccggagtaacggcgatccaaatggagcgatcaaagggaagccatccgcactcgtgcagaaattggcgctggagttgtcaaagacgtcgaactgtacggtcatcattattgccgagttccggatcagcaaagtgcactttggttaccaacaagaactgtccaagcaatacccgtatcgaaaggccgctgtccacgtacgcgcagtccacgaaagacgagccacgtacccagtttacggcttactccatttcagaaacaaaggttgttctggtatgagtgtgaactgggacgtgaatgcttcgaagaatatgctgcgcctgctcgattgtgaactcaacgagactcgcccagtcacctacacgcatcaagcaaacagatagataacaatacatttctagtgtcgctgtgtgcctatctaggggtgaggaagattacattgtgatagccggctcagaaattagcccttttggactctgtaggctacgtatctataggacacccttaggagaataatgggttaaacaaaggctcaatgaagcctggttgatttctgcatgaaatatttttcaaaacggtgatgtcctcctgtggatgaatatacttgtctttccgacagatagctcagcacgattgttgtctgctcgctttgcaggccattttgaccaattttaacacgtaaagccttaattgtgtccaattaaaatggttaaatgtaggtttgacattctgacaccttccgacaaatatgtgtctgaagtatttccaaaatatcaatatcttcatgcaaacaacaactgtaaaacgtatttttcaaatataccagccattcgtacaatgaggagtggccctaatgtaggaacactgaagaggatgaggtcgttggttggatgtccaccgttggtgtacactttaccagaagagtaacgtagccatagatcgtgcgtgatgcgtgggacataagcaaaataaacaaaggctgtgcttatgtcttcaatatgccacgggaagaccgcaaggtagcctgagtgctgtgcagctggaataaagagatcgcgcctcacgttgtggacgtcgcgacgctggaccatctgacgcgggagcggcttgaacgcttgcaggagctcctgtttagcacatgcacaggacgcaaggaacaccggttcaacgtgagtagaaaagtgcttggcgcttacctggtacggtactactcgcagcttaaagcgctagttcctgcagtgccgatcatcatcctgcttagtatctgcgggcatctcgtcaactgcattgcttgagtggtctgtagctggcggctccacctgctcaagaccaagaacaaactcaagacaaggcgcacacgttgccgagaagatggccaccttttggctgtgattgatgggcttatcgcctcgaacaaggtcatggctgcatcgtcgaggcggtactactaaataataagggtccacacgcaacaacggaagaaggacaactgcaagagccatcagatcaagaaccaaatcgcaagcacagaaaaaagctgcgaacctgtcggccacatggcttgcgtggtacaagaggataccacgcgtgtgggactcaaccgatagaagtcggagtgtcgccacgtggtcgcctccatgaagctctccctcgacgatagcttcgttgtgaatgtcacagcggaagaattcaagaaccaagtcctcaacaccggccgcgcggaaattggactgctggagtttctaaagctagcggcgtcaacgaagggagccgggagtatcctgtgtgcgctgcacccgctgcatatgtccggtatattggacgagcaaatcatggtctacaggcaccaactcgtcataggaagcaccgaagaccctgcacatatcgacgcgcaagacatgctcggcattgtaggttatgtgtgagaacggtgaagttaattcattccaatatatgtattcattcgacataacatcgctgcttaacaagacaacatattcatgtgtacacatccacgcgcgcaggtcacctaatcaaagcgtaggctgcacaccgcacgatcgcaccgcgctcactcacccaccacatgcacagatcctcagcaatactgcacggtttaaagcactgatcccgacccaatcttgatcataaacaccggccaaaacgtggctgttgacgaagctagtattgcgtgtcgttcgcaatacgctcgccatattatacttttctatccccaaaaccagacagggaaatatcacttcaagctgtatgcttgttgctgctcgacatcatggtatgtcgtgagtttcaaattgcactgtgcaagtgaacaaatagaccgtttggacggcgtggttccaagtccagaggtattacagcttgttgatctgacagcgaagtcctttgaaatttgttcccacgtaattgaagttgtggagtctttgaaaggatctaatcgcgttgtcaataccgataatatctacacctcctgcctgctactagaatcactaaggtcgattggcatgtatggtcgtggtacagtgctcacatccagcaaacacttcccccacttcacaatgatccgaaaagctgatggaaagcctagaggctacatgaaacatggcgtgtgcttagagtaacatatcgtagcggccagttggatagatggctctattgtgaatacagtctctaatgttgacgcctcctcttcctctacggtatatcgtcgcataaaggaggaacatgttgcgtttaacgtcccgacctgcctcggtgaatacaacgcggggatgcagggagtcaaccgtcatgatcagcttcgcggtcggatttcgcttgccgatggtcactcatttcagaagtggcataaaaaattagcaatggctatgattgatatcacgagatgtaatgcgtatgtatgcgataacttggcacgtgatacaagcgagatggatgttgcacagcctcgcaataatgcaagggcaagcgcccgtgacggtcaccgggcgtttgtcattccacttgtgcgagaattattcaatggagattggaagaagtccattgacagtgatgacgtaattgtgtacacttcgaacacaaaacccatgacaacagctgccaatttgaccagaaatacgaatgagttagaaacgccagcacatacatgtgtagcaaacgaatcgtggcttgtgttacaaggaaggagtcgggcaatgcacaaacggactgtatgtaaattcgagggcagggatgacacccagaaaacggattattgcgagacgcatcgagttgcactctgcaagcgtacctatcctactgaccacagaaaaccgcacttgtgtcagcagcaaaactggacgtgctggcaaaaatatcgtttgttctacttgccaaaacaggtctatacagttgacggaaatctgagaaggtcgtctccaatttgtaaagcccagtgttcgttcttgaaggagcgtc

SEQ ID NO: 163 - DNA, 8421 bp, unidentified
  misc_feature 1..8421: note = Fanzor polypeptide
  variation 1427..1809: note = n is any nucleotide
  source 1..8421: mol_type = other DNA
ctagctctcgtagagtttgcgctgaagaaagctcacgcacggtgctctggccacgccgatgcattcgtatcttcgggtaagatcatcacacttttaaagcttgcgctggcgtgtggaaaccctcaaatatttgccggtctatcaaccatactgaacaagatcgatggcaatcttctccacacagtgattaatgcgctctcgaaatacgtcaatgactcgagtttacctgaacagcgtgctacgctggcctcacttgcagcgagacgtcgtgaatggctattcgctgagatcgaagacacgaagcaaccactggacttgacgaagcgcgagatctaggcaatgctagccgacaacacaatcggctccgcgaagtacttttcaatcgtcgctgactttttgaaggtgtcatcgatgagcacgagattcctggggttaaggctctacctagtggacacatcgttcgagttcaagtcggtactcttggggactcgccatttcgcgcctcagtatgggggaccagatggcggaatacgcggaccactttaccggtggattggtgacgtcctggggggggggctttggtttgagtcgccataaccttttcggggctacaagcgacggaggcagtgatgtcaaatggatgatgagggacggtctaaagttgtagcgggagtggtgcgtgccgcacttcatgcatgcggcaaccaatactgttttcggcatcgtcggtgacaacagctcgtccaagaacccagccatgaccgacatccttcgacgcatcaccaaaacgatgtacaaaacgcagcacgtcgaaggaaagggcactctattaagcgagttatgcagcgttatgaacccggagggtgtgcatccacgctagctcttaaacttccgcacgcatcgattcctgggactcacgcgcgtcgtccgacgcattcttctactctgggatccattggtgcaatggtacgaggagcgggccacaaaagcccgacgtgagaacgtgatgccgccggagtccttcccactagctcgggaaaagatggaactcattcaggtgctctcactgctggagccgatctcgaaactaaatcagattggacaggccgagtcggggggaccaatgcaacgtgcttcttggactctacaagctccgaatatccttgttggacatcaccacagccttgaaggactgaagacggagaatcggttcttccgaccggatgagctgtacaatctcgcatcgacaacccgttcgctacttcacaaagggtttcgtcgggttttcttccggcggtacaccgatcgtgataccatgaacgtctgctcctttgcctttgagatgcaactatttcttcaccccaacttcaagcatccatatggagcgctgataaaggtgttaccaaggtcaatatacaggcaggtannnnnnnnnnnnnnnnnnnnnnnnnnnnnnnnnnnnnnnnnnnnnnnnnnnnnnnnnnnnnnnnnnnnnnnnnnnnnnnnnnnnnnnnnnnnnnnnnnnnnnnnnnnnnnnnnnnnnnnnnnnnnnnnnnnnnnnnnnnnnnnnnnnnnnnnnnnnnnnnnnnnnnnnnnnnnnnnnnnnnnnnnnnnnnnnnnnnnnnnnnnnnnnnnnnnnnnnnnnnnnnnnnnnnnnnnnnnnnnnnnnnnnnnnnnnnnnnnnnnnnnnnnnnnnnnnnnnnnnnnnnnnnnnnnnnnnnnnnnnnnnnnnnnnnnnnnnnnnnnnnnnnnnnnnnnnnnnnnnnnnnnnnnnnnnnnnnnnnnnnnnnnnnnnnnnnnnnnnnnnnncggccctcatcatcggcccaaattgaacgcgactttgggatggcaggcaggatggtgacccccaccgcagctcgatggcgccttacaacgtggacatggccacatttctgagctgcagcagaacttacgtgggtatcacccagtacccaaagttgtcgtcgagcacagcaaaggatcaagtaccgtcaaacgccatggtgagcatggagcgagagttggacgacgagttcggatcgttgatgaacaaaggcatcgagttgggactctccgacgacgaaaacgacggtattaccgaaatgtagcgggagcgggctggggcggacgaaaacgtgagagaacgggagcacgtgtggaagtggaaacgggctatagctgccgtggtagagttctagccatgcatgtgcacgaaatgagtgtctttacttttcatcaacacgttctgaccgttgttggtgttagcttcgctatgcagcatatgtaaatagtattttgctttcacctatgctttcgtgctggtcgtttgattactagcaactctgtaacacgcattgcagcgcgtacacggatcgcctcctgtgtttcaagctagattcgctcgatttgggatcgatctcgcagtattcgcgaccgtgggcacacaggcgggttgctggaccgggtggcagctgctgaaacccgcgtagttggtgtcctggctgccgctgcttcttttctgcggtttgctccagcggctcgtgataatgcggtggtggagcctcgcgtgcttgcagttgcttctgtagggcccatcgctgctcctgttgaggaagttggcgtcggcgcgaacgttgggacgatggccgtggacttgtcttgacttgatacagatattcacatcggtgttcttgaggacatcactgtattatgctggtcctgtggtacgaactcggagtgccatcagttcacggggttttgtctcggcagtcttcttggccaccacgatggctgggcgaaaccgttcgcctgggtggttgttagccctctcttgctcctgatcctgacgcatgcgaatcgcgatgtcgtgttgatctagcccgccgttgatcagctctactacgcgaacctctgtacgagcggttgttgcctcttgcactacttcaaatttgcaaatgtcgtggcgctcttacgcagcacgcttgtgctcctcctctaccaggttgtgttgcttgaccctggaagactgcaatgtgactcgcaaaacgcctggtgaggagatcaaaagagatcatctttgaccaataaaacgagatcttgtttgccaataaaaaaagcaatttgcagagcgaaccaagttctcgccctagctcggttcgaatgaaaagtaagcgaaccaagcccccccccccctccggttcaggtaaaaaagaaaagaagggtgaaaccgtggttccagttcagttcgtcctaggggtgggaaattcacgaagtgtaggaaagtgtaatagacttgcgaggagagctgctggtctttctactcagtccacaaatggaaagttctgtccgtgcagctctctcaagtctaacctaaagctctacactgccagtcatactgtacaccactcgtacaattgcctctctcacattgatggtcgcacgctcttcaattgttttcgtgaacccagcagccgcagtcaacggcaattcgaagatgtcgttgggtacgccccgaggcttcactgctccagcaagttctcacttttcctttcgcaccgtcaagcgcagtcactggtctccaacctccatcgcctgttagtagcgttgtatcaagccctatgtcggggaagggtgcgccaggaaagcgcaagcgcaagtgacacccatttgatgacgggaagagcgatagaaatggcactgaaggcgcatgcccgaactcggagggcgatgatgacctcgatgaggatgacgtagattatgaggacgcccaaccagtaacgacacgtccaagcaagaggcctgacgtcgcggagcgcatgaagggcaacaagaataccagcctcgtatatgtgaagatgtcactaggttccttcttgacaggcgaggagaaactgttgctgtcattcgatggcattctcgtagacttgagcattggattgttaaatgcctacgcgctgctgaacatccacatgatacggtgtgtgacaaaggacttcccattcctcgatttgagcagaacttcgtttgccaatgcttgacagacgtaatgtttaacgacagcaacgtgcacatagacgctgaactacatatatcgttggagctatacaatttgttgagaggctctaacgcttctcacgggcgtcgcgctggtatcaagaacgggtggcaacaggcgcagctcgggagatgatgaccgctatccagcatgcactcaaaaatgagtttccttcgccggtttaataaggtgctgcgggtatggtgtagacagaagcactggtagcacacattattgccccagagtttgagcggactccacccgacattcctgatcgtcagcgcctcgacaacgtagtcaacgagtggcgtggagaagtccctcagcgtcggagtgagctggtcaacttcacggcccaccgactggtgcttctgacttatcgactcctgcaaatgattgaggagcgtaacgacagagttgagcaaagcgtttgcgctgtttaagtgacaggggcgtctgatttgaagttagactaatccaagctgaagttatgaagacgttcactgttctaccaacaaagcaaggatttggaattagtcacctcacgatagatttgattggttaccgggaactattagtccgcaacgacattgctgttcctccgtacagatcgaagtggaatgaggtgagatacatttattggagacggttcttccgtattgacaaagtggagactatagagtttggtcatctcagattcacacgagagatctcgacggacggcaagtcggtgaacatcaagattcggaagcccgaacgtgggccttccgagcccaatgcaaatgacctccaagctgccgacattggctctagatgggggttggatgcgagtaaatgcaacctcttggtcaccacaaaccaggacgacgaaacggttgtgtgctctggcaaagagtatcgcgaagacgcttacattacgaagagcagccagaagcaattgagatggatacgggatcgtccggacactggagctgcctttgcgagcatgccgacgaagaggagcatgttgctaaagcggtggcgggagtacgtcccatttatgacgcagcacctgcatctgctagtgacccccatgcagcacaaatcgtacagtcgccatcgacttcgaaggagcttctttaaaaagaagaacctatgtgagctctaccagaaacttgtatgtcacggagagcgaatttttatcgtcattgacaaccggagtaacggcgatccaaatggagcgatcaaagggaagccatccgcactcgtgcagaaattggcgctggagttgtcaaagacgtcgaactgtacggtcatcattattgccgagttccggatcagcaaagtgcactttggttaccaacaagaactgtccaagcaatacccgtatcgaaaggccgctgtccacgtacgcgcagtccacgaaagacgagccacgtacccagtttacggcttactccatttcagaaacaaaggttgttctggtatgagtgtgaactgggacgtgaatgcttcgaagaatatgctgcgcctgctcgattgtgaactcaacgagactcgcccagtcacctacacgcatcaagcaaacagatagataacaatacctttctagtgtcgctgtgtgcctatctaggggtgaggaagattacattgtgatagccggctcagaaattagcccttttggactctgtaggctacgtacctataggacacccttaggagaataatgggttaaacaaaggctcaatgaagcctggttgatttctgcatgaaatatttttcaaaacggtgatgtcctcctgtggatgaatatacttgtctttccgacagatagctcagcacgattgttgtctgctcgctttgcagaccattttgaccaattttaacacgtaaagccttaattgtgtccaattaaaatggttaaatgtaggtttgacattctgacaccttccgacaaatatgtgtctgaagtatttccaaaatatcaatatcttcatgcaaacaacaacggtaaaacgtatttttcaaatataccagccattcgtacaatgaggagtggccctaatgtaggaacactgaagaagatgaggtcgttggttggatgtccaccgttggtgtacactttaccagaagagtaacgtagccatagatcgtgcgtgatgcgtgggacataagcaaaataaacaaaggctgtgcttatgtcttcaatatgccacgggaagaccgcaaggtagcctgagtgctgtgcagctggaataaagagatcgcgcctcacgttgtggacgtcgcgacgctggaccatctgacgcgggagcggcttgaacgcttgcaggagctcctgtttagcacatgcacaggacgcaaggaacaccggttcaacgtgagtagaaaagtgcttggcgcttacctggtacggtactactcgcagcttaaagcgctagttcctgcagtgccgatcatcatcctgcttagtatctgcgggcatctcgtcaactgcattgcttgagtggtctgtagctggcggctccacctgctcaaaaccaagaacaaactcaagacaaggcgcacacgttgccgagaagatggccaccttttggctgtgattgatgggcttgtcgcctcgaacaaggtcatggctgcatcgtcgaggcggtactactaaataataagggtccacacgcaacaacggaagaaggacaactgcaagagccatcagatcaagaaccaaatcgcaagcacagaaaaaagctgcgaacctgtcggccacatggcttgcgtggtacaagaggataccacgcgtgtgggactcaaccgatagaagtcggagtgtcgccacgtggtcgcctccatgaagctctccctcgacgatagcttcgttgtgaatgtcacagcggaagaattcaagaaccaagtcctcaacaccggccgcgcggaaattggactgctggagtttctaaagctagcggcgtcaacgaagggagccgggagtatcctgtgtgcgctgcacccgctgcatattccggtatattggacgagcaaatcatggtctacaggcaccaactcgtcataggaagcaccgaagaccctgcacatatcgacgcgcaagacatgctcggcattgtaggtcatgtgtgagaacggtgaagttaattcattccaatatatgtattcattcgacataacatcgctgcttaacaagacaacatattcatgtgtacacatccacgcgcgcaggtcacctaatcaaagcgtaggctgcacaccgcacgatcgcaccgcgctcactcacccaccacatgcacagatcctcagcaatactgcacggtttaaagcactgatcccgacccaatcttgatcataaacaccggccaaaacgtggctgttgacgaagctagtattgcgtgtcgttcgcaatacgctcgccatattatacttttctatccccaaaaccagacagggaaatatcacttcaagctgtatgcttgttgctgctcgacatcatggtatgtcgtgagtttcaaattgcactgtgcaagtgaacaaatagaccgtttggacggcgtggttccaagtccagaggtattacagcttgttgatctgacagcgaagtcctttgaaatttgttcccacgtaattgaagttgtggagtctttgaaaggatctaatcgcgttgtcaataccgataatatctacacctcctgcctgctactagaatcactaaggtcgattggcatgtatggtcgtggtacagtgctcacatccagcaaacacttcccccacttcacaatgatccgaaaagctgatggaaagcctagaggctacatgaaacaaggcgtgtgcttagagtaacatattgtagcggccagttggatagattgctctattgtgaatacagtctctaatgttgacgcctcctcttcctctacggtatatcatcgcataaaggaggaacatgttgcgtttaacgtcccggcctgcctcggtgaatacaacgcggggatgcagggagtcaaccgtcatgatcagcttcgcggtcggatttcgcttgccgatggtcactcatttcagaagtggcataaaaaattagcaatggctatgattgatatcgcgagatgtaatgcgtatgtatgcgataacttggcacgtgatacaagcgagatggatgttgcacagcctcgcaataatgcaagggcaagcgcccgtgacggtcaccgggcgtttgtcattccacttgtgcgagaattattcaatggagattggaagaagtccattgacagtgatgacgtaattgtgtacacttcgaacacaaaacccatgacaacagctgccaatttgaccagaaatacgaatgagttagaaacgccagcacatacatgtgtagcaaa

SEQ ID NO: 164 - DNA, 9306 bp, Phytophthora sp.
  source 1..9306: mol_type = other DNA
ttgttcaccgagagcttacgctctctagcacttcctctgtgcaaggtgctgtgtgtgccccgtcacactcatacacgtgcgcacacgtgtaagcttaagtagtgggtctaagcagacccattacagcaacagtgcgtcagaaattcagccatgacagacttgcttcgcacaatcatcaaaaacatctaccatactcagcacgtggaagacatagtgttttatttcatgagctgatggctttcatagacttggaaggtgagcatccgcagaaactgctcaattccggacgattcctaggcctcactcgtgtcgttcgacgaattctcctgctgtgggacccgctcgtcgaatggtacgacgagcgtattgcaaaagctcacccgaaaatgtggttccgcccgcggcgtttcccctggtacgagacaaaatggagatggtgcaggttctttccctgctcgagcctatttcgattctgaatcaagctgggcatggtgagaattgtatccagtgcaatgtgttactggaactatgcaaacaacggatctcacttcttcacaccacacagccgtgaaaggactgccgtttgaccaaggatgaacagcgattttccgtccagaggactggtatctacgacacgtacgttgctgcacaaaatgtttcaccgggtcttttcaggtgataaacagaccgttatgtcatggacaaatgctcctacacgttcgagatgcaactcctcctacatcctaacttcaagaacccagatggtgcgctcaagcggattgtcatcttgtgcaacctgcaggctggagcatctcagcaggtgacagagcgccattacaccaaggttcgccgcattgtcctggatggtgtgcgaaagatcatggtcgccgtggactcaacaccgaacacgcccgaagtcatcgctcccccaccagccgtcgtcttctccgacgacgtcatgacgctttttgcagacacagcagatgagatacttccacagccactaacgacgttgacggctttacacgagcagcggatcgacgacgagtttgagcgttggttgacgacgccaaccacacttcgaggggctagcttcagtgattttgagtcagtgctcaccttttggaaacgccagcaagacatggacaccttccgcctgctgcctctggtggcgcgcgtggtcttctcactgccatcttcgtcggcccagatcgagggacttcgggacagcaagtagaatggtagtgatgcctcagcgcgactcgttggcgccacacaatgtgaacatgctgacgttcctcaactccaacagaagctacgtgaatattgcgcagtgtactaagctctcagctggcactgcgtcggggcgcgtctcacccaacgtgatggtcaacattctgcaggagcaagacgacaattggaattctctcgcggagtttttccccgctgccagtttcgacttgggactctccgatgaagaagacggcggtaccggaagagatagtcagtattggttacttggcgacagagatggtttgttttgactgagcttgcaatttgttgaatgtgcgctcgactatgtgatgatgttgatgtcttggtgacagcgtcgtgcgacttgccgaatgcaatgtgaatcttggtgctgctgctgccggtatggaggcccctgaaatggactctcagaggtggcagcggcttggtcacggttcaggcggacttttcggctgtcaaaaaggttgtgatatattaatatatgatcaccaatgtgcatactcacttacacgtcacggtaatcaatgatcatgcccatctacgcgtcctgctcaaccttttctgcttctgtcgcagcagctcggtagcgcattcttggatggcacactgtgtgtcttgctggatttgctggatatcagcgcgagctcgcgtcttccgacgtcttgcctctgtctgttgcgcgggagctttgggtgctggtgatcgcgcgagtctgcgtggttgatgaggaggtgctttaggtgacatagcccgcgccgacaccttaaactgtcgaatctcgatttgtattgggtctccggttgatctcacccagacccgcttcgcgttgccgttccgccatatctgcatcaacatttaggttgagtggtgagccacagaagggggtgcggcgtcggaaacgtgaatcgccatgagctcgcgggcctcggtttctgcgacttttttcgcgacaataactgtttgtcgtaagctgtcctcgatagggtcgtggttagcattgcgatctttctgctcgcgaagtcgtgaagcgctgtcgcgctggtctataatatctccgattagttcagctacacgagcctccatccgtgtaattgtttgatcttggatgctcaggagcccaatgtcgatgcgtgaagctatctacccactcaaaaaaacgtgggctcgctcttcagcgatccgtgctgcgaccttcgactggccttccaagtgctgtagccagggattgatagtagtggttttgacccttagtactaagaccaaatatccgcctcgctcccgttagatattaatttatcactactaaaccagcagcgatgactccgaactaagactaaatattgaaactataagtactaaacttaattataaaatcggctcaccacagacttcgcttgcttgactccatccgctcaatctcggcacgattgtgcctcagcacgagcagacgttgtgcgcgctcgttatcggttcgcgttctcagtgagctcatgacgaaggacccagtcgacaaaaatcgttcttgaaatgcagtagaagaattccggcccagccaaactcgtgcaagtttcgcgatcgatgggaaagctttttctccagattcagcgaaccaactgcagacgtcaatgtgttcagtccagatggaatctgccgtgttgtcgggagcgtagcggccgaccaacgctgggatgttacgtcaggagcggtagtttcattcatgtccgagtgggcaaggtcgatcactgtatcctgtctaggcgcagagttgctggagatgctactcgaagtcagctcttgtgaagcatcggcattgccgaaaaaggtgctaacgcaggcgggactacagaagctgtatacatattgagttagtaagtacgcctacctggcttatctggctagccgtaccgttttgatagatctgagttattacaggggtcgttgctgtagaggtgatgcacctgtcacccgcaaatactacaagggggcgtctcgtccaggccttcaaagtagcagtcggtcttggcgcacttcatcgttgcgagagatgagacggaatttgtagaattagagcgagatgaggagggaggggggaagtgttgattttcgccggagatccacccattgcgtgcggtcatcaatgacccaaaggctgtccaggcattcacggaattagtagagctatagtactaactattcgaaatctatacaactaaggcgtttagttctactaaagccgaagccacggcataatatgcttagtactaatagttaaacactactattagtactaacaacactatcgtggagactactatcaatccctggctgaagctgacctgaaatgcggttcgacgcctcggcagcccgcgtgagctcttgttcgggtagggtttgctggtgactaattctatcgattagaacatcgatgtgtttttcaacgtgcagggatacctccttctcgacatgttgggctacagagagcatagcgttttcaacgagttcgcaaacggcggcttcatgcgcgacgtgcgcctttgcaagaacttgggcctgttggtgggcgctctcttgtagatgctgtaggacagattgtatccgtgtgtcgacgtgtagctctagcgtcgacggatccccacaggtttgctgaatagccagcacaagtgcgttgctcctagcctccgcttcctctctcacagccgcgacgtgaagctcaacaaatccctgctgctctgcttcgtggcgagcctgccgctgccggagcttagcctgatgcccagcaatgttgtttgcgtgagccgacacgtaagctagcgccttcccgatcctttcgccatcaacacggtagtgctcggggagttcgataatcggaagatcgtccccactcatgtgtgatcgatcctggaaggtcgcacgcaatatgacttgcaaaacgctaggtgagcaggtgtaaatcgttgcgagccaggtcggttttgaccaataaaacgagatcttgttagccaatcaaaaccaacaatttgcaggccgaaccaaattctcgccctagttcgaatcgtaagaaatgtaagcgaaccaagccccccccccctccggttcaggtaaaaaagaaaagaagggtgaaaccgtggttccagttcagttcgtcctaggggtgggaaattcacgaagtgtaggaaagtgtaatagacttgcgaggagagctgctggtctttctactcagtccacaaatggaaagttctgtccgtgcagctctctcaagtctaacctaaagctctacactgccagtcatactgtacaccactcgtacaattgcctctctcacattgatggtcgcacgctcttcaattgttttcgtgaacccagcagccgcagtcaacggcaattcgaagatgtcgttgggtacgccccgaggcttcactgctccagcaagttctcacttttcctttcgcaccgtcaagcgcagtcactggtctccaacctccatcgcctgttagcagcgttgtatcaagccctatgtcggggaagggtgcgccaggaaagcgcaagcgcaagtgacacccatttgatgacgggaagagcgatagaaatggcactgaaggcgcatgcccgaactcggagggcgatgatgacctcgatgaggatgacgtagattatgaggacgcccaaccagtaacgacacgtccaagcaagaggcctgacgtcgcggagcgcatgaagggcaacaagaataccagcctcgtatatgtgaagatgtcactaggttccttcttgacaggcgaggagaaactgttgctgtcattcgatggcattctcgtagacttgagcattggattgttaaatgcctacgcgctgctgaacatccacatgatacggtgtgtgacaaaggacttcccattcctcgatttgagcagaacttcgtttgccaatgcttgacagacgtaatgtttaacgacagcaacgtgcacatagacgctgaactacatatatcgttggagctatacaatttgttgagaggctctaacgcttctcacgggcgtcgcgctggtatcaagaacgggtggcaacaggcgcagctcgggagatgatgaccgctatccagcatgcactcaaaaatgagtttccttcgccggtttaataaggtgctgcgggtatggtgtagacagaagcactggtagcacacattattgccccagagtttgagcggactacacccgacatccctgatcgtcagcgcctcgacaacgtagtcaacgagtggcgtggagaagtccctcagcgtcggagtgagctggtcaacttcacggcccaccgactggtgcttctgacttatcgactcctgcaaatgattgaggagcgtaacgacagagttgagcaaagcgtttgcgctgtttaagtgacaggggcgtctgatttgaagttagactaatccaagctgaagttatgaagacgttcactgttctaccaacaaagcaaggatttggaattagtcacctcacgatagatttgattggttaccgggaactattagtccgcaacgacattgctgttcctccgtacagatcgaagtggaatgaggtgagatacatttattggagacggttcttccgtattgacaaagtggagactatagagtttggtcatctcagattcacacgagagatctcgacggacggcaagtcggtgaacatcaagattcggaagcccgaacgtgggccttccgagcccaatgcaaatgacctccaagctgccgacattggctctagatgggggttggatgcgagtaaatgcaacctcttggtcaccacaaaccaggacgacgaaacggttgtgtgctctggcaaagagtatcgcgaagacgcttacattacgaagagcagccagaagcaattgagatggatacgggatcgtccggacactggagctgcctttgcgagcatgccgacgaagaggagcatgttgctaaagcggtggcgggagtacgtcccatttatgacgcagcacctgcatctgctagtgacccccatgcagcacaaatcgtacagtcgccatcgacttcgaaggagcttctttaaaaagaagaacctatgtgagctctaccagaaacttgtatgtcacggagagcgaatttttatcgtcattgacaaccggagtaacggcgatccaaatggagcgatcaaagggaagccatcggcactcgtgcagaaattggcgctggagttgtcaaagacgtcgaactgtacggtcatcattattgccgagttccggatcagcaaagtgcactttggttaccaacaagaactgtccaagcaatacccgtatcgaaaggccgctgtccacgtacgcgcagtccacgaaagacgagccacgtacccagtttacggcttactccatttcagaaacaaaggttgttctggtatgagtgtgaactgggacgtgaatgcttcgaagaatatgctgcgcctgctcgattgtgaactcaacgagactcgcccagtcacctacacgcatcaagcaaacagatagataacaatacctttctagtgtcgctgtgtgcctatctaggggtgaggaagattacattgtgatagccggctcagaaattagcccttttggactctgtaggctacgtacctataggacacccttaggagaataatgggttaaacaaaggctcaatgaagcctggttgatttctgcatgaaatatttttcaaaacggtgatgtcctcctgtggatgaatatacttgtctttccgacagatagctcagcacgattgttgtctgctcgctttgcagaccattttgaccaattttaacacgtaaagccttaattgtgtccaattaaaatggttaaatgtaggtttgacattctgacaccttccgacaaatatgtgtctgaagtatttccaaaatatcaatatcttcatgcaaacaacaacggtaaaacgtatttttcaaatataccagccattcgtacaatgaggagtggccctaatgtaggaacactgaagaggatgaggtcgttggttggatgtccaccgttggtgtacactttaccagaagagtaacgtagccatggatcgtgcgtgatgcgtgggacataagcaaaataaacaaaggctgtgcttatgtcttcaatatgccacgggaagaccgcaaggtagcctgagtgctgtgcagctggaataaagagatcgcgcctcacgttgtggacgtcgcgacgctggaccatctgacgcgggagcggcttgaacgcttgcaggagctcctgtttagcacatgcacaggacgcaaggaacaccggttcaacgtgagtagaaaagtgcttggcgcttacctggtacggtactactcgcagcttaaagcgctagttcctgcagtgccgatcatcatcctgcttagtatctgcgggcatctcgtcaactgcattgcttgagtggtctgtagctggcggctccacctgctcaagaccaagaacaaactcaagacaaggcgcacacgttgccgagaagatggccaccttttggctgtgattgatgggcttgtcgcctcgaacaaggtcatggctgcatcgtcgaggcggtactactaaataataagggtccacacgcaacaacggaagaaggacaactgcaagagccatcagatcaagaaccaaatcgcaagcacagaaaaaagctgcgaacctgtcggccacatggcttgcgtggtacaagaggataccacgcgtgtgggactcaaccgatagaagtcggagtgtcgccacgtggtcgcctccatgaagctctccctcgacgatggcttcgttgtgaatgtcacagcggaagaattcaagaaccaagtcctcaacaccggccgcgcggaaattggactgctggagtttctaaagctagcggcgtcaacgaagggagccgggagtatcctgcgtgcgctgcacccgctgcatattccggtatattggacgagcaaatcatggtctacaggcaccaactcgtcataggaagcaccgaagaccctgcacatatcgacgcgcaagacatgctcggcattgtaggttatgtgtgagaacggtgaagttaattcattccaatatatgtattcattcgacataacatcgctgcttaacaagacaacatattcatgtgtacacatccacgcgcgcaggtcacctaatcaaagcgtaggctgcacaccgcacgatcgcaccgcgctcactcacccaccacatgcacagatcctcagcaatactgcacggtttaaagcactgatcccgacccaatcttgatcataaacaccggccaaaacgtggctgttgacgaagctagtattgcgtgtcgttcgcaatacgctcgccatattatagtgttctatccccaaaaccagacagggaaatatcacttcaagctgtatgcttgttgctgctcgacatcatggtatgtcgtgagtttcaaattgcactgtgcaagtgaacaaatagaccgtttggacggcgtggttccaagtccagaggtattacagcttgttgatctgacagcgaagtcctttgaaatttgttcccacgtaattgaagttgtggagtctttgaaaggatctaatcgcgttgtcaataccgataatatctacacctcctgcctgctactagaatcactaaggtcgattggcatgtatggtcgtggtacagtgctcacatccagcaaacacttcccccacttcacaatgatccgaaaagctgatggaaagcctagaggctacatgaaacatggcgtgtgcttagagtaacatatcgtagcggccagttggatagatggctctattgtgaatacagtctctaatgttgacgcctcctcttcctctacggtatatcgtcgcataaaggaggaacatgttgcgtttaacgtcccgacctgcctcggtgaatacaacgcggggatgcagggagtcaaccgtcatgatcagcttcgcggtcggatttcgcttgccgatggtcactcatttcagaagtggcataaaaaattagcaatggctatgattg

SEQ ID NO: 165 - DNA, 9091 bp, Phytophthora sp.
  source 1..9091: mol_type = other DNA
acgtgcgcacacgtgtaagcttaagtagtgggtctaagcagacccattacagcaacagtgcgtcagaaattcagccatgacagacttgcttcgcacaatcatcaaaaacatctaccatactcagcacgtggaagacatagtgttttatttcatgagctgatggctttcatagacttggaaggtgagcatccgcagaaactgctcaattccggacgattcctaggcctcactcgtgtcgttcgacgaattctcctgctgtgggacccgctcgtcgaatggtacgacgagcgtattgcaaaagctcacccgaaaatgtggttccgcccgcggcgtttcccctggtacgagacaaaatggagatggtgcaggttctttccctgctcgagcctatttcgattctgaatcaagctgggcatggtgagaattgtatccagtgcaatgtgttactggaactatgcaaacaacggatctcacttcttcacaccacacagccgtgaaaggactgccgtttgaccaaggatgaacagcgattttccgtccagaggactggtatctacgacacgtacgttgctgcacaaaatgtttcaccgggtcttttcaggtgataaacagaccgttatgtcatggacaaatgctcctacacgttcgagatgcaactcctcctacatcctaacttcaagaacccagatggtgcgctcaagcggattgtcatcttgtgcaacctgcaggctggagcatctcagcaggtgacagagcgccattacaccaaggttcgccgcattgtcctggatggtgtgcgaaagatcatggtcgccgtggactcaacaccgaacacgcccgaagtcatcgctcccccaccagccgtcgtcttctccgacgacgtcatgacgctttttgcagacacagcagatgagatacttccacagccactaacgacgttgacggctttacacgagcagcggatcgacgacgagtttgagcgttggttgacgacgccaaccacacttcgaggggctagcttcagtgattttgagtcagtgctcaccttttggaaacgccagcaagacatggacaccttccgcctgctgcctctggtggcgcgcgtggtcttctcactgccatcttcgtcggcccagatcgagggacttcgggacagcaagtagaatggtagtgatgcctcagcgcgactcgttggcgccacacaatgtgaacatgctgacgttcctcaactccaacagaagctacgtgaatattgcgcagtgtactaagctctcagctggcactgcgtcggggcgcgtctcacccaacgtgatggtcaacattctgcaggagcaagacgacaattggaattctctcgcggagtttttccccgctgccagtttcgacttgggactctccgatgaagaagacggcggtaccggaagagatagtcagtattggttacttggcgacagagatggtttgttttgactgagcttgcaatttgttgaatgtgcgctcgactatgtgatgatgttgatgtcttggtgacagcgtcgtgcgacttgccgaatgcaatgtgaatcttggtgctgctgctgccggtatggaggcccctgaaatggactctcagaggtggcagcggcttggtcacggttcaggcggacttttcggctgtcaaaaaggttgtgatatattaatatatgatcaccaatgtgcatactcacttacacgtcacggtaatcaatgatcatgcccatctacgcgtcctgctcaaccttttctgcttctgtcgcagcagctcggtagcgcattcttggatggcacactgtgtgtcttgctggatttgctggatatcagcgcgagctcgcgtcttccgacgtcttgcctctgtctgttgcgcgggagctttgggtgctggtgatcgcgcgagtctgcgtggttgatgaggaggtgctttaggtgacatagcccgcgccgacaccttaaactgtcgaatctcgatttgtattgggtctccggttgatctcacccagacccgcttcgcgttgccgttccgccatatctgcatcaacatttaggttgagtggtgagccacagaagggggtgcggcgtcggaaacgtgaatcgccatgagctcgcgggcctcggtttctgcgacttttttcgcgacaataactgtttgtcgtaagctgtcctcgatagggtcgtggttagcattgcgatctttctgctcgcgaagtcgtgaagcgctgtcgcgctggtctataatatctccgattagttcagctacacgagcctccatccgtgtaattgtttgatcttggatgctcaggagcccaatgtcgatgcgtgaagctatctacccactcaaaaaaacgtgggctcgctcttcagcgatccgtgctgcgaccttcgactggccttccaagtgctgtagccagggattgatagtagtggttttgacccttagtactaagaccaaatatccgcctcgctcccgttagatattaatttatcactactaaaccagcagcgatgactccgaactaagactaaatattgaaactataagtactaaacttaattataaaatcggctcaccacagacttcgcttgcttgactccatccgctcaatctcggcacgattgtgcctcagcacgagcagacgttgtgcgcgctcgttatcggttcgcgttctcagtgagctcatgacgaaggacccagtcgacaaaaatcgttcttgaaatgcagtagaagaattccggcccagccaaactcgtgcaagtttcgcgatcgatgggaaagctttttctccagattcagcgaaccaactgcagacgtcaatgtgttcagtccagatggaatctgccgtgttgtcgggagcgtagcggccgaccaacgctgggatgttacgtcaggagcggtagtttcattcatgtccgagtgggcaaggtcgatcactgtatcctgtctaggcgcagagttgctggagatgctactcgaagtcagctcttgtgaagcatcggcattgccgaaaaaggtgctaacgcaggcgggactacagaagctgtatacatattgagttagtaagtacgcctacctggcttatctggctagccgtaccgttttgatagatctgagttattacaggggtcgttgctgtagaggtgatgcacctgtcacccgcaaatactacaagggggcgtctcgtccaggccttcaaagtagcagtcggtcttggcgcacttcatcgttgcgagagatgagacggaatttgtagaattagagcgagatgaggagggaggggggaagtgttgattttcgccggagatccacccattgcgtgcggtcatcaatgacccaaaggctgtccaggcattcacggaattagtagagctatagtactaactattcgaaatctatacaactaaggcgtttagttctactaaagccgaagccacggcataatatgcttagtactaatagttaaacactactattagtactaacaacactatcgtggagactactatcaatccctggctgaagctgacctgaaatgcggttcgacgcctcggcagcccgcgtgagctcttgttcgggtagggtttgctggtgactaattctatcgattagaacatcgatgtgtttttcaacgtgcagggatacctccttctcgacatgttgggctacagagagcatagcgttttcaacgagttcgcaaacggcggcttcatgcgcgacgtgcgcctttgcaagaacttgggcctgttggtgggcgctctcttgtagatgctgtaggacagattgtatccgtgtgtcgacgtgtagctctagcgtcgacggatccccacaggtttgctgaatagccagcacaagtgcgttgctcctagcctccgcttcctctctcacagccgcgacgtgaagctcaacaaatccctgctgctctgcttcgtggcgagcctgccgctgccggagcttagcctgatgcccagcaatgttgtttgcgtgagccgacacgtaagctagcgccttcccgatcctttcgccatcaacacggtagtgctcggggagttcgataatcggaagatcgtccccactcatgtgtgatcgatcctggaaggtcgcacgcaatatgacttgcaaaacgctaggtgagcaggtgtaaatcgttgcgagccaggtcggttttgaccaataaaacgagatcttgttagccaatcaaaaccaacaatttgcaggccgaaccaaattctcgccctagttcgaatcgtaagaaatgtaagcgaaccaagcccccccccccctccggttcaggtaaaaaagaaaagaagggtgaaaccgtggttccagttcagttcgtcccaggggtgggaaattcacgaagtgtaggaaagtgtaatagacttgcgaggagagctgctggtctttctactcagtccacaaatggaaagttctgtccgtgcagctctctcaagtctaacctaaagctctacactgccagtcatactgtacaccactcgtacaattgcctctctcacattgatggtcgcacgctcttcaattgttttcgtgaacccagcagccgcagtcaacggcaattcgaagatgtcgttgggtacgccccgaggcttcactgctccagcaagttctcacttttcctttcgcaccgtcaagcgcagtcactggtctccaacctccatcgcctgttagcagcgttgtatcaagccctatgtcggggaagggtgcgccaggaaagcgcaagcgcaagtgacacccatttgatgacgggaagagcgatagaaatggcactgaaggcgcatgcccgaactcggagggcgatgatgacctcgatgaggatgacgtagattatgaggacgcccaaccagtaacgacacgtccaagcaagaggcctgacgtcgcggagcgcatgaagggcaacaagaataccagcctcgtatatgtgaagatgtcactaggttccttcttgacaggcgaggagaaactgttgctgtcattcgatggcattctcgtagacttgagcattggattgttaaatgcctacgcgctgctgaacatccacatgatacggtgtgtgacaaaggacttcccattcctcgatttgagcagaacttcgtttgccaatgcttgacagacgtaatgtttaacgacagcaacgtgcacatagacgctgaactacatatatcgttggagctatacaatttgttgagaggctctaacgcttctcacgggcgtcgcgctggtatcaagaacgggtggcaacaggcgcagctcgggagatgatgaccgctatccagcatgcactcaaaaatgagtttccttcgccggtttaataaggtgctgcgggtatggtgtagacagaagcactggtagcacacattattgccccagagtttgagcggactccacccgacattcctgatcgtcagcgcctcgacaacgtagtcaacgagtggcgtggagaagtccctcagcgtcggagtgagctggtcaacttcacggcccaccgactggtgcttctgacttatcgactcctgcaaatgattgaggagcgtaacgacagagttgagcaaagcgtttgcgctgtttaagtgacaggggcgtctgatttgaagttagactaatccaagctgaagttatgaagacgttcactgttctaccaacaaagcaaggatttggaattagtcacctcacgatagatttgattggttaccgggaactattagtccgcaacgacattgctgttcctccgtacagatcgaagtggaatgaggtgagatacatttattggagacggttcttccgtattgacaaagtggagactatagagtttggtcatctcagattcacacgagagatctcgacggacggcaagtcggtgaacatcaagattcggaagcccgaacgtgggccttccgagcccaatgcaaatgacctccaagctgccgacattggctctagatgggggttggatgcgagtaaatgcaacctcttggtcaccacaaaccaggacgacgaaacggttgtgtgctctggcaaagagtatcgcgaagacgcttacattacgaagagcagccagaagcaattgagatggatacgggatcgtccggacactggagctgcctttgcgagcatgccgacgaagaggagcatgttgctaaagcggtggcgggagtacgtcccatttatgacgcagcacctgcatctgctagtgacccccatgcagcacaaatcgtacagtcgccatcgacttcgaaggagcttctttaaaaagaagaacctatgtgagctctaccagaaacttgtatgtcacggagagcgaatttttatcgtcattgacaaccggagtaacggcgatccaaatggagcgatcaaagggaagccatcggcactcgtgcagaaattggcgctggagttgtcaaagacgtcgaactgtacggtcatcattattgccgagttccggatcagcaaagtgcactttggttaccaacaagaactgtccaagcaatacccgtatcgaaaggccgctgtccacgtacgcgcagtccacgaaagacgagccacgtacccagtttacggcttactccatttcagaaacaaaggttgttctggtatgagtgtgaacagggacgtgaatgcttcgaagaatatgctgcgcctgctcgattgtgaactcaacgagactcgcccagtcacctacacgcatcaagcaaacagatagataacaatacctttctagtgtcgctgtgtgcctatctaggggtgaggaagattacattgtgatagccggctcagaaattagcccttttggactctgtaggctacgtacctataggacacccttaggagaataatgggttaaacaaaggctcaatgaagcctggttgatttctgcatgaaatatttttcaaaacggtgatgtcctcctgtggatgaatatacttgtctttccgacagatagctcagcacgattgttgtctgctcgctttgcagaccattttgaccaattttaacacgtaaagccttaattgtgtccaattaaaatggttaaatgtaggtttgacattctgacaccttccgacaaatatgtgtctgaagtatttccaaaatatcaatatcttcatgcaaacaacaactgtaaaacgtatttttcaaatataccagccattcgtacaatgaggagtggccctaatgtaggaacactgaagaggatgaggtcgttggttggatgtccaccgttggtgtacactttaccagaagagtaacgtagccatggatcgtgcgtgatgcgtgggacataagcaaaataaacaaaggctgtgcttatgtcttcaatatgccacgggaagaccgcaaggtagcctgagtgctgtgcagctggaataaagagatcgcgcctcacgttgtggacgtcgcgacgctggaccatccgacgcgggagcggcttgaacgcttgcaggagctcctgtttagcacatgcacaggacgcaaggaacaccggttcaacgtgagtagaaaagtgcttggcgcttacctggtacggtactactcgcagcttaaagcgctagttcctgcagtgccgatcatcatcctgcttagtatctgcgggcatctcgtcaactgcattgcttgagtggtctgtagctggcggctccacctgctcaagaccaagaacaaactcaagacaaggcgcacacgttgccgagaagatggccaccttttggctgtgattgatgggcttatcgcctcgaacaaggtcatggctgcatcgtcgaggcggtactactaaataataagggtccacacgcaacaacggaagaaggacaactgcaagagccatcagatcaagaaccaaatcgcaagcacagaaaaaagctgcgaacctgtcggccacatggcttgcgtggtacaagaggataccacgcgtgtgggactcaaccgatagaagtcggagtgtcgccacgtggtcgcctccatgaagctctccctcgacgatggcttcgttgtgaatgtcacagcggaagaattcaagaaccaagtcctcaacaccggccgcgcggaaattggactgctggagtttctaaagctagcggcgtcaacgaagggagccgggagtatcctgtgtgcgctgcacccgctgcatattccggtatattggacgagcaaatcatggtctacaggcaccaactcgtcataggaagcaccgaagaccctgcacatatcgacgcgcaagacatgctcggcattgtaggtcatgtgtgagaacggtgaagttaattcattccaatatatgtattcattcgacataacatcgctgcttaacaagacaacatattcatgtgtacacatccacgcgcgcaggtcacctaatcaaagcgtaggctgcacaccgcacgatcgcaccgcgctcactcacccaccacatgcacagatcctcagcaatactgcacggttcaaagcactgatcccgacccaatcttgatcataaacaccggccaaaacgtggctgttgacgaagctagtattgcgtgtcgttcgcaatacgctcgccatattatacttttctatccccaaaaccagacagggaaatatcacttcaagctgtatgcttgttgctgctcgacatcatggtatgtcgtgagtttcaaattgcactgtgcaagtgaacaaatagaccgtttggacggcgtggttccaagtccagaggtattacagcttgttgatctgacagcgaagtcctttgaaatttgttcccacgtaattgaagttgtggagtctttgaaaggatctaatcgcgttgtcaataccgataatatctacacctcctgcctgctactagaatcactaaggtcgattggcatgtatggtcgtggtacagtgcgcacatccagcaaacacttcccccacttcacaatgatccgaaaagctgatggaaagcctagaggctacatgaaacatggcgtgtgcttagagtaacatatcgtagcggccagttggatagatggctctattgtgaatacagtctctaatgttgacgcctcctcttcctctacggtatatcgtcgcataaaggaggaacatgttgcg

SEQ ID NO: 166 - DNA, 13737 bp, Phytophthora sp.
  source 1..13737: mol_type = other DNA
ctgcacctcagaagctcattgatttgctcgacggcgcagagacctcagtagatatcgctatgttcatcttgacgcatcctgaaccgacagacgctatcatccgggcctcccagcgtgctatcgttgatcgggcacaagtctccgagaaaagctcagctatgatgatcgaaaacggggtcaacgtatttcacgcaaaggccccaaactcatgcactggaagatggtctgttgccttgcaaaacaactggaaaggtgagatacccgcggtactgttcatctgtagcccacatacacacacaggacagggttctgcaacttgagcttttgcgcttatgcacaatcgccacaataaacggagctgttctgcgtggcggcttggagcttcggccgagtggctggctcaagagtttgtctgcagtgagaacgagagagaaatgtagaggagatgaaggtgctccgaggttttcgggatcccgagttttggagttttggatcgcccggtgctacactgctttcgtccggaccggtaagaaggacatcaaggccatctgcgaggagcacccgggctggaatcgacggacggtcgcgcattactacgccatgtacgaaaatggagagagtttgcagccaaggtgtggcattgtggcaccggtcgagcattctgaaggcgcgtgcagaaggctgcaccattcgcatgatcgtcgacgagcgaagcgcgctccaaaagaaaaaaaacatgacttgggtacgcaagtgcggggatcccggtcaagactggacgcgtggccagcttcatggtccacaacaagtggaccatcgtcaacggcgagttcattttacaaggcacgggcaactacagcgcggttgcgttcgatggagcccgccacgcagagacctttgagacgcgcacgggtcaggcgcaccttgattcgatcaagcgcgagttcgagcagctctgggaagaaggacgggtgcttcaatgggcctcgaggcgtactgcttgcttcatgtacttgggggaggacgaggatgaaacgaaaatgtacccccccccggggagagcaggacgaggacgaggacgtttatgtgtaggatatggttgaacgtgcaagccagtaagtaactttgttggtgcccactttgacttgggcttacattggccgtgcaggagtgccatcgtagttacaatagagctcgaggatcatgatgagtcctctcagtccttaccagccaaaaaaggcaaactgcacctagcgcattgagctggcaacggcagccccatcgacggcggctccagctacaacgggatctccgtcacttgactcgtcccttcagtccactgttgcttcttcgtcgctcgacaatttgatcgcgtctgctggatcgggttcgttcattgatccgagttcagtagtggtaaacggcgagctgctaccagcgagatcaagtcgacgtaccgcaactgggtggggcctcgcgccgtctcccccgacgccgcgtgctaccgtgaagcactcatcatggacgcatgcccgccaacttcgaccagaacgaggttaccaacacgtgctgggccgagtgcccgatcgcctacccggtcgagtgcggcatggaatgcatccgtcagaacgatgactgtgctatggaggtgcttaacaaggtcggtgctgttgctagcacgtctagtcatcgctaccgttggtgcgtctcagaaactgtggcagctttcaaagggtgcgacgcgcgcattcgactgcgctaacatgatgatcggtacgatgagatccatcatccgttacgtgcgtaacatcaagaccacggacccgcaggcctcgacggacaagattctcaacatcctgtaccagtcgaacaacatcgtgacggacctgccgatggccatttacatttgcatgggctgggacttgccgaggcctctcgatgtctcgggtcgtgtgcttacgacgatgaactggatcttgctaaacgccatcgggtacaaggacgacctcgtgtctagctggagcaagttcaaggctttcttgatcggcgccaacttcacggaggccgccaacaagatcaacgagacggagatcaggacgctgagtgacgccctgaaggccaactccacctgcggctacgacttgcgagtgatgacggacctcacgtgacgaggaaacgcagcataatgcgggtcaagatgagaacgtgatacttgccctcatgctgtccacatcgtgcacacggacggatgctgagtctgtcggtgttgatgcactttcagtcgtcgaccgtaatcgcttccagtttttgagggacgcgaacatttttcttgagtcagggaagaagctggtgttttacctggtgcgtcttcgttatcgagctccgattctccggcagaacgaccagtcggaagtgaaacaattgatgcagagcatgatctggtattcgatcaccggcgcgaagatcgacggtggcaagttgcacgatgccgagtggaccaagaagctggatttcttgaatcctgccaacgaaacactgtcgcagctgtgggaaagtggagagagaagcaccagctcggagcacgaacgttttgcacttattggctggcctgcttccgccgacataatgaacgcagtcgcattgtttggagaagtgtcctgtgtgcctgtaattcttgcacagtgctacaacgctccgaatgcttctcagcgccgaacttgatgaaaatggatgccatttcgctcaaactctcaaaatcttcgagaagagcaatgcatctgttgagtttgtacccctttgccgggagctaggtactgccatcgttgacttgggtgacactacactgatccaggcgtttttcaagaagtatgttgcccagctgaaagacaaggacagacagttatttctccaatggcttccagctctcgtgcgcgcatttggatgggcatacgttagtgctgccacactgaatgccatcgacgtgcaatcaactgaaattcgctcggatcgagctttggaactcgcaaacacactccatgacaacgatgctgcacttctagctctcgtagcgtttgcgctgaagaaagctcacgcacggtgctctggccacgccgatgcattcgtatcttcgggtaagatcatcacacttttaaagcttgcgctggcgtgtggaaaccctcaaatatttgccggtctatcaaccatactgaacaagatcgatggcaatcttctccacacagtgattaatgcgctctcgaaatacgtcaatgactcgagtttacctgaacaacgtgctacgctggcctcacttgcagcgagacgtcgtgaatggctattcgctgagatcgaagacacgaagcaaccactggacttgacgaagcgcgagatctaggcaatgctagccgacaacacaatcggctccgcgaagtacttttcaatcgtcgctgactttttgaaggtgtcaccgatgagcacgagattcctggggttaaggctctacctagtggacacatcgttcgagttcaagtcagtactcttggggactcgccatttcgcgcctcagtatgggggaccagatggcggaatacgcggaccactttaccggtggattggtgacgtcctgggggggggggggggggggggctttggtttgagtcgccataaccttttcggggctacaacagtgatgtcaaatggatgatgagggacggtctaaagttgtagcgggagtagtgcgtgccgcacttcatgcatgcggcaaccaatactgttttcggcatcgtcggtgacaacagctcgtccaagaacccagccatgaccgacatccttcgacgcatcatcaaaacgatgtacaaaacgcagcacgtcgaaggaaagggcactctattaagcgagttatgcagcgttatgaacccggagggtgtgcatccacgctagctcttaaacttccgcacgcatcgattcctgggactcacgcgcgtcgtccgacgcattcttctactctgggatccattggtgcaatggtacgaggagcgggccacaaaagcccgacgtgagaacgtgatgccgccggagtccttcccactagctcgggaaaagatggaatgctctcactgctggagccgatctcgaaactaaatcagattggacaggccgagtcggggggaccaatgcaacgtgcttcttggactctacaagctccgaatatccttgttggacatcaccacagccttgaaggactgaagacggagaatcggttcttccgaccggatgagctgtacgatctcgcatcgacaacccgttcgctacttcacaaagggtttcgtcgggttttcttccggcggtacaccgatcgtgataccatgaacgtctgctcctttgcctttgagatgcaactatttcttcaccccaacttcaagcatccatatggagcgctgataaaggtgttaccaaggtcaatatacaggcaggtgcctcccagcaggtagctgaccgacactacacgaagattcgacgcattatcattgacagcgtccgcagcatcatgacagcggctgacgccgagccgacgtcgactgatatcgttgccccaccgccagctactgggttatcagaggacttcgtggagctcttcacggagacagcgaacgaggtggcaccaccacatagactgcggtgcacgagcaacgcatcgacgatgagctcgaccgctggctgacaacgcctacttcgcttcaagcgattcaacccggtgcgtttgactcagttctgagcttctggaagcgccagcaagagctgggcaacttcctgcttcttcccttggttgcgcgcgtgctgttctcaatgccctcatcatcggcccaaattgaacgcgactttgggatggcaggcaggatggtgacccccaccgcagctcgatggcgccttacaacgtggacatggccacatttctgagctgcagcagaacttacgtgggtatcacccagtacccaaagttgtcgtcgagcacagcaaaggatcaagtaccgtcaaacgccatggtgagcatggagcgagagttggacgacgagttcggatcgttgatgaacaaaggcatcgagttgggactctccgacgacgaaaacgacggtattaccgaaatgtagcgggagcgggctggggcggacgaaaacgtgagagaacgggagcacgtgtggaagtggaaacgggctatagctgccgtggtagagttctagccatgcatgtgcacgaaatgagtgtctttacttttcatcaacacgttctgaccgtgtttggtgttagcttcgctatgcagcatatgtaaatagtatttcgctttcacctatgctttcgtgctggtcgtttgattactagcaactctgtaacacgcattgcagcgcgtacacggatcgcctcctgtgtttcaagctagattcgctcgatttgagatcgatctcgcagtattcgcgaccgtgggcacacaggcgggttgctggaccgggtggaagctgctgaaacccgcgtagttggtgtcctggctgccgctgcttcttttctgcggtttgctccagcggctcgtgataatgcggtggtggagcctcgcgtgcttgcagttgcttctgtagggcccatcgctgcacctgttgaggaagttggcgtcggcgcgaacgttgggacgatggccgtggacttgtctcgacttgatacagatattcacatcggtgttcttgaggacatcactgtattatgctggtcctgtggtacgaactcagagtgccatcagttcacggggttttgtctcggcagtcttcttggccaccacgatggctgggcgaaaccgttcgcctgggtggttgttagccctctcttgctcctgatcctgacgcatgcgaatcgcgatgtcgtgttgatctagcccgccgttgatcagctctactacgcgaacctctgtacgagcggttgttgcctcttgcactacttcaaatttgcaaatgtcgtggcgctcttacgcagcacgcttgtgctcctcctctaccaggttgtgttgcttgaccctggaagactgcaatgtgacttgcaaaacgcctggtgaggagatcaaaagagatcatctttgaccaataaaacgagatcttgtttgccaataaaaaaagcaatttgcagagcgaaccaagttctcgccctagctcggttcgaatgaaaagtaagcgaaccaagccccccccccccccccccctccggttcaggtaaaaaagaaaagaaaagaagggtgaaaccgtggttccagttcagttcgtcccaggggtgggaaattcacgaagtgtaggaaagtgtaatagacttgcgaggagagctgctggtctttctactcagtccacaaatggaaagttctgtccgtgcagctctctcaagtctaacctaaagctctacactgccagtcatactgtacaccactcgtacaattgcctctctcacattgatggtcgcacgctcttcaattgttttcgtgaacccagcagccgcagtcaacggcaattcgaagatgtcgttgggtacgccccgaggcttcactgctccagcaagttctcacttttcctttcgcaccgtcaagcgcagtcactggtctccaacctccatcgcctgttagtagcgttgtatcaagccctatgtcggggaagggtgcgccaggaaagcgcaagcgcaagtgacacccatttgatgacgggaagagcgatagaaatggcactgaaggtgcatgcccgaactcggagggcgatgatgacctcgatgaggatgacgtagattatgaggacgcccaaccagtaacgacacgtccaagcaagaggcctgacgtcgcggagtgcatgaagggcaacaagaataccagcctcgtatatgtgaagatgtcactaggttccttcttgacaggcgaggagaaactgttgctgtcattcgatggcattctcgtagacttgagcattggattgttaaatgcctacgcgctgctgaacatccacatgatacggtgtgtgacaaaggacttcccattcctcgatttgagcagaacttcgtttgccaatgcttgacagacgtaatgtttaacgacagcaacgtgcacatagacgctgaactacatatatcgttggagctatacaatttgttgagaggctctaacgcttctcacgggcgtcgcgctggtatcaagaacgggtggcaacaggcgcagctcgggagatgatgaccgctatccagcatgcactcaaaaatgagtttccttcgccggtttaataaggtgctgcgggtatggtgtagacagaagcactggtagcacacattattgccccagagttcgagcggactccacccgacattcctgatcgtcagcgcctcgacaacgtagtcaacgagtggcgtggagaagtccctcagcgtcggagtgagctggtcaacttcacggcccaccgactggtgcttctgacttatcgactcctgcaaatgattgaggagcgtaacgacagagttgagcaaagcgtttgcgctgtttaagtgacaggggcgtctgattttgaagttagactaatccaagctgaagttatgaagacgttcactgttctaccaacaaagctaggatttggaattagtcacctcacgatagatttgattggtttccgggaactattagtccgcaacgacattgctgttcctccgtacagatcgaagtggaatgaggtgagatacatttattggagacggttcttccgtattgacaaagtggagactatagagtttggtcatcgcagattcacacgagagatctcggcggacggcaagtcggtgaacatcaagattcggaagcccgaacgtgggccttccgagcccaatgcaaatgacctccaagctgccgacattggctctagatgggggttggatgcgagtaaatgcaacctattggtcaccacaaaccaggacgacgaaacggttgtgtgctctggcaaagagtatcgcgaagacgcttacattacgaagagcagccagaagcatttgagatggatacgggatcgtccgggcactggagctgcttttgcgagcatgccgacgaagaggagcatgttgctaaagcggtggcgggagtacgtcccatttatgacgcagcacctgcatctgctagtgacccccgtgcagcacaaatcgtaccgtcgccatcgacttcgaaggagcttctttaaaaagaagaagctatgtgagctctaccagaaacttgtatgtcacggagagcgaatttttatcgtcattgacaaccggagtaacggcgatccaaatggagcgatcaaagggaagccatcggcactcgtgcagaaattggcgctggagttgtcaaagacgtcgaactgtacggtcatcattattgccgagttccggatcagcaaagtgcactttggttaccaacaagaactgtccaagcaatacccgtatcgaaaggccgctgtccacgtacgcgcagtccacgaaagacgagccacgtacccagtttacggcttactccatttcagaaacaaaggttgttctggtatgagtgtgaacagggacgtgaatgcttcgaagaatatgctgcgcctgctcgattgtgaactcaactagactcgcccagtcacctacacgcatcaagcaaacagatagataacaatacatttctagtgtcgctgtgtgcctatctaggggtgaggaagattacattgtgatagccggctcagaaattagcccttttggaatctgtaggctacgtacctataggacacccttaggagaataatgggttaaagaaaggctcaatgaagcctggttgatttctgcatgaaatatttttcaaaacggtgatgtcctcctgtggatgaatatacttgtctttccgacagatagctcagcacgattgttgtctgctcgctttgcaggccattttgaccaattttaacacgtaaagccttaattgtgtccaattaaaatggttaaatgtaggtttgacattctgacaccttccgacaaatatgtgtctgaagtatttccaaaatatcaatatcttcatgcaaacaacaactgtaaaacgtatttttcaaatataccagccattcgtacaatgaggagtggccctaatgtaggaacactgaagaagatgaggtcgttggttgggtgtccaccgttggtgtccactttaccagaagagtaacgtagccatggatcgtgcgtgatgcgtgggacataagcaaaataaacaaaggctgtgcttatgtcttcaatatgccacgggaagaccgcaaggtagcctgagtgctgtgcagctggaataaagagatcgcgcctcacgttgtggacgtcgcgacgctggaccatccgacgcgggagcggcttgaacgcttgcaggagctcctgtttagcacatgcacaggacgcaaggaacaccggttcaacgtgagtagaaaagtgcttagcgcttacctggtacggtactactcgcagcttaaagcgctagttcctgcagtgctgatcatcatcctgcttagtatctgcgggcatatcgtcaactgcattgcttgagtggtctgtagctggcggctccacctgctcaagaccaagaacaaactcaagacaaggcgcacacgttgccgagaagatggccaccttttggctgtgagtgatgggcttatcgcctcgaacaaggtcatggctgcatcgtcgaggcggtactactaaataataagggtccacacgcaacaacggaagaaggacaactgcaagagccatcagatcaagaaccaaatcccaagcacagaaaaaagctgcgaacctgtcggccacatggcttgcgtggtacaagaggataccacgcgtgtgggactcaaccgatagaagtcggagtgtcgccacgtggtcgcctccatgaagctctccctcgacgatagcttcgttgtgaatatcacagcggaagaattcaagaaccaagtcctcaacaccggccgcgcggaaattggactgctggagtttctaaagctagcggcgtcaacgaagggagccgggagtatcctgcgtgcgctgcacccgctgcatatgtccggtatattggacgagcaaatcatggtctacaggcaccaactcgtcataggaagcaccgaagaccctgcacatatcgacgcgcaagacatgctcggcattgtaggtcatgtgtgagaacggtgaagttaattcattccaatatatgtattcattcgacataacatcgctgcttaacaagacaacatattcatgtgtacacatccacgcgcgcaggtcacctaatcaaagcgtaggctgcacaccgcacgatcgcaccgcgctcactcacccaccacatgcacagatcctcagcaatactgcacggttcaaagcactgatcccgacccaatcttgatcataaacaccggccaaaacgtggctgttgacgaagctagtattgcgtgtcgttcgcaatacgctcgccatattatagttttctatccccaaaaccagacagggaaatatcacttcaagctgtatgcttgttgctgctcgacatcatggtatgtcgtgagtttcaaattgcactgtgcaagtgaacaaatagaccgtttggacggcgtggttccaagtccagaggtattacagcttgttgatctgacagcgaagtcctttgaaatttgttcccacgtaattgaagttgtggagtctttgaaaggatctaatcgcgttgtcaataccgataatatctacacctcctgcctgctactagaatcactaaggtcgattggcatgtatggtcgtggtacagtgcgcacatccagcaaacacttcccccacttcacaatgatccgaaaagctgatggaaagcctagaggctacatgaaacaaggcgtgtgcttagagtaacatatcgtagcggccagttggatagatggctctattgtgaatacagtctctaatgttgacgcctcctcttcctctacggtatatcgtcgcataaaggaggaacatgttgcgtttaacgtcccggcctgcctcggtgaatacaacgcggggatgcagggagtcaaccgtcatgatcagcttcgcggtcggatttcgcttgccgatggtcactcatttcagaagtggcataaaaaattagcaatggctatgattgatatcacgagatgtaatgcgtatgtatgcgataacttggcacgtgatacaagcgagatggatgttgcacagcctcgcaataatgcaagggcaagcgcccgtgacgatcaccgggcgtttgtcattccacttgtgcgagaattattcaatggagattggaagaagtgcattgacagtgatgacgtaattgtgtacacttcgaacacaaaacccatgaccactgctgccaatttgaccagaaatacgaatgagttagaaacgccagcacatacatgtgtagcaaaagagtcgtggcttgtgttacaaggaaggagtcgggcaatgcacaaatggactgtatgtaagttcgagggcagggatgacacccagaaaacggattattgcgagacgcatcgagttgcactctgcaagcgtacctatcctactgaccacagaaaaccgcacttgtgtcagcagcaaaattggacgtgctggcaaaagtatcatttgttctacttgccaaaacaggtctatacagttgacggaaatctgagaaggtcgtctccaatttgtaaagcccagtgttcgttcttgaaggagcgtcgagaccaagataatactgaagagatcagcaaccacgactagcattcggctcatatatagtactgaaggtaaaagtaggcactcaatacattgtgtgcacttgaactacgactgaaaaccatccagttacttgtactcacagcatcctccctccttgtacattgaccagtgcaatgtgcgccgctttggtgcctttcgtctaattatagagctcatgcatggtgctgcatgttaccctcagcaccaatgtctcgatgctccctctctaggcggctccagaacctcgatgtcacgtagaattctgtcgccgggcccgtgatgtcgagatcgccttgcggtgaacccgaggcgttccacgagctgtcgctgtcgctagttcgcccctgcaacgggcgccgtctgaaattctgtgtccttgctgcctttcgccttgtagggttgcgccatcatctcgttctgtcggtgtctagcgtatggctgctgcatcgggcgccgttgtgccgcacatgtgcatgatgtagcacaataatgtcgggataggcgccaagcgttacgttcttgttggtgtcgacgcgagtaacttgagagacacaatagcatgggcgcgccgtgtctgatcaggatttagatcccacgttgtgattggcagtcaacgctgacattttcctagagaggcgcaaaaattgttgatcaaaagtcggtgccgtatcttaacttcactataggctagattagtctgctaccttcttttggaaaaatatcttcatgtatcattctggtatcgatagggttaaaccactagtgctacgcgaaggctggaataggatacagataatccgatctacactagtgacaataaagaaacgtaagtacgactctgttgcaagcccacagcattcatctagagaacgggtgtagctctaaagtcatcgaagttcttggcgtcgaagtaagctttattgccttcgaactccgtgacacggcacgcttgcagagccactgttttgtattggtgcctcgtggctacagcgtcaacaaatccccccccccggagtgtgcagcacacctcgcttttggtgctatcaatcatcaaacaactgatctaatcgttctctggtctgtcgaccatcatcgccattgagtacctcatcgccaaatgcaaaacccttcgggtcggcaacacagcaatagtaatagaccaacgcgataggagggtgtcttgtaccagtgttgagcctttcccataaatcgaacctcctcatccgtaaaattaacacaggacagagcgcgaccttcaagctctccaagtctatcctgaataccccgttgtttttgcgcgcggcgggcgcgggccttgccgttcgctctcgaggtgctgctcccgttcctgcaaactttcattggctctttgggtacggcgcttcttgctgcggtcttcagtgtcggccattgccttcccacgttgttattggtcgtcagccctctacaaaacaaactgttggataaagcctaaatcatacggcgccatgctcccccgactacaccaatttgaatgcgctcccattagtatagtcactacaaattatccatacaatcatgtagcaaaatccccatctatgctgcccgagtgtccagtacccaaatcgattcaccggtaaaactatcccgtcgcattgagatttttgaggcattttgctcgatggttcgcgaaagggttaacacgctgatggcgcatttcttgaagcctgtcggcggcagtaccgacagcacaaactgcgtgtcgtggtcggtccaacggcactggcgaattccagttcaacgtgcttcgtgtcggcccactgcttcgtgcagctcggacagtgcgtgtgttgctgatgtccttgcagcatatgtgactcgcaatccgttcctcatcaacaagctcatcaacatggcttgtgcacattgcagggcagagccgccgtctttccc

SEQ ID NO: 167 - DNA, 13746 bp, Phytophthora sp.
  variation 6233..6242: note = n is any nucleotide
  source 1..13746: mol_type = other DNA
aagctgcacctcagaagctcattgatttgctcgacggcgcagagacctcagtagatatcgctctgttcatcttgacgcatcctgaaccgacagacgctatcatccgggcctcccagcgtgctatcgttgatcgggcacaagtctccgagaaaagctcagctatgatgatcgaaaacggggtcaacgtatttcacgcaaaggccccaaactcatgcactggaagatggtctgttgccttgcaaaacaactggaaaggtgagatacccgcggtactgttcatctgtagcccacatacacacacaggacagggttctgcaacttgagcttttgcgcttttgcacaatcgccacaataaacggagctgttctgcgtggcggcttggagcttcggccgagtggctggctcaagagtttgtctgcagtgagaacgagagagaaatgtagaggagatgaaggtgctccgaggttttcgggatcccgagttttggagttttggatcgcccggtgctacactgctttcgtccggaccggtaagaaggacatcaaggccatctgcgaggagcaccccggctggaatcgacggacggtcgcgcattactacgccatgtacgaaaatggagagagttcgcagccaaggtgtggcattgtggcaccggtcgagcattctgaaggcgcgtgcagaaggctgcaccattcgcatgatcgtcgacgagcgaagcgcgctccaaaagaaaaaaacatgacttgggtacgcaagtgcggggatcccggtcaagactggacgcgtggccagcttcatggtccacaacaagtggaccatcgtcaacggcgagttcatgttagaaggcacgggcaactacagcgcggttgcgttcgatagagcccgccatgcacagacctttgagacgcgcacgggtcaggcgcaccttgattcgatcaagcgcgagttcgagcagctctgggaagaaggacgggtgcttcaatgggcctcgaggcgtactgcttgtttcatgtacttgggggaggacgaggatgaaacgaaaatgtacccccccccggggagagcaggacgaggacgaggacgtttatgtgtaggatatggttgaacgtgcaagccagtaagtaactttgttggtgcccactttgacttgggcttacattggccgtgcaggagtgccatcgtagttacaatagagctcgaggatcatgatgagtcctctcagtccttaccagccaaaaaaggcaaactgcacctagcgcattgagctggcaacggcagccccatcgacggcggctccagctacaacgggatctccgtcacttgactcgtcccttcagtccactgttgcttcttcgtcgctcgacaatttgatcgcgtctgctggatcgggttcgttcattgatccgagttcagtagtggtaaacggcgagctgctaccagcgagatcaagtcgacgtaccgcaactgggtggggcctcgcgccgtctcccccgacgccgcgtgctaccgtgaagcactcatcatggacgcatgcccgccaacttcgaccagaacgaggttaccaacacgtgctgggccgagtgcccgatcgcctacccggtcgagtgcggcatggaatgcatccgtcagaacgatgactgtgctatggaggtgcttaacaaggtcggtgctgttgctagcacgtctagtcatcgctaccgttggtgcgtctcagaaactgtggcagctttcaaagggtgcgacgcgcgcattcgactgcgctaacatgatgatcggtacgatgagatccatcatccgttacgtgcgtaacatcaagaccacggacccgcgggcctcgacggacaagattttcaacatcttgcaccagtcgaacaacatcgtgacggacctgccgatggccatttacatttgcatgggttgggacttgccgaggcctcttgatgtctcgggtcgtgtgcttacgacgatgaactggatcttgctaaacgccatcgggtacaaggacgacctcgtgtctagctggagcaagttcaaggctttcttgatcggcgccaacttcacggaggccgccaacaagatcaacgagacggagatcaggacgctgagtgacgccctgaaggccaactccacctgcggctacgacttgcgagtgatgacggaccgcacgtgacgaggaaacgcagcataatgcgggtcaagatgagaacgtgatacttgccctcatgctgtccacatcgtgcacacggacggatgctgagtctgtcggtgttgatgcactttcagtcgtcgaccgtaatcgcttccagtttttgagggacgcgaacatttttcttgagtcagggaagaagctggtgttttacctggtgcgtcttcgttatcgagctccgattctccggcagaacgaccagtcggaagtgaaacaattgatgcagagcatgatctggtattcgatcaccggcgcgaagatcgacggtggcaagttgcacgatgccgagtggaccaagaagctggatttcttgaatcctgccaacgaaacactgtcgcagctgtgggaaagtggagagagaagcaccagctcggagcacgaacgttttgcacttattggctggcctgcttccgccgacataatgaacgcagtcgcattgtttggaaaagtgtcctgtgtgcctgtaattcttgcacagtgctacaacgctccgaatgcttctcagcgccgaacttgatgaaaatggatgccatttcgctcaaactctcaaaatcttcgagaagagcaatgcatctgttgagtttgtacccctttgccgggagctaggtgctgccatcgttgacttgggtgacactacactgatccaggcgtttttcaagaagtatgttgcccagctgaaagacaaggacagacagttatttctccaatggcttccagctctcgtgcgcgcatttggatgggcatacgttagtgctgccacactgaatgccatcgacgtgcaatcaactgaaattcgctcggatcgagctttggaactcgcaaacacactccatgacaacgatgctgcacttctagctctcgtagagtttgcgctgaagaaagctcacgcacggtgctctggccacgccgatgcattcgtatcttcgggtaagatcatcacacttttaaagcttgcgctggcgtgtggaaaccctcaaatatttgccggtctatcaaccatactgaacaagatcgatggcaatcttctccacacagtgattaatgcgctctcgaaatacgtcaatgactcgagtttacctgaacaacgtgctacgctggcctcacttgcagcgagacgtcgtgaatggctattcgctgagatcgaagacacgaagcaaccactggacttgacgaagcgcgagatctaggcaatgctagccgacaacacaatcggctccgcgaagtacttttcaatcgtcgctgactttttgaaggtgtcaccgatgagcacgagattcctggggttaaggctctacctagtggacacatcgttcgagttcaagtcagtactcttggggactcgccatttcgcgcctcagtatgggggaccagatggcggaatacgcggaccactttaccggtggattggtgacgtcctgggggggggggggggggctttggtttgagtcgccataaccttttcggggctacaacagtgatgtcaaatggatgatgagggacggtctaaagttgtagcgggagtagtgcgtgccgcacttcatgcatgcggcaaccaatactgttttcggcatcgtcggtgacaacagctcgtccaagaacccagccatgaccgacatccttcgacgcatcatcaaaacgatgtacaaaacgcagcacgtcgaaggaaagggcactctattaagcgagttatgcagcgttatgaacccggagggtgtgcatccacgctagctcttaaacttccgcacgcatcgattcctgggactcacgcgcgtcgtccgacgcattcttctactctgggatccattggtgcaatggtacgaggagcgggccacaaaagcccgacgtgagaacgtgatgccgccggagtccttcccactagctcgggaaaagatggaatgctctcactgctggagccgatctcgaaactaaatcagattggacaggccgagtcggggggaccaatgcaacgtgcttcttggactctacaagctccgaatatccttgttggacatcaccacagccttgaaggactgaagacggagaatcggttcttccgaccggatgagctgtacgatctcgcatcgacaacccgttcgctacttcacaaagggtttcgtcgggttttcttccggcggtacaccgatcgtgataccatgaacgtctgctcctttgcctttgagatgcaactatttcttcaccccaacttcaagcatccatatggagcgctgataaaggtgttaccaaggtcaatatacaggcaggtgcctcccagcaggtagctgaccgacactacacgaagattcgacgcattatcattgacagcgtccgcagcatcatgacagcggctgacgccgagccgacgtcgactgatatcgttgccccaccgccagctactgggttatcagaggacttcgtggagctcttcacggagacagcgaacgaggtggcaccaccacatagactgcggtgcacgagcaacgcatcgacgatgagctcgaccgctggctgacaacgcctacttcgcttcaagcgattcaacccggtgcgtttgactcagttctgagcttctggaagcgccagcaagagctgggcaacttcctgcttcttcccttggttgcgcgcgtgctgttctcaatgccctcatcatcggcccaaattgaacgcgactttgggatggcaggcaggatggtgacccccaccgcagctcgatggcgccttacaacgtggacatggccacatttctgagctgcagcagaacttacgtgggtatcacccagtacccaaagttgtcgtcgagcacagcaaaggatcaagtaccgtcaaacgccatggtgagcatggagcgagagttggacgacgagttcggatcgttgatgaacaaaggcatcgagttgggactctccgacgacgaaaacgacggtattaccgaaatgtagcgggagcgggctggggcggacgaaaacgtgagagaacgggagcacgtgtggaagtggaaacgggctatagctgccgtggtagagttctagccatgcatgtgcacgaaatgagtgtctttacttttcatcaacacgttctgaccgtgtttggtgttagcttcgctatgcagcatatgtaaatagtatttcgctttcaccttgctttcgtgctggtcgtttgattactagcaactctgtaacacgcattgcagcgcgtacacggatcgcctcctgtgtttcaagctagattcgctcgatttgagatcgatctcgcagtattcgcgaccgtgggcacacaggcgggttgctggaccgggtggaagctgctgaaacccgcgtagttggtgtcctggctgccgctgcttcttttctgcggtttgctccagcggctcgtgataatgcggtggtggagcctcgcgtgcttgcagttgcttctgtagggcccatcgctgcacctgttgaggaagttggcgtcggcgcgaacgttgggacgatggccgtggacttgtctcgacttgatacagatattcacatcggtgttcttgaggacatcactgtattatgctggtcctgtggtacgaactcagagtgccatcagttcacggggttttgtctcggcagtcttcttggccaccacgatggctgggcgaaaccgttcgcctgggtggttgttagccctctcttgctcctgatcctgacgcatgcgaatcgcgatgtcgtgttgatctagcccgccgttgatcagctctactacgcgaacctctgtacgagcggttgttgcctcttgcactacttcaaatttgcaaatgtcgtggcgctcttacgcagcacgcttgtgctcctcctctaccaggttgtgttgcttgaccctggaagactgcaatgtgacttgcaaaacgcctggtgaggagatcaaaagagatcatctttgaccaataaaacgagatcttgtttgccaataaaaaaagcaatttgcagagcgaaccaagttctcgccctagctcggttcgaatgaaaagtaagcgaaccaagcccccccccccccccccccnnnnnnnnnncctccggttcaggtaaaaaagaaaagaaaagaagggtgaaaccgtggttccagttcagttcgtcccaggggtgggaaattcacgaagtgtaggaaagtgtaatagacttgcgaggagagctgctggtctttctactcagtccacaaatggaaagttctgtccgtgcagctctctcaagtctaacctaaagctctacactgccagtcatactgtacaccactcgtacaattgcctctctcacattgatggtcgcacgctcttcaattgttttcgtgaacccagcagccgcagtcaacggcaattcgaagatgtcgttgggtacgccccgaggcttcactgctccagcaagttctcacttttcctttcgcaccgtcaagcgcagtcactggtctccaacctccatcgcctgttagtagcgttgtatcaagccctatgtcggggaagggtgcgccaggaaagcgcaagcgcaagtgacacccatttgatgacgggaagagcgatagaaatggcactgaaggtgcatgcccgaactcggagggcgatgatgacctcgatgaggatgacgtagattatgaggacgcccaaccagtaacgacacgtccaagcaagaggcctgacgtcgcggagtgcatgaagggcaacaagaataccagcctcgtatatgtgaagatgtcactaggttccttcttgacaggcgaggagaaactgttgctgtcattcgatggcattctcgtagacttgagcattggattgttaaatgcctacgcgctgctgaacatccacatgatgcggtgtgtgacaaaggacttcccattcctcgatttgagcagaacttcgtttgccaatgcttgacagacgtaatgtttaacgacagcaacgtgcacatagacgctgaactacatatatcgttggagctatacaatttgttgagaggctctaacgcttctcacgggcgtcgcgctggtatcaagaacgggtggcaacaggcgcagctcgggagatgatgaccgctatccagcatgcactcaaaaatgagtttccttcgccggtttaataaggtgctgcgggtatggtgtagacagaagcactggtagcacacattattgccccagagttcgagcggactccacccgacattcctgatcgtcagcgcctcgacaacgtagtcaacgagtggcgtggagaagtccctcagcgtcggagtgagctggtcaacttcacggcccaccgactggtgcttctgacttatcgactcctgcaaatgattgaggagcgtaacgacagagttgagcaaagcgtttgcgctgtttaagtgacaggggcgtctgattttgaagttagactaatccaagctgaagttatgaagacgttcactgttctaccaacaaagctaggatttggaattagtcacctcacgatagatttgattggtttccgggaactattagtccgcaacgacattgctgttcctccgtacagatcgaagtggaatgaggtgagatacatttattggagacggttcttccgtattgacaaagtggagactatagagtttggtcatcgcagattcacacgagagatctcggcggacggcaagtcggtgaacatcaagattcggaagcccgaacgtgggccttccgagcccaatgcaaatgacctccaagctgccgacattggctctagatgggggttggatgcgagtaaatgcaacctattggtcaccacaaaccaggacgacgaaacggttgtgtgctctggcaaagagtatcgcgaagacgcttacattacgaagagcagccagaagcatttgagatggatacgggatcgtccgggcactggagctgcttttgcgagcatgccgacgaagaggagcatgttgctaaagcggtggcgggagtacgtcccatttatgacgcagcacctgcatctgctagtgacccccgtgcagcacaaatcgtaccgtcgccatcgacttcgaaggagcttctttaaaaagaagaagctatgtgagctctaccagaaacttgtatgtcacggagagcgaatttttatcgtcattgacaaccggagtaacggcgatccaaatggagcgatcaaagggaagccatcggcactcgtgcagaaattggcgctggagttgtcaaagacgtcgaactgtacggtcatcattattgccgagttccggatcagcaaagtgcactttggttaccaacaagaactgtccaagcaatacccgtatcgaaaggccgctgtccacgtacgcgcagtccacgaaagacgagccacgtacccagtttacggcttactccatttcagaaacaaaggttgttctggtatgagtgtgaacagggacgtgaatgcttcgaagaatatgctgcgcctgctcgattgtgaactcaactagactcgcccagtcacctacacgcatcaagcaaacagatagataacaatacatttctagtgtcgctgtgtgcctatctaggggtgaggaagattacattgtgatagctggctcagaaattagcccttttggactctgtaggttacgtacctataggacacccttaggagaataatgggttaaagaaaggctcaatgaagcctggttgatttctgcatgaaatatttttcaaaacggtgatgtcctcctgtggatgaatatacttgtctttccgacagatagctcagcacgattgttgtctgctcgctttgcaggccattttgaccaattttaacacgtaaagccttaattgtgtccaattaaaatggttaaatgtaggtttgacattctgacaccttccgacaaatatgtgtctgaagtatttccaaaatatcaatatcttcatgcaaacaacaactgtaaaacgtatttttcaaatataccagccattcgtacaatgaggagtggccctaatgtaggaacactgaagaagatgaggtcgttggttggatgtccaccgttggtgtacactttaccagaagagtaacgtagccatggatcgtgcgtgatgcgtgggacataagcaaaataaacaaaggctgtgcttatgtcttcaatatgccacgggaagaccgcaaggtagcctgagtgctgtgcagctggaataaagagatcgcgcctcacgttgtggacgtcgcgacgctggaccatccgacgcgggagcggcttgaacgcttgcaggagctcctgtttagcacatgcacaggacgcaaggaacaccggttcaacgtgagtagaaaagtgcttagcgcttacctggtacggtactactcgcagcttaaagcgctagttcctgcagtgccgatcatcatcctgcttagtatctgcgggcatatcgtcaactgcattgcttgagtggtctgtagctggcggctccacctgctcaagaccaagaacaaactcaagacaaggcgcacacgttgccgagaagatggccaccttttggctgtgagtgatgggcttatcgcctcgaacaaggtcatggctgcatcgtcgaggcggtactactaaataataagggtccacacgcaacaacggaagaaggacaactgcaagagccatcagatcaagaaccaaatcccaagcacagaaaaaagctgcgaacctgtcggccacatggcttgcgtggtacaagaggataccacgcgtgtgggactcaaccgatagaagtcggagtgtcgccacgtggtcgcctccatgaagctctccctcgacgatagcttcgttgtgaatatcacagcggaagaattcaagaaccaagtcctcaacaccggccgcgcggaaattggactgctggagtttctaaagctagcggcgtcaacgaagggagccgggagtatcctgcgtgcgctgcacccgctgcatatgtccggtatattggacgagcaaatcatggtctacaggcaccaactcgtcataggaagcaccgaagaccctgcacatatcgacgcgcaagacatgctcggcattgtaggtcatgtgtgagaacggtgaagttaattcattccaatatatgtattcattcgacataacatcgctgcttaacaagacaacatattcatgtgtacacatccacgcgcgcaggtcacctaatcaaagcgtaggctgcacaccgcacgatcgcaccgcgctcactcacccaccacatgcacagatcctcagcaatactgcacggttcaaagcactgatcccgacccaatcttgatcataaataccggccaaaacgtggctgttgacgaagctagtattgcgtgtcgttcgcaatacgctcgccatattatagttttctatccccaaaaccagacagggaaatatcacttcaagctgtatgcttgttgctgctcgacatcatggtatgtcgtgagtttcaaattgcactgtgcaagtgaacaaatagaccggttggatggcgtggttccaagtccagaggtattacagcttgttgatctgacagcgaagtcctttgaaatttgttcccacgtaattgcagttgtggagtctttgaaaggatctaatcgcgttgtcaataccgataatatctacacctcctgcctgctactagaatcactaaggtcgattggcatgtatggtcgtggtacagtgcgcacatccagcaaacacttcccccacttcacaatgatccgaaaagctgatggaaagcctagaggctacatgaaacaaggcgtgtgcttagagtaacatatcgtagcggccagttggatagatggctctattgtgaatacagtctctaatgttgacgcctcctcttcctctacggtatatcgtcgcataaaggaggaacatgttgcgtttaacgtcccggcctgcctcggtgaatacaacgcggggatgcagggagtcaaccgtcatgatcagcttcgcggtcggatttcgcttgccgatggtcactcatttcagaagtggcataaaaaattagcaatggctatgattgatatcacgagatgtaatgcgtatgtatgcgataacttggcacgtgatacaagcgagatggatgttgcacagcctcgcaataatgcaagggcaagcgcccgtgacggtcaccgggcgtttgtcattccacttgtgcgagaattattcaatggagattggaagaagtgcattgacagtgatgacgtaattgtgtacacttcgaacacaaaacccatgaccactgctgccaatttgaccagaaatacgaatgagttagaaacgccagcacatacatgtgtagcaaaagagtcgtagcttgtgttacaaggaaggagtcgggcaatgcacaaatggactgtatgtaagttcgagggcagggatgacacccagaaaacggattattgcgagacgcatcgagttgcactctgcaagcgtacctatcctactgaccacagaaaaccgcacttgtgtcagcagcaaaattggacgtgctggcaaaagtatcatttgttctacttgccaaaacaggtctatacagttgacggaaatctgagaaggtcgtctccaatttgtaaagcccagtgttcgttcttgaaggagcgtcgagaccaagataatactgaagagatcagcaaccacgactagcattcggctcatatatagtactgaaggtaaaagtaggcactcaatacattgtgtgcacttgaactacgactgaaaaccatccagttacttgtactcacagcatcctccctccttgtacattgaccagtgcaatgtgcgccgctttggtgcctttcgtctaattatagagctcatgcatggtgctgcatgttaccctcagcaccaatgtctcgatgctccctctctaggcggctccagaacctcgatgtcacgtagaattctgtcgccgggcccgtgatgtcgagatcgccttgcggtgaacccgaggcgttccacgagctgtcgctgtcgctagttcgcccctgcaacgggcgccgtctgaaattctgtgtccttgctgcctttcgccttgtagggttgcgccatcatctcgttctgtcggtgtctagcgtatggctgctgcatcgggcgccgttgtgccgcacatgtggatgatgtagcacaataatgtcgggataggcgccaagcgttatgttcttgttggtgtcgacgcgagtaacttgagagacacaatagcatgggcgcgccgtgtctgatcaggatttagatcccacgttgtgattggcagtcaacgctgacattttcctagagaggcgcaaaaattgttgatcaaaagtcggtgccgtatcttaacttcactataggctagattagtctgctaccttcttttggaaaaatatcttcatgtatcattctggtatcgatagggttaaaccactagtgctacgcgaaggctggaataggatacagataatccgatctacactagtgacaataaagaaacgtaagtacgactctgttgcaagcccacagcattcatctagagaacgggtgtagctctaaagtcatcgaagttcttggcgtcgaagtaagctttattgccttcgaactccgtgacacggcacgcttgcagagccactgttttgtattggtgcctcgtggctacagcgtcaacaaatccccccccccggagtgtgcagcacacctcgcttttggtgctatcaatcatcaaacaactgatctaatcgttctctggtctgtcgaccatcatcgccattgagtacctcatcgccaaatgcaaaacccttcgggtcggcaacacagcaatagtaatagaccaacgcgataggagggtgtcttgtaccagtgttgagcctttcccataaatcgaacctcctcatccgtaaaattaacacaggacagagcgcgaccttcaagctctccaagtctatcctgaataccccgttgtttttgcgcgcggcgggcgcgggccttgccgttcgctctcgaggtgctgctcccgttcctgcaaactttcattggctctttgggtacggcgcttcttgctgcggtcttcagtgtcggccattgccttcccacgttgttattggtcgtcagccctctacaaaacaaactgttggataaagcctaaatcatacggcgccatgctcccccgactacaccaatttgaatgcgctcccattagtatagtcactacaaattatccatacaatcatgtagcaaaatccccatctatgctgcccgagtgtccagtacccaaatcgattcaccggtaaaactatcccgtcgcattgagatttttgaggcattttgctcgatggttcgcgaaagggttaacacgctgatggcgcatttcttgaagcctgtcggcggcagtaccgacagcacaaactgcgtgtcgtggtcggtccaacggcactggcgaattccagttcaacgtgcttcgtgtcggcccactgcttcgtgcagctcggacagtgcgtgtgttgctgatgtccttgcagcatatgtgactcgcaatccgttcctcatcaacaagctcatcaacatggcttgtgcacattgcagggcagagccgccgtctttctc

SEQ ID NO: 168 - DNA, 21980 bp, Ixodes sp.
  source 1..21980: mol_type = other DNA
ccgctaagcttgcagtgcggtagaagctagcactcgttggattagtcatgcgttcatctgtcgccacgggatctctgtcccgccaatgcccacgcgcagagagcggggtcatgtggtgtagaagttgcagcggattgtgcctgcgagcgtgtatcgcccaccccactgtcagcttaaaggggtatggaaacaaaaattgaaatattcaaatttcgtttggaaatgagtcaagcatgacggataataaccgtaaatgataatcacacgtttgtattttgaacgacttgatacatttttcgttccaaacggtgcactcgagcaagtgctcgaagagaagcgagcggagagcccgatgcgttatgggatgtctggcgcaaacaaaaacagaaagaaaagatttcccgcgttcgtggagtagcaagacaagcgtgcttatgagctttgcccttagtggcgttgtcagcgttgtggtggtgtcaatagagagttttagtagaccgttttcgctttcccgctccgctctatggaaagcggagtcgccatcgcgcatgcgcgacccgctctgggatttgagcgtgtagcgtcagctccgctatcgtcgccattttaaaaagcatgttccactctcagtaaaggttcactagatggtgtttttctggaaaggtgggtgctcgctatttgaaatcatgcttgggagcgcgcctgaccgttatgaacctcgctgcactaagatggctgcgcagactttgtttgaaaaggcgtcctccagaaaacgtttcacggtggtaaagaacctctggctgcttcgagaaatcgctggccgcaatcctttcacggcccctgaacggtgggaacaggtgctgccttgtctaagcaagcgggctcgatttttctatgcgagatgacgacgacgacgttgagagaatgacacaccgggcgacggcggtgtctcaatctgagccctggggtgctaagttgcgctttttgcactcccaggagacttggaagagggaagtgacgtcaaggactagggcaaacgcagattggatgttgacagaagagaacaaaatcaacatccaatcggcatttgctgcgttgttgacgtcacttccttctccctatgtctcctggggtgctatgttgcgctttttgcactcccaggagacttggaagagggaagtgatgtcaacgacacagcaaatgcagattggatgttgacagaagaaaacgaaatcaacacccaatccgcgtttgctgtgtacttgacgtcacttccctctccctagtctcctgggagtgcaaaaagcgcaacatagcccccctgggcctcggttcctcggaggcggcagcttctacttcggctggactacctccttggtgcgtgattctttgacaccagtgaaccccagtgagcaacagcgccatcatgttcctggtactccttcctgcactgatcgaacggagtgcaagatcctcatggctcgctgctcatccgcccaacccgcctccacgaagtctggacttctgcgaatcggactgccatcctccccaataccaacaacccatgtcgtcgtcatcttgcacgtatatacccatcacattaccatgttccctagacgcggcaccgcgggcctcggtggtacgggctgcttcctttccgcggtgccgcggctctccagagccaaaaattaaaggctaaagaccaaagactaaagcagtcggcaaacggacagatattatgtttcgttactttaggcatcaagacagtgaaaattagcgaaagtgagtgctccatttatatatttttttcccccaatgaaatgagtccttttttcttcgtatgcttcggtttgtgatagggtaccttggtgtttatgtacacaacgcgacactgttagcgggcacaatcaatatcctgtttttatttttcaccttaaattcgaggggctgacatccgcctattggtgtggaataaagcgctcgtttgggataccagtctgagcgacaaaatttcagctctttcaatagctatgaaagaaataaactgcaaataaaagcgattttgtcgttttcgcattaacattggagcgcagtgtatgtatctgccttgaggggtgacatgaaaccattttgcttgactacatttctttttatttcttttgtgttttttgaaagtgcgtttttcagctcaagctcctgcctagtttcagcctcacttgtgctaagatcttttcttgcaatagaagaccacgcaacataggctacttttacaatgctgaattcaacagtaacactgtaatttggttagatgcaatattcacacgcacacctgaggagtaaaatgggagtcgttagtaaacgttttttattaaactatttctagatgcctttcagcctagttggacaggtatttcgcacagtacaaaagcttgaatatgatttactgcgataattttatgctttctaatattaaacaaacaaaaaaatgcccatggtctttgtagatttcgtccagccgtcaaattatgcagtctgcgcccttcactgcctggtgcttcacgacgagcaccctcttgtggtcctcttctgattttttgatagacggcatatgggcatgctgtgcggtcaacaaaaccccaacagttgtccaggggtgttcccttgtccttgacggcctaataaaaaagacaaaaaactcttacaacgcggcagtatttaaacactaccaaaacatgtgatatgggacttgttactcctctaagataaagcgtatttccattatagggttgtaaaaaactgggtatcgtaaattaatatatatatatatatatatatatattaatttacgatacccagtttttggctttcggcgggttcctggaaacttggattctttaattcattggattaagtacggttcatccatctgcacaatttcatttatatatatatatatatatatatatatatatatagttgttcctaacttctgctaagctttgaggccgtcaaactgtgcatgcgaggcccgctacgccggaattcaaaacgaaacttctgaaaacttttctaatctaccactattgcttagaagtccagggttctgtttgctaaattttgcattgtttatgcctctctagttttcaccagacaaaaaattgacgcggaatattctttcgaccgttattggtaactcttttcaaaacaccaccgggtaacatattcggttgccatattttgggcatcgcctttagtgcgagacttgtgactagaaccgatttcaaattcagtattgacgcagcattcgtgtctaatacatttagactggcatccgcgacaaacaatgacgcagctctcttgctcccaggcacttggccaaaataaggcggcctcaaaaagtaggggcaccataggttgcacttttaaaaaagctgcattcaagcctctattattttctaaatctaccaaagaaatccaaggcgaacatttccggaggaaagttaaacaattcaaaagttgcgagcgaatgtgaataaataaagttgagagcaatggtttctttggtgcagctttcggtgctcagctttcagtggcattttcgacaggagggcgcgtgcacaggtataatcggcgttcaagcgcgcgcacccgtacatctgactgcatagccataggacgtccacaaaaacgcgacgactttaccgacgccgtgctggttgcaaagtgatactcgttcacttcgtttgattatgctgttttgtgttacatagaactcaaatcgaatggtttacttttcacgcgcggggcgtacgctttacttcttgattcgacctctttcaagctgaggtcatggtgaaaaacatcggcgcgtattgagtaagtgcagccatcttgagatctaagcgatcacgctaaggccgctgagggcagtccgctctacaacttgtgaagcggagcgcacgctcactccgctaaccatacgctcaaactcagagcgggccactcatgcgcggtggggacgatgcttctcgcagagcgtaaagtagagcgaagagggctcataaaagtggcctactaatactcacagattatgaacgcgctcgtcgtgacttgtcctggaactgcccatgtacacctttggcgtatagaaaaattaacttttcaccaaacagagcagctgtgctagaaacaatggaaacgcgaaatttacagaaaccatgcagggtctcacctgtgagcacagctccagtttcgccagggtcaaccacctatgtttgttcatgtcagcgagcaggtggccgaacctctcgttgatgtgacccacgatgaggttcacagaactgaagaacaccggcaagttccgtccaaacgctcatccatgtacgaacagacggtcgggatacgccagtcgaggaagaaccatgcaaagcgtctcgccaggttggcaacaccctgcgccgatctgtcgggtgctgatattcagaggcccgcatgcggagcttctttaagcaggatagcttcctaaagggtttctcttctacgttggaaatatccagcaagccgcgttcggaaaggaagcttcggcgcttgatggcacgagggatacgaatcatagattcgatgtctcgccagcttaatctcgtcactagaagtctccttccttgagaacagcgggaattcatcgtgcagatgccttgctagccttgagcaacactgtactcgtactacgcaaaaggatgtacttgcaaatcgcaaacttcgtccttttcttttatttttctacttcgaataagtaaatctgtttcatttttaattcgagtggagcagaagctacaagagcgagtgccggcctttcagcgtccctgaccagcacgcgcgctcgtgcagtgcaagtaccgtttagagcaacatgctcatgcttataccttcggcttcactcgcacacaaggtggaacgattatatttatattttatagcttaatattttttcaggtgtgtgcctactcttttgtgttcattattgtcgccttcgtttttactacccctacaaacacgctccctttcactctcttggtattaacgtttaggtttttttgtcttactagtactataaacgtccacttgtggggctacgcaagcaaatttttcgaacccgctcaaaacgctctaacgctgaagaaaaacgctctactaaaacgcgttttttgacctccgctttccattccggcgaagcaggctgcgcatgcgcagtttggcacccccagagcggagcggaaaatgaaaacggtctactaaaactctctaatagcgtcaacgcgttacaaccgagccgttcgaagtactcctggggtgaccagcgtgtggctggccaaaggagcacgtagcttccacaacactgtcagcttagggctgaacggcgtggggaaagcaacttttgttcgagttttgagggacgggctaatctaggggaagaatggctgtttccggttgcacgaacgagggtccgagaaagaggggagtccttcctttccgtcttcttggaccctttggtacaatgcgccatttgtgagttgagctaggaggaaagctaaaaaggaaaatgttgaaattccaaaaggcggcgctgctccgaaggaatctgctacgtcacgaatacgtggcagattccccaacgttgctagactacctcccaaataggctccgcatgcatccaccaggtgcacattgaaagatcgtttatttactttaaaattagctttcttgtgcttttcaacggaagactggtgtttttgaggttagggtgcaacatgcaacacattaaagctagaaaatgagcgctgaaatttcgtttccctacccctttaaaaggacactgacaccgcccaaaatttttttttttttttcattttctgccaggcgctttattacggtgtgggaggactacccaattaatatttttcaacagtgtagcgtatatttttaataaagccaaaagacgcaattgctcgaaaccgaaagcgaaacccgcgcacggagatcggagcagtggagaggagagagtgagtggcggaagtcacgtggctacacccgaccgcgcgctttttttcccctctgcgtagcagacgacatgcgtggcggcgtagcgggaactttttgccgtgcgattcttttgcggttatgtttgttccgctcgctgttctgtacttcaagatgagaattgttttgtacattgaggagttggagatgagtaatgagtgcccggggtgaatttccgtgatcggctccgagaagaatacacttaagatgttgcgtgaagagctggctcacacgtcctgcctccgaaaaaaaagtggcattgtgcgacagagtttccgaaagatcaacgggatcgggaccgatggctggctgcgattcctgtagaacatttacgggcgcatcggaaagcggaccctacctgatttatatcccccttatattttgtggaaagtgattacattaagttcgtaggtgtcaaaaagtaaattccataccatttagttcagcgacgtttcgtccacaacatttgtttgtgatattttttgtttgtttcttcggtggtaattgtataaaaaaagaaatgtaaacatcgcaaaatgtttgagagaaaaaaaaaaggtacactatcactggggattgaaccaggtcctgccacgtgtgaagcggacgtattttcactgagctactgggggaactctttcctcagtaataatgcagccggtaaactgcaggttggaaagtttgctcccgattttcctccagcaaaagcactcccgggttgaagtcgggaagcaccacgcattggcgacattcgcacctagtaaagaaatcgtactcgtgcatattcaactcgaagtacacacctcgtgcttgacgtttgcgcgagcgatatcttcagccgcgagaaaggagcgacggctcggcgacgtcttcgtgcaaatcggcttggtggtcgggcgtgtcgtacgggaggaatacaaattcttttgatcggtgccaaatttctctttcaaagacagacagaatttgccggtaccgcgagcgacagctctgaagtagaggtcccacgcccatcgtccgctgtcatcgccgtccccgcgagtcccacgatacgcgaaacggcgcacgcacagaatgcttccggttctctggggaactttttttttttttttttcaatcaacgtattttcagtttttttagaagccacaaaaatgggtttcttatttcgtttttctatttttaatagtgagtgtgtgccttcagtgactaacgactttgattaaatttggtggtcgcgtcgaaaccttagaaaacgacccgtgaccacggaaaagagagtgagtgagactcgaaccggccagttcttgatcggcggtgtacgggcggaaagaaaccgaatttcgagccgcaaatcgtgttctgggtagttgggctcctatatgtcatgcacaactaaaaacctcggcgagcataaataccctgtcagtgtccctttaagggtgaatagactatagtatggagttgggcctcgcctgtttctgtgtgcatttgaaggctgtgaacgacagaggattgttgtgtgtgcacaactttagggcattggtgttatggtgaccgacttcgttcgtgtgaaggtgagtcgtgggtctttcttataaaccaggaagggggcgtagccgagtttgggccctttggtgtgtcatccgctttttattcttagtctcgagtttctatattgttgaaagttcaccatttctacttagcttgcccgttatttttgtttttacgagatcaaactggctcaccgacgctggttgtctgctgcaaaataatcttcctggttgagcgaagggaacggcgaatgtgccagtaactctgtgcaataaattcctgagcgacggttgaaaacttgcgcgtgtttgtcgtattttttgttttgtctcgtgacgagtagccatggagatgactccccaggttgcctctgtttttacatttaagtaaactcgttgaggttaaaatttgacaaataattaaaaggcgtgtgtaacttcagacgaaaaatgtaagcaatcaatacccttcatttaatagatatcggtaaacagtaccactgaccgatgtcatccttgtgtacttgtaaactgtcggacagaaacctaacatatggcagaacccaggaaccagcccacctgcgacttaccaattgttatccgatggtttaaatgatcgttttccatgtcagtcaagtgtgaaaaatgcgatccaagctgcttcttcttgccgaacgattgatcaacgcagaggtagcggaggacgcaaggaggttagaagggtacgagagggcataacctcagccgcgtagcctccacaagccatgctcccttgtcttctcgcctcttactcattttcctccttacaggggggatcggtggccgagtgggctgaagtgggccggtttgctcatcttgcggctgcggacgcggccgcggccaggagggatttttacgtcacgtgaccagctccatggggacaaggaagtacctagcgtccctgcctaatggcggagagatccgcatcgcttcaagcacaaaagcctaatttcgctcgcagaaactgattggagggactttcaactggaatctaattgaccgcccctttatactggagcggcaggtaaagttacggccagggagggcaaataggagccaaaataaagaaaaaaccacacgagataaaagcggtagcagtatttttataaacctccgccggcgccgcgcctcgcgccttctgttgtggtcgaaagcttcttgcggcaaaagaactggtcgtgaaagagaaacgttgtttactcatcgaccctgacgaatgcgaggtccgactacgactgcactggacaccgattcacataagcgacgaagcagtacggagggccctggagccttacgggaaggtgaacgaagtgtcccgggacacgtggagggtggaaggattccagaatgttcagacgacaacgagatttgttaaaatgaacttcaaggagggcacgacaaaagatcatctcccgcaccagctggttatgttcggcagcaaggtcctggtcgtcgttccagggagggcaccactctgcctccgatgcaagaggacaggccacattcgcagagagtgccgcgttccccactgcgacaagtgcaatcgttatggccacgagcaagaggactgcattcgaacatatgccaccgtgatgctgcctgctcctgggcaagacaactcggagttcttcatcgatgaagaagaagctgagaaaggcgaagacgacattcgacatccagtcactacctgtgacccgaagtttacagacggacgacaggaacacctagaacgaaagaatgacaccaccttgtcaagatgtccaactggccgtgagggaggccctgcacgagaggacgacagtttgacgtctaattgccaagctgatcgtgaaatggacctatcccggaagaacgacaccatctcatccggtcctctggccggtcgagagggagacctagcacgggagagcgataccatcttgccaagttgcctgggagctgacaaccccgcggttgggaacgccagtccggacgtcgacggtgctgcatgggacccctcaaaggaccagtcaacgagaccagcttgcatgagcgatcaccattcggacatcacgtccgaagacgacctggaaatggatgaaggtgctgacccctcaaagaggcctttagacctcgtagaggaggggcctgactggactccagttcacgggaggaagaaacggtgcaagcctcgccctcccccaggcaatggacgagagcgagcctcgtagaaggtggttactttctggttacatccaaactgtgaacgctttaggtcatgtctttcttagattcattttcgctttactagtgccagttgcaaagttacgcctgatgtagcttccatgtgaggttgttcatatgtcgctttccaatgcgcgcttcctcctccaatcccaacaatgcttccgacaaaaaaaaaacaactggcccttccactaaaggtttaacatttggaaccctcaacattagaggactaaactccactcgaaaacaataccagctgctacgtttgcttcacgaggagcaattagactttttggccttacaagaaacaaaaatggcggaggaagagcaggtgacgagggcgttacagccttttcttacctcgtacgaggtatgcgtagcgcatgcagttggcactgcaggtggttgttttttattccttaaaaagtctgttcccctttcagatgtgagtgtcattaccgatgaccatgggcgttttattttgtgtgactttaatttgttggaagggcagtggagagtaatctgcgtctatgccccttgtaaagttagtgaacgggaggcattcttccaagggatttcacattacattaaatgtgatcggatcactatacttctaggcgactttaattgcatttgtgaagcaagagacagaactccattcacgcgcgtaagtgattctagtgcaaatgtcctgagtgaaaaaatcgctgagaataatttggaagatggtttttacatttcaaaaaatataaagaaaattcagttcacacactttcagaaatcctatcacgcacgacttgaccgcatttatttttctagcgacattgtaaataacattggatcttatcacgtaaaacctgtgttctttagtgaccactgtctcgtaaatgtcacaattggagaaaaccaaacccctaggtcaaagtttaactggcgattgtggaagttgaacgcaggcctacttaaagacaagacatttgaagctgcagtggacgatctccttgatagaacggttgagcaaagcgggatgtgccccttagaacggtgggagcggttcaaagaggaggttaaaatgtcagcaattgaaagatccagcacgctcaagttttacgccagggcagaagagcgaaaactgcagcacaatttagaggccctgagtgaggcagaatgtactaatcctggtcaaggagtaaaagacacagaaaatatcaaagcccaactcgaacattttcagaaagcgcgatatgaaggcgctgtggtccgcgcaagaacgcaaaggtttctttgcggcgaacaacctaccaagcaagcttggatagccgaaaaaagatatgcaatgtccaaagaaataaccgaaatcgagaggaaaggcaccctcaccgcggatagcacaaacatcgaggaagcgtttgtagaacattaccgacggattttttcactcacttcaggaaggcacgattgtgaaatgagagacctcctgtcgcttatgccgaggctagacgacaacacgcgggaatggcttgaggaacccatcagcgttgaagaagtagaaagagcaataagtgacctgcccgggggtaaaacgccaggccctgacgggctttgttcaactttttacaaaaaaatcaaaagtcggctgtgtcccattttgctcgctgtcatcgaagaatcttataagagaaaagtattgccgctgtctttcatgaaaactcacacggttttaattccaaaatctgaggatatcgccaagttgcgtcgtgtagagggctataggccaataagtctctgcaatgtagattataaaatatttgcaaaaattctcaatagaaggctgcagcatgtaatatgccaattggtaggcgatcatcaaacatgtggtataaagggtagaacaatacaaacaaatattcacgtagccagaagcattctagactgttgtaccgatagagaagatcagattgccatgctacagattgacctcgagaaggcatttgaccgtgtgaaccataaatttctctgggccattttgcgacatgttaaccttggacacgttttatatgacagagtgtgaatggcatatcaaaactgttccacacgactgagagtaaaccgcaacgtaactgagagcattcccgtactgtcctcagtgcgacagggttgccccctctcaccattgttgtttgcactttatttggaacctctctgtttgagcgtcgcgaacaaggcgaatgtacaaggttttcgtttcaacgcgcttgaagtcaaggtattggcgtacgccgatgatgttgcagttttctgcagcgataaaagaagtgtgaccaacgccatcgcattggttaaacacttttgcgacgttagtggtgcggctgtaaatctagaaaaatgctacgatttttggcacggctcatgggctacaaagccattagagttcgaaggaatcaaatggggcttgacgcctacaaaataccttggtgtgccactccagcatatgcacaatcctggtgtttactggtccgaagcaacagccgaactgaaacggaaggtatcacgctggccgaaccgtgatttgtcaatttttgcgagggcaacggcctgtaacatcttccttgtcgccaagctcatgtatgtgcttcaagtgttgtaatgtactcgaagttgtatgcaaaaagtccatagattctgtgctatgtttatctggaaatcgagttgggaaccgatgagaagagataatcttttccgtcgcatctctcaggggggactgggccttgcacacctgtttgtacgaaaacttgtgtcacgattcctttttctacgagacatcgaacaaccatttatgcgcactgtcattcaaacaaaattgacgtggcacttgcctacatttttggtctcaagctgcggggagcaaccatccaaaataggaggttttctcaaagaggttgtcgatacgtacaattttttgtcagttcgcttttccagggactttttgtcatctgtaaataggaagggcctgtctaatgctctgtatgacagtctttttccagagcccttgtatcgcgcagtgcacaaacaaagccctggccaggatgttctttgtcgtgataaaaaaatggcgatcccgccgcgtgcaaaaagtttcttttttaaacttcacacctcgaccctcccagtgaaagcatggctccacgagaaaggaatttttgttccttggaccaccaactgcctattgtgtaaaacgcccgagactatagagcacgtatttattttttgttgggacgcccttttgttttgggacgtgttacagaggacattgaaaaaggacttagaaataacgtcacaatcgattcgttttcttccaattacttctcatgaacttgtgccgtacgacctcataatgctcgttggtctatacagtatctggtgctccagaacggctgttagaaacgcagatcttaacccacggccagttgaagcatacttcgtggaatttgtaacacaaatacgttgtatctacacggatcaagatgacctgccttcgtgggtaaagaaatgtgaaaaaatatgtgaaaactccaaacgttcttaatgatatgtgctaagcaaatgtatatgtaatttgaacatgccgttggtgaataaaactgttataaagacaaaaaaattctgttgtggtcgagaggttaaagcgccggcgcttgtcgtcgcggcgtgaaagttccgggttcaaatcgcactaaagactttttttttttttttgtattttgcgcgtgtcttacttttgaactgtgatccttttttggaaatcgtccacttgcactactgcgccttacacacttttactgttagtcccacctgttcaatcgaaacaccgggaagaagaaaaaaaaaaaagatcaacgcaagttaacgcgctaatgcaataatttcgtaatgttcattaaaaggaaaccaagctaacaacatcagtatggctttcacacaagcggagccgaaacaagcatcctttccccagcgtttacaattttatctgttttcaaataacgctcttgcttcgattcctttcaataacaagagacgcctatttaggactaataaaaactgcagttgtagcaattaaaaaaaaaacaagcaaaaaaaaaaaaaaaagactagcagctgtggatacattgattgagcggaatcctacaggcaaggcagcaggtcaaacgtctgagaaagtagtaaaactgaactaaaagagatcatacttttacttgcatggaatgagataaaaagtatatttatactctttacattttgttgtggcaatcgttttgtaatattaacacattacttgttgaattttagttagactagcagacgatcacgaccaaatgcaaaaatgaatcaggcatcgaccatcgcaaaccctctctctcatgcaaacacctaaactgactttggatcaagaaatggaattaattataattaattccatttcttgatccaaagtcattttaggtgtttgcattagagagaaggtttgcgatggtcgatgcctgattcatttttgcatttggtcgtgatcgtctgctagtctaactaaaattcaacaagtaatgtgttaatattacaaaacgattgccacaacaaaatgtaaagagtataaatatactttttatctgattccatgcaagtaaaagtatgatctcttttagttcagttttactactttctcagacgtttgacttgctgccttgccagtaatatttcgctcaatcaatgtatccacagctgctagtctttttttttttttgcttgtttttttttttttttttaattgctacaactgcagtttttattagtcctaaataggcgtctcttgttattgaaaggaatcgcagcaagagcgttatttgaaaacagataaaattgtaaacgctggggaaaggatgcttgtttcggctccgcttgtgtgaaagccatactgatgttgttagcttggtttccttttaatgaacattacgaaatgattgcattagcgcgttaacttgcgttgatcttttttttcttcttcccggtgtttcgattgaacaggtgggactaacagtaaaagcgtgtaaggcgcagtagtgcaagtggatgatttccaaaaaaggatcacagttaaaaagtagagacacgcgcaaaatacaaaaaaaaaaaaaaaaagtccctagcgcgttttgaacccggaactttcacgccgcgacgacaagtgccggcgctttaacctctcgaccacaacagaaggcgcgaggcgcggtgccggcggaggtatataaaaatactgctaccgcttttatctcgtgtgtttttttctttattttggctcctatttgccctccctggctgtaactttacctgccgctcctacagtataaaggggcggttaactagattccagttgaaagtccctccaattagtttctgcgagcgaaattaggcttttgtgcttgaagcgatgcggatctctccgccattaggcagggacgctaggtacttccttgtccccatggagctggtcacgtgacgtaaaaatccctcctggctgcggccgcgtccgcagccgcaagatgagcaaaccggcccagctcgacgcgggtggagcgaaagctcgcgctgcaaaacccggggatcctgggttcgagccccactcctgcccgtttcgatctggatgagcatcgtaccggcgtgcggtcgtgtatcactactgcgtggtgcacgttaaagactccaggctagcggttgtactgcactggctaaattgctcatctacagcgcgtgactcgtcgcaactttaaatggcggaccaactacacgctgcataaatatccccacaaccccccaattcctccttacctcctcacttatcgggccaacgtgaccacaccacgtgaccgtcgcgtggttgatggttgcgggtagcagggagcgtggcgctggtgcgtttcatttatcagtcatcgcagttagaaactggcccgcgcccagcctaccgattgtacgcctgctgcgcttcgttgtgtaccctcaactataaagtaaatgcattctgttttctacagactgttactatcccaaaacgatagtattcgacgtggaacgtcagcgctgttacgattgcctgttggcgtgttttaggtaatgtaccttgcatctgcgtgcatttgcagggagttttctttttatctcctggccacttattactactgtagccaaatgaagaacaaattatatacacacatctttgcgcaactatgtcgacccgacaggttggaccaatacttaggcactttcacagcgatgagtttcgcgccagccagcaaatttgatagctgcgctctgatcactctcatgttatatcacgccacattacttttggcttatgtcttttcgttgcggccgctatgcaggtcgtccactgggacgttttattgctgtcgtgacaaattgaaccagctcaacttgactcgatgttgagatatgttttattgacaatcggaagtgcacggagcacaccacgcttcacttcgatggggtccagttacagcggcgaccaacggccgaaatttattatttatttcgtacctacatcgcccggtgggcattacagtagagggggacgaaagaaatttacaaaagcaaacgtacagcagaacaacaacaaggcaagcaggagaaacatatatactgtaataatataagaaaacgaataacagcgaaataaccatgtcaaacaggagaaacatgccaatatatactgcaataatatgaaaaaaaaaagattaacagcatgcagaagtcacacaaaatatcatcgaaccgactacaataacacaatttcgtcaaaaaatggttgtacattaggaagctctacaagtgtgtcgggcaacacatttcagtcattaactgtccgcggaaaaaacgaatattttagaacgtcggtccgtgcgcgaaattctcgcatttttttttgattactagttctaagagaactagtaatcaaagtgcttccatcgtttccgcaatcggaaatctaagagaattcttgatcgattcctgttatcgcaaaatgtatgtgtgtaatacgacaagggcttaccggtgaaaggtaacccccgctgaagaaaagccagtccgattgcggcagccgaccacgctgcaagcgcccatcccatggccgggggaaattagcgtcccggcgacgccaggcttccgttttccccgttgcgactgcggcgattgccctgatcgtcccgtgtaccagcagcggtgtgtcgtctgctcgtgatccgcctcgaccgcttgcttgtttcacgtctagccttcgatttgaaaaaaacctaccggacggagcgcgcgcaagcctgcaagaaatccttttacaatcaaccatccatctcgcacgtgacatgtcacgcgcaccaatcgtcagaaagatctacggtcacgttggccacaacatcgtttaaactttttatggctaggcttcacatattttgcaacgtggtcccacctagtgccgtcgcgttctttcttcctcctgctttttttttttttttttttttttcgtttacttgacgtttaacccatcgcgtattttgttttgccttgtttggcttagttcttgctctctttcctttacttcggcgcttacttccgccagtccgtctgctacgctgtgcccagacatttggagggccgtctgcaactttgttgttgttgttgttttcttgcactgtcgtgtgcgataacttcctattttcaccttcggttgagtttctaattcgaaatcttcatatgtgctttttggaatttaataaatatatgaataagtgcaagctccttatacatctatattcgaattttatttctctactccggaacgtctgcaatgggtcatcgtttgttgatcaacgggccgccttcgggcgtacaccagcgcatacttggagatggcaggcatgtcatctgctgcctaccactgcaaaaacaactttttgcgatgtgttagaaaatccttcttccgcttcctgaagaccgaacatacatgagtaattaagttgctgcagcattcaaattaaactaaaacaaacaactgaaaaaagtgaagctcctttttttaacgctgctgctttccatttttgtttataagcgccgcaatgattgttgtcgctgaaggaaagttttgctgggtgatttgtatctttctattgtccgctatctttttgttttattcgccgtttgttcgctacctgttccccatttctcttcattttcgtctgaaaagaaaaccccatctttcctgcaaagctcaaaatatttttgcgcggtcattttctcgttagttttttgtttttgtaatactgcagcggctggtgcgcttgctctggcaatcttaacatgttgtttgcgcacgttttaatgaccacctatttaggtaagaaactgtcacaacgcagtctgcaacggaccaacagtaacctcttacgacgtagtccgagcagctaaacgcctttcttccgcttctcagatgcactaaaaactcgggtgatcccctgagtggcgtttgagaccgctaaataaactccacctttgtttaggcgagcgttgttatttgattgtcgttgcagttgcgatcagtggataccgcttcgcaagcggactgaccgtaatgaattgttccagctgttgggctgacgaaaccgggctcgcaaagcgtctgcttacgtagactccgagtcttctagaggcgttcgccgccgctccagtgggttctcggaggaattacgccgctttgactggcggccagagctgcgtgcgcgactgcttcgagcgagctactaaccagctattacagttcattcgcaacgtacatgctacaccatcaagatcataggcgtagactacggggggtcatcggggctcgtgccccccctgataaaatctggaagggggggggggcagagccccccccccccccccccccccctctccccttcccgggccccgggccatgatccttaccgagacgctgtttacgtgccatgttatgagcttttagcgacatgtaaacaaaataacgcccacgttgccttcattgacaaaatgcatgggaaattgaattccagtgtgcttttcttagcttcaatctccagttctggcgacaaggaaacgcgcagcccccccccccccccccccccccttacccgggaaaatggaaagtctacgccactgatcaagattgccggtcttagcaatgtgagctcgttctgaggacgattactgaagcaggcgatagagcagacaacgtagcagacgatggagctcatccgggctacctagggggcgctgaggggatctactggtgatgacgtttacaggaggaaacatgcagcccttgtgctgtaggtggtattggttgaacgcatatgcattcaccctcactgaaatagatatttgtcaatcatctactgaatagccattggcagccatttaaggtcagtctggtcaaagaggatgctaatagccaacggaagctacttgaagccgttcatacgtgtaaacaataaaaaaaaatcacataattataaataatattcacttctagtaatttacagccatttcaagccgatctcataaaaaaatgatgtgtattgtcaattatggtcacttggtggagccagtgacatctaataaaaggtatttcggtagaaaaaaaaacagatcaacaagcccgaaaaggttattaatgatttagattgtacaaaatcgctatacaaatcctaactggtctatacagaacactgcattttgacatcaaaataccaagaggttcaatgtcacgagctcatgctccctctgctccataaaaaaaaaaaaaaataaaaaaaattattgacaatcaaaattttcattgggtcagacccactcattcatttccggggaaagtggcgagttgtccactccttatcgccaggatcgctttctacttccgtctcccattttacctccaagtgtcctgtattagtctcaacggtttggcaggaaagcccgccatgccattttgtatcgatggaactggaacgagaacttattacatttttactggaacggagaaaggaacggcgttcctttgttttttgctcagtggggtaatttttattttatttcaaagaagaaaattcaaaaagtataaaaaagaacaatacatttgcaaagagaaggatctcgttaactttttggttacttatcttagggtttatgttctgtgggcctcgtttggttacagtcgggtgcagcagggccagtggacgttgattcttttttaaggacccgagactgaggtaacaaaaagcaaaactttcagtcaaaggaaaagacacagaaagaggaatatttcaaagtcagcttctttctttgcttccaggaatcctcatacacccagagggctaaggccgactacagccatcgctgaacttccacagggagacctatagttacaacaaaagaacaggttgccaaatatcgaacgcacccttgtatctcaaacattggtcacttaaagggatactgaatcaaaattttgagctcacaagacaaggctgggcggataggcgggacgctgcaaaaccccaaaacatcactcatgcagcaatgtctctaacggatcgccgtatttttggaaaagatgtgcgcgattgaacacacccgacgaggctgacgagacacaaggcacgtctcgatctccattccctctcctcctcgctacgtcccgtctagatggtgaaccgaagcgaggaggtgagacgcgaggcggcttccactcattctcaatttctcccggaggacaataacgtcaaagacttcgcttgacggcgccattcttttccaatagtatggccatccatttgtgatattgatgcatgagttatgttttggagttcgtttcgtccggttcaacacttctgcggccttattttgcgaaatcaaaattttggttcagtaagatacacaaatattaaaccttattccttctccccttatctcccccccccccctcttcaaactggacaacgaatctaaccttcacgaagaaggacttgtagtttttaagattgactgtccaaaagccccaccctctccttcacctgctcgtcttgcggacggcaacatcgagaaacaactgttgttgcgttcgaacaagggaacattttctacggatgggaaacagtgaacttgtgcaacctcttggctactgcaccatccctatttctatcggaggcacttcctatatcattttgtttactgtacttgctaattgtgtcgtcgacgttattttgggatgggattttttgtcggccaccgaggcattcattgactgcgccagccgcgaacttcatttgagcacttggcagactagttacgacgtgtacgaaaattcacccatttcgcttcacaccgacgacgattacctcttgccccccctttccgctattgctatcacactcctgccggaccgtccattcgaaagcaccactggtttcattgaacccattgcctactttgtcgcaaaaaagccagttattcttccctactgcatcgccacgacaactcaaggacaagtttctcttttcgtcaccaacacatctactgagtcgcaaattgttccccgtggtgcacgtttggccactctaacatctcattcttataccacgcttgcaacgctctctgaacttacatctacgaggctaccgtcagctgcccaaagcaccgccgcacaagttgctaaaatggtagactctagcttgcctcctcaccagaaggaagccctaacaaagcttcttgtttcgtatgaacaactcttcgattttaatagccgctctctagctcaaacttcggtagtctctcattacattgacaccggcacagcatctcccattcgaggccgcccttatagaatttcacccaccgaacgtaaggccgtcgacgatcacgtcagagatatgctccaaagaaacataatcgagccttcatccagcccatgg

SEQ ID NO: 169 - DNA, 23474 bp, Ixodes sp.
  source 1..23474: mol_type = other DNA
gactctttacgggatggctcggtttaccagcctttgcccttagtttcataaggacatttttttatttggccttgcacacacatcttcagcattgaaccataactccacatatcaaaagctagttgcggggactgaggaaagtctctagtcaaggaggggtcgtcgagcggtcatcccgtaccaccatgacaactcacacaacctaatgacgtgcgcaaagaggtttatcgccgacatagtgtttgagagggatcttaaattggaccggttcaacccgtttttgagaacggccaagcaatgtataagtgcgcacacagaaacgtcgacagtatgagagttcgttgtggtgcacgaaatgccgatggggtatggtgtcagttatgtaggccaaactaaaagatatgtgaacgatatattagcagatcataaaagaaatgtaaaaaaaaaaaacatacgaattcggaaatagccgaacacctcaatgaatacgcagactgctctccagcctgggtaaaggtgaagattttagagagggaaagcaactgtcgttcgacttcagattatgaagtgctttcaatactaagaaatcataatatcatatctgttttctatcaatcccccatggaaattactcaaaattgtgtgagtttttcgatgacttctttgcatttattgaagaaaggaattataacgtgatttgggaaggtgattttaatgattacatgctaagggaaacaaattaaaaaaaagcagattgccaccctcttccatgttaatggatgcacgaatatcataaatcaaccaacgcgagtaaccaccgcgtccgaaaaactaatcgactttttaaccagctttgaactgcattagcatgatggcctgccacattagtggccatcttgcgacatttattggtatagacgaaaacccttatcttgggttgccagaggcatggtagcgctttttagacgagggaaagatgaagaaagacaagacagacacgagcgctgactgcaactatttaatcaacatggaaatgtggcatatatgggtgtgtcagcgttgcatccatttacctttttgacacggaagtgcagttcatgcgagcggcggcaaggccgggggttggctgattgataggaccgtagcgtgcatatatgctgcatttccatgtttattaaatagttgcactcagcgctcgtttttgtcttgtctttctttattttgtcctcgcctaaaaagcgctaccatgcctttggcaacccaagaccaatacaaactggcccagcattcagcattgttaaaaatctcctgcacatacaaagaaactaaagaacgtagtctgaatcaatatatcactctcgtccgcctagatagcttcaaagatagttcgtgcaatgatagctgggctgatttactcaatgaaataaacgcgaatgaggcctacgagacatctctagacatttacaggactatttacaaacgtcattttccttgtaaatttgtacgatgctctaggcgagctcgaagaccctggataacagctaaactaattacaaaaagacaaataaaaaataagctatataaaatgtttattaatgcaaaacacccatacaaacttacaattttcaagcgcaaaatcagcttgaaaatgaattgaagaaacgcagagcactttattaccacaattatttcagggtgacatcaaatcatacttacctgcgtggcgaaaaattaatttagtgttgcaccggaatgaaacgcaagaaatattgaatttataatttatagcaacgtgacactcactggtagctcccttgcaaacgtttttaataacttttttgtaaatttactaggaacttcagatacaaccgatgcttttgctgtatacagcgaatagtcggggaaactttctacctaaatcctgtaactgaaagcgaggtaatagaagtattcagtaacctaaccgttagtaatagctgtgacgttgatgatataaaaatgcagacagtactatatgctttggacacgatgagccggtaccttgcacatatttttaatcttagcctaaagacagccacattccctacgaaaatgaaaatagcgaaagtgatcgcacctcataaaaaaggtgacaaaaataacataaacctctataggcctgtgtttctccttccagtcttttcgaaaggtttagagaaaattatcttcagtcgtattaccacatttacagaaaaaaacatagcattcgtacggaatcccagttcgggtttagaaagagacgtcccacggaactatgtttgttgaacaaaaaataatatattttacgtaatttcgaagataaaaatgtagtgttaggtatatttaaagattttagtaaggcattcaacttttttaaccacaatttgcttcttcagaaactttatgtttacggtgttaaagggcatagagcagtacttattatgtcatatttagaaaaacaggcgtcaatatgttcatatcgggggtcacgcctatgatttaaacctataaaatcttgaatactcaaaggaaatatacttggttcgcttctttttaatatatacataaacgacatagctaatattgcaccacaagcaaagtttatgatttacgctgttgacacaagtatttttatatcggcttggaataggtgactggcgtttgaaccggaagtttcgtcatcccaagcgaggcaccacgtgacttcacaaatccggttcgtccggtgccggtcgtggtgcgtccagctgcatcgagagcccttctaggcgtggtagccgtgctgtattcgcggttaaaatggttcacagttccgcggtacgttgttctaacgcaagccgtagagggcataagatgttccagctcccgtgaaacaaagcatggaagcaacgatgggccatcgctgttaagcgagtgatggagcgaagtgaactgtgacagacaaacgtcggtgaccgtttatgcgcggccaatattgttgcaggccagtagaacgtgttctgtctttaggtaggggccgcgggaaataacgatctctaacagtcttttggcacccaccaaaaaggtctcgatgaatccgcgaaggggtgagcactgcttgtcgtacaaggcgtccgcgagaacgcgagatgcgatgtcgcaggcaatcagttcatggcatgacgtttcgtcgacatacagtgccatcgccaggccgcttaacaggcatgtagccagaggggaggcccatggggcccgccccccccccccccccgaaatctttcattttgctgggacctcctgtccctcctctccctcatacaacattttgtcataagcgagccccccccccgaaccaaaatcctggctacgtgcctgccgtttaattcttatatcgacagctcggattaactttttctgtaatgagacgccgcagactgttcccgcgaagcggcggtgagtgggtggcttactataatataaataaacaaaagaacaggtcagcttgctgtaatataaagaagtaaaagcaaatgggcagcaccttcatattgactgataataaagcggtagtacgaccctgcgtagctcatatcaaaatcggtgctcgttcatacatgctttcttactcgacatcattaaaaaaaaaaaaaaacgtgagagggggggggggggggtatggtagttcacgggggacaacctagttgaagtaccaaaaacgcatgagtcttaaaaagcaggggaggaagtggccgagtgggctaacgcgtctcagctcggagcgtggagcgaatgcttgcgctgggaacctcctgggttcggttccccaccacccccgcccgtttcgatctgggtgaatttcgtaccggcacgggtccgtgtgatccctactgcgtgatgcacgttaaaaaccccaggttagtggttgtactgcactggctaaatttctcatctacagctaagagaccaattacccgttgaggcgcatctccatcgaggctgtataaacatacagagcgaaacaatttttagtgttaaaaagcaaggattgtcacgtagtcagatgtcatcgaaactaacttgtgtacgaaggtggcgtttcactcgcgcgagaaaacatattagctgagttcggaatgccgtctgagcgacttctttcatgtcttcaacttttgattgcttcaagattttcttacccagcctcaggtgttctaacaaaatgagaaaagtacgccagacctccgatcgggtatttcagctggccgcgtcctacggcttacatttgcacctatttcattcgtgataggatctaacgtaaccatcaaaaataaacagaacccaaatgaaaaacgctggctcaaaaggaaaacgaaacacctaacctgagttttcttgccaagacccgttaagcgcggtgcgagtgcagcttgccgccagccgcacttgctctgcgctttcgtggccgttcttgatgcttctgcgtaccgactactacttaacatatccgtagaagtaacttgagacgttcagaagtgcgtaagtcacccagcaggagaggaaggtggcccggattgatcgggtttcaacacccgcacacgcttccatagccgtcctggggctgcgtcggctgctagctacgaaccggaagtgaagaatgcccagagtgctttgcggctgctgccgaacgccggtcacctattgcagcgataacgtactagaaaactgcatcttccaaaggctggaggcttggtctatatcaacaaatctaataataaataaagacaaaagtaaagctatgcatttttgtcctttcgcgcgacatcatcctatactcgtcccccattgaaattgtcaacacgttcaagaatttcggcgtgttgttttcaaaccacatgtcttaggcggcgcacttagattatgttgtttcaaaacttgcttgtataaaaggtctgtaacatcgacactgtctaattctaccatcaagtgttacactacttcattttaagatatcacttgtatttcatttgaactattttcatttggtatggggtaccactacaaagcaaatttaataaaatattcttatcagaacagagagcgtttagactcgtgtgtgacgtgccttatcattttccacgcaccaaatttttgaaaaactcggagtactaagaaaaaacataaacaataccaatataggctcatcataaaatatcaacaagaatatcctgagaaaaatagtttccttgtaagcttggcatcccagaaaaaaagaacacttacaaattctactctccactcagatttctgggcggttgacagatcgcggaaaaattacggccttcagatgattagaagcacacctccaatattactaaacactttcataaatttgaatgttgatataatatcttctagcgcacaggagttacgtgaatgtcttttttttaataaatatgttattgtttacggtttgtcttgttttaaggaagaattttttgagcacatttttgtcattgttgatttcatgtgccgatgatgaccagttagtcatcttttttgtttcaccacatttgcgttttgtgaatgtttccgttaatgtttccgttacttttcttactttgtacaaaacttgtccccgctgtataccttttgaggggggtggagacccgtcaagctgctttgtcagctttttttctccagcttccaccacatgtgatatagtgaatatacttattattatatcattagaggaaaatattagtgaaagagacgaccagggttaagacatctaccgaatgcattattcacgcgtccgtgcagctaaatacggaggccgcaagatttctgcggctgagtggttcgggaatgtacgggggccaaggaaaaagaagagggaaagtggtaaaggggtttggctaagggagaagaaaaacaggggagaccaggggtggcgagttacttatatgtatgtcctgtgaaataacgtttgtagctgcatttgaaaattcgtccgtgtcgttctgtgttttcttctgttgccctctcttaactctcgggtttacaactatgctcaaattacacccgctagcctgcaccctcaccaatacctcattaattgtttctgaggcaagcatcgtcccgctcttgtcgacccagttgtgacactcgtcactgttggcactgtatgtacaaacgttgttaccttgttcgagttgggccatcgcttggctcatttggaagcagatgtgtttcttcgagaactgcctaagaaagacgtatgtaaacccgactatgtttggacaccctcgtcaactggaatcgattggggattgaagaaaaggctgatcaaggcttacaggaactgcacaagagacctaatttgaagcatccgaagcgcgtgtgtgaacgtcctgggacaagacttcagaaaggcaaaggactacaatgactagaccagactgaggcagtttaattgtcttcgagagaccctgttatgtgaatataaagcttctgcttgacggcatcagcgcacgcaattcgaacacgtgatgcccgcccaagaagagcgacatttgccaggggagttcaacgaaacatatgattgtcaatccgcgtggggccgtgttatgagaacgccctgaaaggcttttggtgaagggtcctgggttttgtgtcaatgtcaaaccattgcgccttgattcttcttttcgatatccagatggtccctagtgcggctgatgttgacgaaatacctgcttttgttgatcaggttcttgaccggatagacaacctaacgaagggcggtcatatacttgagaagagaaacttccgggagctcagggtggttgagagagagttgaaagaaaaatccctacagtcgttgcaaacagataagaagagaggttttgctgtgctcccggcttcaaatgtttcgatagaaggcggagtgcatcattgtggtctacttaataaatcggaccatgcctcgacgcgtctggggagaggtatttgcaaataactcaaggagtatgaattcgaccaattattaactagaatcagaggtgcacggcgttcggaattatgtataaacccggaaatgtttttacgtgatgtcattaatgaaaatggaatggggcagaaagtcgtatcgaggctcattcagaagtttttcttgtgtggcgttgaaggacacgttatcgataagaaacgctgcggaactaataaaaatttgagggaacatcaccatgagcatcggtttgtatcttcaatggacataaaatcttgtactattccttggagaagaagctcccgactttcatttaaaattataatgtgggttatacggcgcaaaacatagtatcttcaaactcgcatcgttttgggtcactttcgagctggacagcttctttggaagttcaaaacctagacttcatagagctgtagttcactcggtattgacagcagggtagacgctatgcatgttttaggccaatcgtgtctccggttagggtaacgtgactacagtctagaagctggtgataaagcagaacacggcacctgcctggagcccaaggccgcacatagcattcactgccctataaaccttgggtacaggtgacaaatccgctagttgtggtcgttgatgccccgtaagataagccttttgtgtgtgttcagtcccgttttggcctttgcttctcttcttttctctctctccctaagctgaaagcgtagtacaaggtgagtggtcgcgtggtttgacggatgacgcattagctgttggcaatctcggaatgcgttcagccggatctagtttggcgtgttttgcgccctgcgtggctgctgcgaatttcttcttctgcaaacaatttcttcgaagaagcccaagaatttttgtgatgcgtttagtgtttggttctacaaatgacagcttgtgctacatcgtgttgaattttgacggacaccttccttctcgtttttgtgtttgagtgctgcttttgccgtggccgtgtcgacatgtatctcggattacgcctttcaagtcccgtttcggcaacgtaagtgcgctgcaacctacttcgcgacaattgatcattttctaaagttactcacccagattacctctagaattaagccgtgtctatctcctgggccggtttgctcatcttgcggccgcgaacgcggctgtggcaaagagggatttttctgtcacgtgaccagttccacggggacaaggaagtacctagcgtccctgcctaatggcggagaataccgtatcgcttcaaacacaaaaacctaatttcgctcgtagacactgactgcagggacattcaactggggtccaattgaccgcccctttatactgtaggagcggaaggtaaagttacggccaggaagggtaaatataagccaaaataaagaacgaaacaggcgagataaaatcggtggcattatatatatacctccgccagcgccggtggctcgcgtcttcttttgtggtcgagagaagcgcgtgcccccgttcggaacggtcgcaagtttgatgagctcccgaggagcgtctgcaacggctttcaccggccgtggttcatctactgaaatgtctcaggattcctaccgagtggttctgccgtctctgcccacaggtactgaagttttgaactctgtatttgcgcattgtgacacctccgggcgcccatacaagatagacgattttcgaacacaaatggaacgccatggcgttctacaagatttgattggagctggccagtaccaaatgaaccatgtttggcttttcacgtttaactctctgactgcgaagagaaagcttcttgcggcaaaagaactggtcgtgaaagaaaaacgttgtttgctcatcgaccctgacgaatgcgaggtccgactacgactgcactggacaccgattcacataagcgacgatgcagtacggagggccctggagccttacgggaaggtgaacgaagtttcccgggacacgtggagggtggaaggattccagaatgttcaaacgacgacgagatttgttaaaatgaaccttaaggagggcacaacaaaggatcatctcccgcaccagctggttatgttcggcagcaaggtcctggtcgtcgttcctgggagggcaccactctgcctccgatgcaagaggacaggccacattcgcagagagtgccgcgttccccactgcgacaagtgcaatcgttatggccacgagcaagaggactgcattcgaacatacgccaccgtgatgctgcctgctccgggggaagacaactcggagttcttcatcgatgaagaagaagctgagaaaggcgaagacgacattcgacatccagccactaccggtgacccaaaggttacagacggacgacagggacacctagaacgaaagaatgacaccaccttgtcaagttgtccaacttgcagtgagggagactctgcacgagaggacgacactttggcgtctaattgccaagctggtcgtgaaatagacctatcccggaagaacgacaccatctcatctggtcctctggccggtcgagagggagacctagcacgggagagcgacaccatcttgccaagttgcctgggagctgacaaccctgcggttgggaacgccagtccggacgtcgacggtgctgcatcggacccctcaaaggaccagtcaacgaggccagcttgcatgagcgatcaccattcggacatcacgtccgaagacgacctggaaatggatgaagctgctgacccctcaaagaggcctttagacctcgtagaggaggggcctgactggactccagttcacgggaggaagaaatggtgcaagccccgccctcccccaggcaatggacgagagcgaacctcgtagaaggtggttactttctggttacatccaaactgcgaacgctttaggtcatgtctttcttagatccattttcgctttactagtgccagttgcaaagttacgcctgaggtagcttccatgtgaggttgttcatatgtcgctttccaatgcacgcttcctcctccaatcccaacaatgcttccgactaaaaaaactggcccttccactaaaggtttaacatttggaaccctcaacattagaggactaaactccactcgaaaacaataccagctgctacgtttgctccacgaggagcaattagactttttggccttacaagaaacaaaaatggcggaggaagaacaggtgacgagggcgttacagccttttcttacctcgtacgaggtatgcgtaacgcatgcagttggcactgcaggtggttgttttttattcctcaaaaagtctgttcccctttcagatgtgagtgtcattaacgatgaccatgggcgttttattttgtgtgactttaatttgttggaagggcagtggagagtaatctgcatctatgccccttgtaaagttagtgaacgggaggcattcttccgagggatttcacattacattaaatgtgatcggaccactatacttctaggcgactttaattccatttgtgaagcaagagacagaactccattcacgcgtgtaagtgattctagtgcaaatgtcctgagtgaaataatcgctgagaataatttggaagatgttttttacatttcaaaaagtataaagaaaattcagttcacacactttcagaaatcctctcacgcacgccttgaccgcatttatttttctagcgacattgtaaataacattggatcttatcacgtaaaacctatattctttagtgaccactgtctcgttaatgtcacaattggagaaaaccaaacccctaggtcaaagtttaactggcgattgtggaagttgaacgcaggcctacttaaagacaagacatttgaagctgcagtggacgatctccttgatagaatggttgagcaaagcgggatgtgccccttagaacggtgggagcggttcaaagaggaggttaaaatgtcagcaattgaaagatcgagcacgctcaagttttacgccagggcagaagagcgaaaactgcagcacaatttagaggccctgagtgaagcagaatgtactaatcctggtcaaggagtaaaagacatagaaaatatcaaagcccaactcgaacactttcagaaagcgcgatatgaaggcgctgtggtccgcgcaagaacgcaaaggtttctttgcggcgaacaacctaccaagcaagctttgatagctgaaaaaagacatgcaatgtccaaaggaataaccgaaatcgagaggaaaggcaccctcaccgcggatagcacaaacatcgaggaagcgtttgtagaacattaccgacggattttttcactcacttcaggaaggcacaattgtgaaatgaaagacctcctgtctcttatgccgaggctagacgacaacacgcgggaatggcttgaggaacccatcagcgtagaagaagtagaaagagcaataagcgacctgcccgggggtaaaacgccaggccctgacgggctttgttcagctttttacaaaaaattcaaaagtcgtctgtgtcccattttgctcgctgtcatcgaagaatcttataagagaaaagtactgccgctgtctttcatgaaaactcacacggttttaattccaaaatctgaggatatcgccaagttgcgtcgtgtagagggctataggccaataagtctctgcaatgtagattataaaatatttgcgaaaattctcaatagaaggctgcagcatgtaatatgccaattggtaggcgatcatcaaacatgcggtataaagggtagaacaatacaaacaaatattcacgtagccagaagcattctagactgttgtaccgatagagaagatcagattgtcatgctacagattgacctcgagaaggcattcgaccgtgtgaaccataaattcctctggaccattttgcgacatgttaacattggacacgttttatatgacggagtgcgaatggcatatcagaactgttccacacgactgagagtaaaccgcaacgtaactgagagcattcccgtactgtcctcagtgcggcagggttgccccctctcaccattgttgttcgcactttatttggaacctctctgtttgagcgtcgcgaccaacgcgaatgtacaaggttttcagttcaacgcactcgaagtcaaggtattggcgtacgccgatgatgttgcagttttctgcagcgataaaagaagtgtgaccaacgccatcgcattggttaaacacttttgcgacgttagtggtgcggctgtgaatctagaaaaatgctacggtttttggcacggctcatgggctacaaagccattggagttcgaaggaatcaaatggggcttgacgcctacaaaataccttggtgtaccactccagcatatgcacaatcctggtgtttactggtccgaagcaacagccgaactgaaacggaaagtatcacgctggccgaaccgtgacttgtcaatttttgcgagggcaacggcctgtaacatcgtccttgtcgccaagctcatgtatgtgcttcaagtgtttcaatgtactcgaagttgtatgcaaaaagtccatagaatctgtgctacgtttatctggaaatcgagttgggaaccgatgagaagagataatcttttccgtcgcatccctcaggggggactgggccttgcacacctgtttgtacgaaaacttgtgtcacgattcctttttctacgagacatcgaacaaccatttatgcgcactgtcattcaaacaaaattggcgtggcacttgcctacatttttggtctcaagctgcggggagcaaccatccaaaataggaggttttctcaaagaggttgtcgatacgtacaattttttgtcagttcgcttttccagggactttttgtcatctgtaaataggaagggccagtctaatgctctgtatgacagtttttttccagagttcttgtatcgcgcagtgcacagacaaagccctggccaggatgttctttgtcgtgttaagaaaatggcgatcccgccgcgtgcaaaaagtttcttctttaaacttcacacctcgaccctcccagtgaaagcatggctccacgagaaaggaatgtttgttccttggaccaccaactgcctactgtgtaaaacgcctgagactatagagcacgtatttatcttttgttgggacgcccttttgttttgggatgtgttacagaggacattgaaaaaggacttagaaataacgtcacaatcgattcgttttcttccaattacttctcacgaacttgtgccgtacgatctcataatgctcgttggtctatacagtatctggtgctccagaatggcagttagaaacgcagatcttaacccacggccagttgaagcatacttcgtggaatttgtaacacaaatacgttgtatctacacggatcgagatgacctgccttcgtgggtaaagaaatgtgaaaaactatgtgaaaactccaaacgttcttaatgaggtgtgctaagcaaatgtatatgtagcctgaacatgccgtcggcaaataaaactgttataaaaaaaaaaaaaaaaaaattcttctgtggtcgaaaggttagagcgccggtacttgttgacgcggcgtgaaagttccgggttcaaatcgcgctacattcttttaattttttcttcatttttcgcgtgttttattttttaactgtgatcctttttacgaatcatccacttgcactactgcgccttacacggtttttactgttagtcccacctgtttaatcgaaacaccgggaaggaaaaaaaaagatcaaggcaagttaacgcgctaatacaatcggttcataatgttcattaaaatggaaacaaggtaaccgcatcgataagactttcacacaaactgagcaaaaacaagcatcctttccccagcaactataatttgatgtgtttttaaatatacaacgctcttgctacgactcctttcactaacagaagacgcctatttaatactaataaaaactgcagttgtgacaattataaaaaagaaaaaaacttccacaaaataagcaaaaagtaataaagcctagcagctgtcgatgcactgattgagcgaaattctacaggcaaggcagcaagtcaaacgtctgagaaagtagtaaaaccgaaataaaagagatcattcttttacttgcatggaatgtaataaaagttatatttttactctttacgttttgctgtgtcaatcgttttgtaatattaacacattacttgttgaattttagttagaatagcagacgattacaaccgaatgcaaaaatgaagcaggcgtcgacatcgcaaaccatacctctagcccaaacacctaaagtgagtttcaatcaacaaatggaatgaattagagcagttggaaaacggaaacaacaaattataaaaaaattcactagcacagttacctggcgaaggaagagacgggcatgggaagatattgtaaactttccgcagagtgtacggcagatgcagtaggcgtgggggaagttggtaaagaaagccagagacatgtgtgcgctgatccgtgatcatgaacaacaaactggtgagtcagaactacccgcccaatgagtttatagaacacatagggccttatctacattcttagtatgagtgcagtcaaatacaaaaaaaaaaaagagagagtttttggcgcgatttgtacccgtgactttcgcgcggcgacttcaagcgccggtgccctaacctctcgaccacagcagaaggcgcgagccaccggcgctggcggaagaatataaatatacggccgccgcttttatctcgtgcggttttttttctttaatttttctcctatttaccctccctggccgtaactttacctgccgctcctacagtacagtatgtctacgagcgaaattaggtttctgtgcttgcagcgatgcggatttctccgccattaagcagggacactagttactttcttgtccctgcggagccggtcacgtgacagtaaaatccttcttggccgcagccgcgtccgcagccgcaaatcagcaaaccggccctgacagccgggagaataatttttccgaaattctaaaatgatgtcacaaatgcagatagaatatcgatttttttattctccctgcgtttcgtgataacaccttccacggtcaccttctcgtggatacacgttttatggacacgtttcgtcaacattaacgtttcatcgacattcgttaagcgaatgtcgataatcctgcttccctgggaattacgttcagcgaaaccaggagtggcgtgaagcgcagctcatgtaaaaatcattaaaagttggtacgtgctctacatccaattggtattttttatatacaaatgagaagtcacttttggtagttatttgtagaaaacaacaatataccggaagttttgttttttttttattctaagccaagtgggtatacgactactgcatctaactacaacaaactaatgattttcagaaaaaaaaattctttgtatctgcgaaaattacagaggtaatgtaagaaacttgagcattcaaccactttctgtttaatataatatattaaaggcagaccagatatatcactttaaattatttcaatggatctgcaaaaccaatgaggtgacacagacacctcattctagtgcctacacattacgaggcccaaaacgtagcatcccaagcatacgaacaaaccctggcaggcaaagtttatcgaacagaagtactaaattattgaattctcccagtattgatgttaatttccgtgaccctttccaaatgttcaaaaaagactgcagacgagccctggtttgcactgataacgcattttcatctatttaaggcatgtatatctatttattttttgttttcaatgaatcgtaacgtacacaaaacttttgtgtcctcattactggttttctagcctcatttttggttttgatttcgcttgtttccgctttattttaaaaatccttgtttgtaaattttttgacgatttgtaataactggtgtctatttttatctttattttaatttcattatacttctgggttatgaaaagaatatcgccctacattgttcaggctgtgccgcttgtgtagttgtttgagttgcgtcattgtatttcatgtgtttttcagatatttctaaaatgactgtttctatctgttttgatgacggtggctctcttgttattgattctcactgcgacttgtttgtaatgttatttctgctgtatgaactgcaggaggcagaggcgctgtctggcatcatgcctttatctctgccccctctgcggatggataaaatccgcaaaacaaataagaaaaaaaaaataatgtttatgccgaagcccaccttacagggctcaagttgccgctcaaagaaggtttttatttatttatttatttatttatttacagatactactgccttctcaaggagggcgttgtaggacgggcttctaaacaatgactgaaacgtacaatatgggacaaggccagtgcaacaaacatattaaagagcagaaaccgtgaaaccgacaaccgaaatactgcacaacaatgaaacgaaacagtgagcatcattacactttgccatgtacattttagcatttacgttagaaagcgaacaagacattgaacgatgtcttgttcggttaaataaggtattatcatatcattattgacaacgctttaaaccggtcttgtatccactacggaagtgtatgcaagaccggtttcagtggggaatcagacgggtcaactaaggaatgctgggttttcgagtgattgcataattggacagatttaaaagctagttgcaggaagtaaggaaagtcgggagccacagaggagtcatcgggcggtcatcccgtaccaccaagacaacctaaaggcgcgcaaaaaaagtgtggggccgacgttgtgtttgagagggagtttagaccgaaccggttgaccccgattttgagaacacacaaccaatgtcaaaggtcacacagggaaaagtcgacactatgtgtgttcggtgtagtgtacgaaatacccatggagtctggtgtcagttatgtaggccagaccagcagagatgtgaacgatagattaacaaagcataaaagaaatctaaaaaacaaatgtccgaattcgggaatagccaaacacctgaaagaattcgcagactgccctccagcttgaggaaacgtgaagaatttagaaagggaaagcaccaacatgaaaagattagtgaaagagacgaccaggattatgacggtctgccaagtgcattagcgaggcgtccgcgcagataagtacggaggccggaaaatttctgctgctgacttgtgtgggatacccgggcggggggggggggggggggggggaccttggtcggtcgctgtatttatcgttcactggagtgtacaggggtctgggaaaagaaagagggaagtgggtgaagtggtttgggaaaaagagaaggaaaagaggggagagcactggtggcgagtgacttatatgttttacctgtgaaataaaatgtgtagttgtgttcgaaaattcgtttatgtcgttctgtgttttcgtctcttgcttctatcccaagtctcgggtttagaactatgctcttagcctttaacttgagatctcagatgtgggacattcggtatgcccctattccggtcacctttctaagtacccctctcccacaccccctgcttcttcgagcgacttctgaaagtggtacggtacggtcttccagcgatgtcgtaaggcagcggaaatgcacgcttcatcgcatcatctgttggatcggttggcaaaaaaaaacgcggtagtccatggggacagaatagggggcatcacgaccggtgtcggcctgtcgtaatgcctcgaatccagtggttcagcaggaagtcccttcactttacccttataatttttatactaatggaagaacactttttttttttttgtgcaaaatcactaagctagtatagttggatgttgtccctcatacgaatataacccagcaaagtttggaacacacaagggaatgattattcttttttttaaatatgttgttatgaagtttgttattttttaagtaccaccacctgcttggggtagatgtgaggtaacatgttgacataagttgtccaggtcaccggttctgaattgcgtttcatttcacgtttgataccctcaacattcaagaattgagcgactacaccactttgctttgtcgttttatttccctacctgtctgactaatgctctgaaaggaatagtgttcaatcagaggtgttatggaagcacacgccgccacgtggaacgcgtgtacgacgcttcctggtacgtggtacgtactcgttatgctccagaattcatatcactgttcgtctaggcatatttacattttttatttcttgtttgtgagctttagagacaccgtatcatcacctggggaagcaagagccacgtttttaatttatcaggggcattttcatcatcgtccgcggtctcccaagaggaaataattgaaaatatgacgatggatgaaccgtgctcgatagaaggaaacgaagtctacgaaccagccgaaaaagagaaaatgtttggtgaatcctggagttttattactattttctgtttatggactcagcgtaggtggcagcggctgtgagcaatcatatgattgataacgttaccgggagtgttcgcgagggacgaccatgcggttcctttggaaggttgcaactatcagctgccgctgtaaaacgggaacgtgtcgttaatcctcatggttttcagcttgcacgtgtgcttaggctaactcatctccctttcgggcgaaccgtcatccggaagcaaatgtggtgagcgaggccttctgggagtatggccgtggcatagtagaaatatgcgtatttgtcttctcttactttctttgctctcctgtacgtgcagcgtgcgcgtgagcctagatgtgacgagcttgcaattctagtagcgtgcccgcacgagcagaaaagagacttggcgaaaaatcacctgttcgcgatcgtctatataaagtattcactggcggccatagctgtgtgcgcgacttctgagcgcgtgctgatgactagcttcctgggttcttttgcaacgtgcattccacaccgtcaaaatggccggtcttagtagtctattaatgggggcctgttctgagcatgcgctctagacagcactcacaaatatggcgcccagtgaatactcgggacgccatatagttattgcatccgtaaaatatgcactaatgcggttagtgcaggtgagttatactgccaggggtatattatgtgggtggttaatctttgcggtaagtcggctaattaaataaaaatactgaattaactttttttaattattgaatatagacatatcgttctaattataaacttactgagcgtcacccaaaaaccactaaattaatttttttagaacgacttgaagctcgtgggaaactcgggggcgcaccaaagttgtcactcgtagggtgcctgcatgtctgtctgtcacattgtgaagacatccattgttgccctgaatgtgccagtgcgtgacgctctcgtgcactcggtgcgtgacttgggttgtaaaatggcgtctatgcattagccaaagctacgcgctcgagctgagtgacaccggattgcgcgcacttcaaaatgcataaaaaaaaaaaaaaaaacgattgggcggaaaaatggctgaggtgtcaccactcaagcaaaagcgcgcgtgtgtatgaaggtactctaatcactcgtgaagcaggcgcaaagcaagcaatggcggaacgcgatgatcatctaatcatccgggttttgccactgctagctttgcgcctgctgcacgtgtggtaactttggtgcgtccccgagtttcccacgagcttcaagtctttcttaaaagaattggtttagtggtttctaatgacgctcagtaagtttctaattggaatcatagatctattttcactaattataaagtttattaattaattctgaccggttagtggtcttctcgcaaatattagccacccacattatgtcccctttgccgtataacgcacctgcacaaaccgtattactgcattttttaggaacgtttatatatatatatatatatatatatatattgcttgacctattgtcacacaggctacgcaaggcactagcgacacgtaaatagccaagtgtgatgccgaaatacgctttacagcagacgctgtatacttttaccagccaaggaaattttcgtgtcgttggcattgtaagcaaaaaaactcccagcgaacaattgaaggcaaaacagcgcatttcctttaaaatcaggcataaagcgtacagatcagtatctgtttcaattaaagaaaaacaagcatcaaaaccacaggatcgttgataaggcgcgtgtgaacaacaggaacaccttcccatgcgtgccggtaaaggttaggtgtgcagctgcttctaaaggggttgacgcctgctaacaatgcaaagcacgttccttctccccgcgtgtgtttttcggtaaagattacggttgcgtaagctactccgagtggaaaagtatccaacagaatggaaatcacgtagtgtcgtcaccacgctttcatacataacatgtgcttcagcaatacaactcaaccaaccaccattcattgattgcattcattgattgattgcattgatttaaccttagtaaagaatatttctacagtgagagttgaaaatctcagtgtgaagcacactaatcataaagtagtcgtgaatgtcgttgtgaagtaataaagggtgtggttaagtacatttcacttgtctctggtttcactctttgtagagccccgtgtgtgaatttttaagtgacgtcgcaatgggtaattgttgtgggtgtcgtttatagcttcgttgccgaaccaacttcacagcgtggattggagccacagtttttttacagcggagcttttaagggctagtttccccaggatcgtgtccgccagcaaataattgtcgacacaacactccggacagctacctacatctatgaacgacggcggcaactcttccagcctttcgactctggcttgccgacttgcggccgccattatcatttccaccatagtgcagcttcggtggtcttcatttttcatctgaaaagaaagacccaaagctttttataaatttatgtaaacggtttgaaaggcgtgtatccatgtgacgataggtgtaccaacatatatatatatatgtatagggtgtcccaagtcaccaggctcgatctaatatggaccgcaaaaatcgacccctgcacgtagcaatctaaacttttcgtcaagggtgtatttcacaggtcggttttttcttgtaaaactacagagcgtatttctctttttgtaaaaaaaaatagggccatgaaacttgccagggtctacgggggactgcgacgcagacgacagagtcgagttgcagggtgtgtttcgtgggcgtattgatagatggcgtcgggagcagcgtctggggttgtagccgaccagcgaaagaaagcactgcagacgacacgcagacgaaatccgttggcagcaaaagcgccgtcgttatgcaaacgcgcttttttttactttacgttttattttctggtccgcattcatttttaaacaaaaagtacgttataaaaagattatgttcattttaaaagccccggtggtcgcgagcagtattgataaagaggtggcgccatctatcaatacacccgctaaacacaaacccgcaactcgactcggtcttcttcgttgccacccgccgttcactctggcaagtttcttgaccatatttgtttatacaaaggtaagctacgttttgtaattttataagaaaaaaacgacctgcgaaatacatctgtgacgaaaagtttagattgctatgtgcaggcgtcgattttaaaggtccattttggatcaaacttggggacttcatacacttttaatttgcgcttccatcctcttttaaatacagctgggagcagcgcccgtgtttgtcttctctcttgtgtacgccttttgagcgatttcaaccctggttaaagacgtccattgtgacgggcgaagcttgcgccacctagacttgaccgggtagagcgcctgcccaagctgccctgtctgtccgagcatgtaacgtgatgtgacgaacaaagtttctataacgtacaatatttattcttacaatgtgcgttacatgtttataattaaaattgataaatgctgtcacgatctcgctcgagacaacgtaacctacaactaattggtgtgccatgaatgccattgcgacgaacggttttcaccaaacatatcggtgcagtatcccttcacacccttttttatgtatttcgtttgttatgcgcgaaggctttacgacggaaatagtctgtctgtttttgctagttatttgtttaatttcgtttgtttttaaaatcggaagtatttcgcgtgtgtatacggtggagcagaagtctcattgcatgctccgaattccgccaaagttccctcgggtgttcaaacgacgaaacaggagtaccgtcaacaacaacagtcaaggtaagaagacatgtgaaagatccttcgtttcaagggatgatttatatcctcataaaagaaattgctcttcttgtttgtgtttgctgctgattgaatctatcagaggctgaggggtagtacttcttcttgtttaactttctcgttgttttgttggtcttgcgcacggtcatgatcggatgatccaattcatctcctgcaggccagactcggaattaggttttgcccgcatgatcccgcatcgcgttgccgaaatgcaaacaacttctcggcaagatagagggctcggcacgctcgcactcggcacactgtcgtgttgacgcattcgcgtttctgtttcgtggcctctgaattgcaccggctctgtcgtagatctaagtatataagggatgtcctacataacttgcgccaatatttcagaacaaatagagagctctgcgcgagtgaaacctattgtatattgctagaaagcgtcttagggaaatgcaagtttttgtgcgcctagtttttttttctttttaaattaatgaagtgtaattagcttaatttttatttaatcgtttatgggtcaaagtatgaattctagcattctaggttggattgagaaacaaccaaccgaggtgtttacgatatgatacactttctgcgtttttttttgttttttttttctaaaaagtaagtttgcgaaatataaacagagaccgggtgacaatgtgccagcgcgtcgcgctcgcagcgttctcagatgttccctgaacgagccaagttcacctcatcactggcgcgctttttcaggcggtacttggcggtagcaggtgctcg

SEQ ID NO: 170 - DNA, 16412 bp, Ixodes sp.
  source 1..16412: mol_type = other DNA
acagctttggcattcagaacagcgtacccgtctttggtgactctggtgtacatgagtgcctgtttggtgacaggatcgtacttggcacacgtctcggctctgatgggggccttcagagggtcccgctgcgtcgagagaactgcgaccgtgacattggaagcttggccttcgggggctctcaagaccagcttccaggattcggtctgaaacggtcattggtaatcgctgtaattactcgaaccacttcacattgtatgtagaatgcaaacaggatttaatgctgtagtcacgtaccttacttataagtcgtttcctgcgtgaaaacaacttgcctataatggcgttcccagtttctatggttggttccagcaaggggttataggagaatggtgcaatcgcatcggctttttgctgctaattttgtttcgataacaacaaaactttcgttagatctgggtcgctaaactcgtcgagcacaactttgtgcccgaagtttgcggaacgcgctacttggactctcgcgacgctgacgtcgcgccgagcgagctgtcaatcattcgaacgctcatttctttgagaggggcagaatgtagcaaagttcatggaggcgcgcgtgcggcgcgtgaggggcgcgaggagcccgctgattgaacggcttcgccgatgacgtagcgcccatttgtccctacatccctacgccaagccaaaattaatgctttgcagattgtccctaggcgacctgctgacgctcaaaatccctccgaagtttgtgtaaaaaagaaacctcgtttgtcgaagtttttgctgacgtcaaagtgacgtttccgaactttgcgagagcagtggtttgagctcgagatcttcgcttcggatcaaggcgaagttaaactttgtcaatatggcggtgccgtacgctgaggctgagcttatcttccgccaccgtcggcgtcactaccgagaccaccggggacacctttcaagttctcccggacgacgactttcagcgacagtaccggctatcgaaagccgctgtgcgttgactctgcgacgggcttcgttcgccgcctcggaccgtggaacaacaagttctctgcgcgctacggttcttcggaaccggtagctttcaaggcatggtggcgactgtcgagcacctgtcagtctcccacatgactgtgagccgggctgtcaaagtttttgcggctgccatcgtttttttttttcgtttttctttttttttgtaatattcgaagaggtactaataaggtggtatacaattcagaatgtttggaaacaaacaaaaaccggcaaattcttgggtagggtcgagtctctcggcagccttcagaattatttccccgaaattctactggcagtcgtcactcattggcggtcaaatcagttcatcgaacgacgtatcatcgacagatcgtttcatcggcacgcgatgtaatcacatgaaagagagtgtcttccgttagggaggtatatacacattaaacattttcccacctttatacacgcaagtggggtgtcccataactaacaccctaataagtgtagcgatggaccttataaaagaattgtaaacctcacacctttaaaaatgtgtgattttttaaacacgtttcttaaaacgtgtgataatgcactacacctttttataaagatgtaaaactacaataccccttctcgtcaggcacgtagccaagggggggggggggcataaggcccgccccccccccccccgaaatcttccattttgctggggcctcctctcctccctccccctcatagagcactttgtcatcgacgccaccgcctccccccccccccccccccttaaacaaaattctggctacgtgcctgcttctcgtcaaggtgtaattaccacagtacatatttttgggggtgtacacagtggccccggactcaataatatgactgaacataaattacacaaacgagtcgccgaaacagcacgttgcttcttggcgagtgtcgaggcaatatcggccgaaaaccggcttcaatattggccggacgtacggttttgcgcctcgtcccgacatccggcaggtatgggtgtaccgatgcaaataaacgatttatgtctaatagcactggcaccactgatttcttaggaggctaaatcgcgaatagaggcctgtattgctggggtagagtggcaccaccggcagtcatagcttgacaagatcttatgcatgctatagaagaaacgtaaaaactcaattttattacgttagtgggttgttctctacgatgaaacttctatcgtgtttccgccaataacagtaatcttgtgggcaatattaactgttaacgcgttagaataccaatcttgtttaactaaatgagggtccagggcgactttgttgggcgtcaactgtgatgtgtttaatgagacaagggctaccgagagttattgtggagtcatccgtgatttcggagtcatcaaagctcagcaaacgataagttagaatgtctttactggggacattcgcatcgttttgaccgcttggacatagtgcttcatggtgaaagctttttctttgaactgcggtgagagcttccgggacaaactgaaactcggagcgtgccgttcagtcgccgaacgtgccatttatttagcaaccgaagcaagcgacgacgataagtcaatcgtgctccggccaattttttttttaatcgatgttcaaacccttgacgaatgtctatttgttttcaaagaacccgacataatcatcgcaccacgtcataaaatgctcgccctcgagcaccgcgtacaagcttccaatttttgcctgtttctcccttagacttgcgtgtattgcctcatggtgtaataggccaaagcaacaaggacaaaagcgaaaggaggactagaaaggacgcggcgtattgcctgtcgtcaagcaatggccgccggtgaggccagttacgggctcccgattcgcgattaagacttgcactgtgagagttctaacgcattacacccgccgagtgctgcacggagaacaggccccggacgaacttgccgaatgcaccgagtgcagactgatgctgtcgccatagatgtagaaaagtaccgacctcaaaccgaaactagcacctttttgttcgacgtgatgggtgggaatgcgagagttcccagtcgctgccatcgtttatctatataaacgttggttgctgcaacgtggaacttatatttgcgatgacttccacttaagcaactcggctgtcagagatatctacagccggcgtaagtttccgaaaccagctcactacaaaacagcatactcttgaggaaattgatggcactgtacgcgcaaagcttgcttcgttttaagcatagtattatgagtgaaccactgaaaggatacggctcaaatctagttctttggaacatctagcaataggtttcgtaagacattttatttccctgatgagggcattgagaacgagagctttctcaaaacaaaatatgacggggcaagatagctgccgttcaaatatgactttgcttaagtctcgggcaacgtctccatgtttagccttcccggacgctgagttaatgcgtcacaggtttctgctgtgggagctttgtcgaaaaatgttccacttttcacccatacagaaatgatgctagatctcgcggcctctgtggttgtcctgggcctttcattacacactggtaggtttcagcgtctgtacggctacaaaacgactcaaattttgcaaataaaacacgggccgtcgattcctcccttcgtgaaatataagacgcttacaattcaagctcgcgtttgagtttgtggcccgcggaacgcgatttcgagcagaaaaccaactttctctttcagttccgctgtgcgaatgcctaatcgtagcagacgaactctcgtcgtctgctctcgctcctcgcctggccgaggcatgacgggattgtcggcgctagagggctcaaagacaacttacagcgagcggcgtgaacgctcgcctccccgcgctgtctcgtgctctcgagcaccgcctagggatcgcgggggatttttcgtccaaaattgcgaagttgagcgcgcgcagggaggaggaaactttgcgggcgttcttttggtcactccccccgctacgtcaaaaagcgaagaatgttttgcaccacgagtttagctaccctgctctgatttagcagtaatggttgcacaggtattcactggacgacaaacttgagtgtgcttttccctgagcatggggaaaacgagttcacgtttataggctgctaaaacggccagtcctgatggtgcttagtgcacatttcgacatatttgcagaagctcgccctcagcacgcgctgagcagccaaggactcagctccgaccatcgatgaatactactcactgttgtacagggtgaagcaaggagacggcaggctctttaaatcgaccgggaaattcggtttcttaacctatcgcgctacgattttgtgcagcgttgcccacagatggtgcattttttttgtaaaatttgcaaagagcgaacttacctgaggaaaaagtaaagaaagaaaacggctgagctcctatggaaacgaagcgacggcaccggtcttcaaagagcacggcgccgtttcgcacaagacacaagagatggcgcaacgaacgccgccaacgaacgagcatacggcgccgagagccagcgtctttagcagacaatcttttagatgcggagcatctcttgctcgggtctatgtcccgcggcgtcgtagtccgcactcacactacgcatgcgcaactctcctccttccctctctccaaaagctgcgcgttactctctccgctttctctctctaccagctgcgtgcacttcgcgtgcgttcgctccactgatctcaatgacaattgctggatcgcgcttgccgctcccgcaagtgaagccaccggacgcaaccccgctgggatacgatttcccgatttgctagccttttgctgcggttttccagcgtgctgtagacacgttttctagtcgttcgtcgtcattcgccgaggaacttttttgagactctgtgtattgttgagacttgccgttgtgaacacgtggaaaattttacgaaagtgcagtgtcgcaggaaaaaggcacaacgcgtcgaaaggaagggctggcggcgtgttcaaagcttccttggcacaccgaagtgccgtgtctctgtgccttcgcgcgcttggataccgaccaaaaaccgacgccgtgtgaatgggtttagcgagtgcaatgtgcgtgaagccgtatcaaaaggtacaactcgtcgaaaacgtgtcgccggtgtcgcggcgtgatcaaagcttccttggcacgccgagtgatgcatcttcgtgccttcgcacgcttggataccggtcaagaattgacgccgctccaaagttctgaacgtgtgtcgcgcgtagatgcctttagatcatttatatatatcggccacggagttctggatcgtccagctgttccggtgagttgctatcaataaaagagggagatctgtacgtgtgtactatattaaccatggctatgtcccaaatctactctaatagattccgtgggagcacgaatagggcaacgttgtggagccaggggggttttcgaaagcaaaagtacaagacggcgagaatgaaaatctttaaaccgcggccgatatggtcgtgtgcaatctgttgaccaattacaattaggcgagccgcgctcaaacgtcaagtgcaattaagtaggttgataataagccagcactgatcagtgatgaggagctgttgtgcactgtattgtgtaaatcgtctagggacgaaaaaaagacgtaccttccccccatcttccgccgctagtggacgctggattaagctcgttcctaaaccgcgaggggaaaagacgttgatccagaggcacgaacagcttcacgcacattgcactcgctaaacacacacacacggcgtcggttcttggtcggtatccaagcgtgcgaaggcactgagacacggcacttcggcgtgccaaggaagtttggaacacgccgccagcccttcctttcgacgcgttgtgccttttttttgggacactgcactttagtaaagttttccacgtgttcacaccggcaagtctcaacaatacacagagtcttcaaaaaacttcttcggcgaatgacgacgaacgagtagaaaacgtgtctacagcacgctggaaaaccgcagcaaaggctagcaaaaatggcaaatcgtatcccaagcgagtgaagtccggtggcttcacttgcgctgcagcgaacaagcggggaagcgcgatccagcaattgtcatagagatcagtggttcgctcctactcacaccgcgcgcgcatgcgcaactctcctcctctagtttcctctccttcaagtgtgaatatagaccagtgtccgcgccaattccagggcgccgccatgtttatctacgctcgcaccaccacgcggagagaactggcaggcaggaggggggggggggctgcgttggcggcgttgctttggggagctggatgcggcaggctgtccgaatgcaccggcacatcgtgaacgatgtcactagaagtctccgtgacccgttcttccatagataagatgtcgtgaacattcgagaacccatctcgattaagaaaacaagaaaaaacctgtcgtcttaaatgttctcggtgtctgctgacccttgacatccgcgtttcagtccgggttcattgcgtagtaaatatttcgttaccgctttcttgtagctttcaaatgcttgattgttggcttcttgtatacgacattacattcgtggcacgtttgagaccgaccttcgcgatctgcttccctttctgcggcagcgcggctctgacgagccgaaataagtgggaagcgttcactcgatcgaacgccgttttagtgaatgaaaacgagaccacgacctttcatcgaatgactagcgaatgggtctagttacatagacagctctgattagctttcttttgtaatgtggcgccttgtctgccgctgcgaagcggcgtaaacgagggctccgagtatgttagcacgcgtttccccccccccccccccccccacacacacacaaacacacactgcgagcgtctgggttcgaaactattaattgccagttctaaaagatggtacttacttgaagtgggagctggaattctacgaggtaccaggagacacttactatcgggcaacgaagcacggtgcctgtgggggcggagtctaggaacgctactgattaatattgtgacaggcgatcagttatgatagcagacgaaacttcgactcgtttgttcagaagttcgcggtgatattttattagacctcgttacagcacaccaaggatcttaggcagtgaaattcacatcccgcaggctcgtccgtcgtagtcaaatgagtgcagtcgacgatgaggtgtaatgagctactaagcttcacaaggaaaatgcgcgtgagaaagagttttgaggaagtccaaaacaccgatccagcagacgcacgtacgtacgtttactccggacttcataaacccgacggctcaagatcaaagagcaccgccgccatcgccacccggttttctctgcactttgcgcgacgacggcactgcaacggagggcactcgcctcggcgttaacaatccgcgaaatagattaatttgccactcttgaaagcattccaaatgataaatgaaaatacctcggcgttgttgaacatctgacgacacaaccaacacaactgtgccgctggctgcgtgagcctgacacaactgtgccgagcgcctgatcggcaccgttgttgctcgtgaaggcctgcttatttgtagttgagacgatgactccacatctttcgtagtgcttgcaataacttcgaagggcaggggaaccttctcacgaggacgttgaagacactcaacaccagagccaccaaagcaatcgcacaaaccgtcgccatgtttgcttcttcttcgtcactcgcggcgcggtcaactcgttgcgagatgttttctggctcggcaagatggaaacccactgcggcaaagtggcgtatggacacacggctctcaccattacgggcactatactcacatactgcggtaaacaggaccgatgccggcgaaacggcagtcggcacaccagcgaagaagccctcaatgggaagcggcggcgcaggccgacgcagccccccctccccgtgtgcgtctgggttcgagattattgttcgcttttgctccttgcggtcgaggctaaaaagagcactttcggacaaaggtcaataagcagtggttgcgcgctgcgcgcgttcaaggggaggaagtggccgaggagagaagcgcttgcccccgttcggaacggtcgcaagtttgatgagctcccgaggagcgtctgcaacggctttcaccggccgtggttcatctactgaaatgtctcaggattcctaccgagtggttctgccgtctctgcccacaggtactgaagttttgaacactgtatttgcgtattgtgacacctccaggcgcccatacaagatagacgattttcgaacacaaatggaacgccatggcgttctacaagatttgattggagctggccagtaccaaatgaaccatgtttggcttttcacgtttaactctctgactgcgaagaggaagcttcttgcggcaaaagaactggtcgtgaaagaaaaacgttgtttgctcatcgaccctgacgaatgcgaggtccgactacgagtgcactggacaccgattcacataagcgacgatgcagcacggagggccctggagccttacgggaaggtgaacgaagtttcccgggacacgtggagggtggaaggatttcagaatgttcaaacgacaacgagatttgttaaaatgaacctcaaggagggcacaacaaaagaccatctcccgcaccagctggttatgttcggcaccaaggtcctggtcgtcgttcctgggagggcatcactctgcctgcgatgcaagaggacaggccacattcgcagggagtgccgcgttccccactgcgacaagtgcaatcgttatggccacgagcaagaggactgcattcgaacatacgccaccgtgatgctgcctgctcctggggaagtcaactcggagttcttcatcgatgaagaagaagctgagaaaggcgaagacgacattcgacatccagtcattaccggtgacccaaaggttacagacggacgacaggaacacctagaacgaaagaatgacaccaccttgtcaagttgtccagctggccgtgagggagactctgcacgagaggacgacactttggcgtctaattgccaagctggtcgtgaaatagacctatcccggaagaacgacaccatctcatctggtcctctggccggtcgagagggagacctagcacgggagagcgacaccatcttgccaagttgcctgggagctgacaaccccgcggttgggaacgccagtccggacgtcgacggtgctgcatcggacccctcaaaggaccagtcaacgaggccagcttgcatgagcggtcaccattcggacatcacgtccgaagacgacctggaaatggatgaaggtgctgacccctcaaagaggcctttagacctcgtagaggaggggcctgactggactccagttcacgggaggaagaaacggtgcaaaccccgccctccctcaggcaatggacaagagcgaacctcgtagaaggtggttactttctggttacatccaaactgcgaacgctttagggcatgtctttcttagatctattttcgctttactagtgccagttgcaaagttacgcctgatgtagcttccatgtgaggttgttcatatgtcgctttccaatgcacgcttcctcctccaatcccaacaatacttccgactaaaaaaactggcccttccactaaaggtttaacatttggaaccctcaacattagaggactaaactccactcgaaaataataccagctgctacgtttgctccacgaggaacaattagactttttggccttacaagaaacaaaaatggcggaggaagagcaggtgacgagggcgttacagcctctcttacctcgtacgaggtatccgtaacgcatgcagttggcactgcaggtggttgttttttattccttaaaaagtctgttcccctttcagatgtgagtgtcattaccgatgaccatgggcgttttattttgtgtgactttaatttgttggaagggcagtggagagtaatctgcatctatgccccttgtaaagtaagtgaacgggaggcattcttccgagggatttcacattacattaaatgtgatcggaccactatacttctaggcgactttaattgcatttgtgaagcaagagacagaactccattcacgcgcggaagtgattctagtgcaaatgtcttgagtgaaataatcgctgagaataatttggaagatgttttttacatttcaaagagtataaagaaaattcagttcacacactttcagaaatcctctcacgcacgccttgaccgtatttatttttctagcgacattgtaaataacattgaatcttatcacgtaaaacctgtgttctttagtgaccactgtctcgtagatgtcacaattggagaaaaccaaatccctaggtcaaagtttaactggcgattgtggaagttgaacgcaggcctacttaaagacaagacatttgaagctgcagtggacgatctccttgatagaatggttgagcaaagcgggatgtgccccttagaacggtgggagcggttcaaagaggaggttaaaatgtcagcaattgaaaggtcgagcacgctcaagttttacgccagggcagaagagcgaaaactgcagcacaatttagaggccctgagtgaagcagaatgtactaatcctggtcaaggagtaaaagacatagaaaatatcaaagcccaactcgaacactttcagaaagcgcgatatgaaagcgctgtggtccgcgcaagaacgcaaaggtttctttgcggcgaacaacctaccaggcaagctttgatagctgaaaaaagatatgcaatgtccaaagaaataaccgaaatcgagaggaaaggcaccctcaccgcggatagcacaaacatcgaggaagcgtttgtagaacattaccgacggattttttcactcacttcaggaaggcacgattgtgaaatgaaagacctcctgtctcttatgccgaggctagacgacaacacgcgggagtggcttgaggaacccatcagcgtagaagaagtagaaagagcactaagcgacctgcccgggggtaaaacgccaggccctgacgggctttgttcaactttttacaaaaaattcaaaagtcgtctgtgtcccattttgctcgctgtcatcgaagaatcttataagagaaaagtactgccgctgtctttcatgaaaactcacacggttttaattccaaaatctgaggatatcgccaagttgcgtcgtgtagagcgctataggccaataagtctctgcaatgtagattataaaatatttgcaaaaattctcaatagaaggctgcagcatgtaatatgccaattggtaggcgatcatcaaacatgtggtataaagggtagaacaatacaaacaaatattcacgtagccagaagcattctagactgttgtaccgatagagaagatcagattgccatgctacagattgacctcgaaaaggcattcgaccgcgtgaaccataaattcctctgggccattttgcgacatgttaacattggacacgttttatatgacggagtgcgaatggcatatcagaactgttccacacgactgagagtaaaccgcaatgtaactgagagcattcccgtactgtcctcagtgcggcagggttgccccctctcaccattgttgttcgcactttatttggaacctctctgtttgagcgtcgcgaacaacgcgaatgtacaaggttttcagttcaacgcactcgaagtcaaggtattggcgtacgccgatgatgttgcagttttctgcagcgataaaagaagtgtgaccaacgccatcgcattggtttaaacacttttgcgacgttagtggtgcggctgtgaatctagaaaaatgctacggatttggcacggctcatgggctacaaagccattggagttccaaggaatcaaatggggcttgacgcctacaaaataccttggtgtaccactccagcatatgcacaatcctggtgtttactggtccgaagcaacagccgaactgaaacggaaggtatcacgctggccgaactgtgacttgtcaatttttgcgagggcaacggcctgtaacatcttccttgtcgccaagctcatgtatgtgcttcaagtgttgcaatgtactcgaagttgtatgcaaaacggccatagaatctgtgctacgtttatctggaaatcgagttaagaaccgatgaggagagataatcttttccgtcgcatcacccaggggggactgggccttgcacacctgtttgtacgaaaacttgtgtcacgattcctttttctaggagacatcgaacaaccatttatgcgcactgtcattcaaacaaaattggcgtggcacttgcctacatttttggtctcaagctgcggtgagcaaccatccaaaataggaggttttctcaaagaggttgtcgatacgtaaaattttttgtcagttcgcttttccagggactttttgtaatctgtaaataggaagggcctgtctaatgctctgtatgacagtctttttccagagcccttgtatcgcgcagtgcacagacaaagccctggccaggatgttctttgtcgtgttaagaaaatggcgatcccgccgcgtgcaaaaagtttcttcttttaaacttcacaccctcgaccctcccagtgaaagcatggctccacgagaaaggaatttttgttccttggaccaccaactgcctactgtgtaaaacgcctgagactatagagcacgtatttattttttgttgggacgcccttttgttttgggacgtgttacagaggacattgaaaagggacttagaaataacgtcacaatcgattcgttttcttccaattacttctcacgaacttgtgccgtacgacctcataatgctcgttggtctatacagtatctggtgctcgagaatggcagttagaaacgcagatcttaaagggatactacaacgaaattttggcgcctattttatggtctatatgtgttcaaaggagcagtatcacatcgaacacaccaatatcttgttaaaaaagtcacgaaaacgaattttagaacgaattaaacgattcccaaacagcacctggtgtttgtcgcgaacgcctcgtttggaatgtccgtctaggtacattgccgggaagtgacctaggtcgtctcacgggttgtctcctggaagaacggagcagcgccgctctgcggaagtacggctcactacgtctcttctctagttctgaacgcaattatcaagccttcgctgcctgctctgccttcaccccttcgccattttcccgacgatggcgacggtggactcgttgcattgagttgtggtggcccgatcgcttgcgtacctcggtctctagaacgcttagatcatcctgtcgcgttctaatgccgagatggtgcggcactgtgcggtagaggactgcggcaacctcctgattcggtgcggaaaacctattcaccagttcccaaaggacgaacaacttcgtgcgctttggatccggctcgcacgaccgtcctccccggcgtggcttccaactacgagtgatcgcttgtgttcctatcactttcgtgatgaggactacgtgcgaagccccaggtgatggagtccttgggcttcccggtgaggaacgtacaactcaaaccaggagttttgccccgtttattttcaaagaagcggagatctggcgagcgcagcgaaccccttgacaagcgacgcagagtggtaagggagcatgttgtctgtcgagtatttccgagttctgcaatgaaagccgaaccgcatgtaagcgatttagcgagtgacgagacgagcgacggcgtcgagagtctgcgacgagcgacggagatttctcactgtcgccagtcgcatcgctcggttcttagattactggaaagagtaaagctatacgcactacgtcgtgcaccttgactggaaatggccctacgcactacgcgaagctcgtatcagcggcgagtttccaaagaggtggcgtagcatgatagtaaggtgtctgctttatacgcagcggtccgcggttcgatccccaatgagggcgacgtttccttagttttttttttttatcgctattttttttttgtagggcatttacgatgtttaagacatttctttactacaaataaaactgaaaaaaaaaaaaaagataaggattgatatttacgaaattttgcagaactgaatggtatgggactcgctttccggaggtgcaggaggggacagcggggcttgggttgccggctggacgccgcgaagcggcgtgtacaggttaagttttgcaattagcagccgcacagtgtcgccgcgaagcggcttgaacgcaggcaaggggggtaaggttcggttaaacacacgccgtccgaaaagggtgacccaaattgcatgatggcatcagctctctgcgtagtgtttatagccatttccgatcgaggtgcacgacatagtgcgtatagctttactcttctagaaaacgtcgctcaccgtcctggccacttgcccccgtcgctttcatgcggtttgcctcctcgcgcgaccgaccgagcaacagcgaagcgggtcgccgttgcttgtctcgtcacttgccaagtcgctttcatgcggtttatgcttgtctgtttcatccagcatttgagcgattttccaggagacctgtcgctcagttcgtcactcgccgaggcaaatcgcacgcagcgacctccaggcgatgaccaaagtgttcagggaatttagaaccgaacactgcgacaggcgacagcgaccagcgatagcctagctcatcgctcgccaaatcgctttcatgcggttcagccgtggccgatcgtgctttctttttcaagccgttccgctcatcatcgaagagctttggcaaggtgggttagagcgccggatcgaacgcacgcactgcagcaattcaacgatctagggttcgacccctaccttaccagtcttaacttggataaacattgtgctggcatgcggtagtatatcagtagtatgtgacgtcccttcaaaaccccggggtagcggtagtactgcactggctggatttcctacctacagtgtagagcgtatctgcaacgacaaccatccacctctctaaatttccatgcactttatttttcttaatggccagtaaatcatatgctattttcccctgagcatcaggcacctctgcgtgattccaccaacttcctggtcggaggtgcagacacatgttgggagcctacaaacgagctagaagaaacagccgttagaacaggtaaggttattgacgtaacttgaatgtcttttaacgtaacaatgtgtgggctgtgagtgctgcaccagtgggcccatactcctgggccaaaagcaataacacccccttaacattcttccgtcttctctcttgcatctctccagtgactccaagtgtgttggcatgtcggctggttgcacctgcggcctcccccactgcaataacgcggacagacagtgccagcacctttacaggtatgcaggcactccaatgggacctatactgcgtggtgtcacctgcttcaagcggaactgccagacggatccacacagtgctaatgttgctctaaggctttttgtgtctcgatcatgcacttctatgctgattcatgtctgttcataggcgcccctggagcgttgggttgcccacctgcggcctcgccgaccgctccgacacgaacagatggagcccgcaccccgacaggtatgaaggcactccggtgggacctatactgcgtggtgtcacctgcttcaagcggaactgccagacgcatccacacagtgctaatgttgctctaaggttttttgtgtctcgatcatgcacttctatgctgattcatgtctgttcataggcacccctggagcgttgggttgcccacctgcgcctcgccaaccgctccgacacgaacagatggagcccgcacccccgacaggtacgaaggcactccgatggggacctatactgcgtgggtgtcacctgcttcaagcggaaatgccagacgcatccacacagtgctaatgtttgctctaaggtttttgtgtctcgatcatgcacttctatgctgattcatgtctgtttcatag

SEQ ID NO: 171 - DNA, 21908 bp, Ixodes sp.
  source 1..21908: mol_type = other DNA
ttcattttagtaaatcacggtcgtcgcgaggagtttcgataaggaagtagcgccatctatcaatacgtgtgtcaaacgcgccccgccgctcgactcagtcttctacgtcgccgctcgccgtcgaccgtggcgagttttggccctatttttttacagaaagggaggtacgctttgtaattttacaagaaaaaacggacctgtgaaatacagtcttaaagaaaagttgatattgcttcgtgtcggtgtcgatgtttagagtccagtcaagatcgagcccggtacctgcaaacaccttattcgcgtctccggctcgttgctcgtcctccgctgcaggaacgggaagcgctctggtgagggtaccccggttactctgctcagcgagcacggcggaactgctcgcgatcgtgcctcgacgaatgttatttccggatgaaaacaacactattcacggtcccaatatagtgccgcagccgatattagattgtaccttattagagagctttagcatgtggaagcaaacgcaagcgttgtgcgtttgcgttagagttgcctgctccacattgcgcatacgcgtcgtcgccacgcgccaattcaagacccaaagttttggcttggatacgcacagtgaggaacacgcaacggtaactcaaacgcacagtgcttgcgttcgctcgtatacgcaatactaaaactcactactgtttcaccggcttccaacgccaacgagacgtgctgcagtgagcagacgtgcaagcgggcaggcgtccttcgaactggaaaggctgagattggcaaaaagacggcgcgtaataataaagtaaaataaaggctgtagaaaaacttatagcaaaaagaagtgttataaatcaagactccggagccgacgagacaatatcgagacgtatagcagtttcagaacacagcagtcttcttctttatttttcaggcggctccatctgtcgcgaggacccactctgtaaatattatagatctcgcgacatcgactagtatataacattcctctcccctcaacattgaaagcgctgtaccggcttccgcacgcgagtggagcgtcgtaggggtgcactttcacagacttcactcgaggtctccggtggttgttgtgggctgcagacaccatgcaccttcgacttggctgataggcctggtgacgatcgtggaggagctgggatgacctcgttgttgtttggcggccgtttacgtagttggtccgcatggcgtgttatcactttggacggcgtttcgacggttgccatgcgagctcccgttgtcgccatgacttttccaggaatccacttgtttcctgtcccatagtttctggcgtacaccgggtccccaggttggatcgtccagtctgtgtcttgggcagatgctgtagagtgtgatgggaaacatgtatcaagtcgcgagtgaatttgatgtcctagcagcagttcagatggtgactttcccgagcttgatggtgtccgtctattagcggcgagaagttatggtggcgccctcctacggttcccccttgtgacgtcattaccttgcaaacaacaagttcgatggtgtttgtaaatagcatggtggaagtttgaaatcattgcgctctcaaaggaacacttccaacaccgtcaaaattaaagttctttcattcctcttatttccgtcgatgatataccctttccgacgtcataagtcagcgttcggccaatcgtggaaggccgaccacagcgacgctttcggtcgcgctcgtcaccaataattaaacagaagccttgccaggctggttgtacggaagtcgttttgtatattcttcaacccatattttatagttcttaccgcgcgttccgccagaccatttgactgagggtgaaatggtgcagtcctgatgtgcgttatgttgtttttagacgtgaacttcaagaactcggcaatggtgaaaggtgtaccattaacagagaccaatgtgcggggtatccctaagtggctaaacacatctcacaaacacgacacagtacttgcgcttgtggcctgtttcataggaacggcctcgatccacttactgtgtgcgtcgaccactatcaagatcattttttctctaaaagtgcgtagaaaatcaacatgtaggctctggaccagttttcgtgcgttttgggccagttaactggtgccattgacgctggcatgggcaacattttgacacaggcgtcacacgtcgctgacgtgtcctctatttccttgtccagtccaggccaccaaaattgagatcttgctatagctttcatagccgacgctccctgatgactctcgtgaaggagctgtaggaggcgccccctagccttcctaggcacaatgacacggtggccccagtataccaggtcgtgtgccaccgacagttctggtttccttccgtaaaacggttgaaggttcgagcctaggctgttctcacatttgggccatccattcatgatgtatttcttgacctgcgctaacactgattctgtagctgtcatttgtttcaactccctggttgtcacgagaccctcctcctactgctccatagcaagcatatattcgggaagctcaccttcagcacctgtttccgctcctgctgttgctactgccggtagcggtagcctgctcagggcatccgcattcagcatttcttggccaggcttgtattgtagcttgtagcggtagcttcccaaaagcagcgcccatcgttgaattcgcgccgcagccataggaggagtcgggcggtcggatatcagcaaccccaggagtggctgatgatccgtgaccagggtgaactcatgtccaaataggtagtctctaaacttcgttacgccgaagaccagagtgggagcctctcgctctagttcagaataatttctttcggcggctgatagagttcttgatcgaaacccgatgggattgtcttctccactttctcggtgaaaaagaactgctccgatgccgtacggtgaggcgtcgcactctagtcgcagttctttcgctggatcaaagtgcgttagcacctttgccgagctgagagcttcttttgctttctggaacactgcatcctgtgcttcacccatgtccagcgagctcccttttccagcaaatttgtagaggcttgtcaacaaggttggcatattgcggacaaatctggcgtaaaacgtcagcattcccaaaaaagaccgcagctggcttacgtttttgggccgcggtgctttcacgatggcttccactttcgtttctagtggatggaggccctgtccgtcaatacggtgtcccaggtgcgtaacctcctgttctttgaacttgcacttttttttccggagtttcacgccgtgatccctgaaccgttgtagaagtgctctcaactgaaaggcattgccatctgctcgttcggacaatatcatgtcgtccaggtatgcctgcatgccttttagtcctcggagcatggtctccatcgtccgctgaaatatcgccggtgccgatgaaattccgaaaggcaagcggttgtagcagaagagcccacggtgtgtgttgatcacagccatcttcgatgcgtcgtcaagggctacttggttgttggcatcccttagcgaaaactaatacgtttgaaatataccatattctaatttgagtgtatttgaaatacagttcataattttaagtacacaaaaaatagaccgaaaatataaacttctttttttttacttggtactaaaatatacttctaaaaatcattttaaaatacctttacttaaactacatttgaagttcccttcatgcgttttgaaatatgtaaatactaaattaatacgcacaaaatacctttcaagtatatttcttgaaatatttatgtaattcatgcaaaatatactccaaccctaaaaaaatggagcaatcacaaatacgtgcagaatactcttgaaatgcctgaaaatcgtaaatactgttgtgttatactctaagtaccttttgactgcaatagtttggtagtttgacttaaactaacaacatattgaaaagctccccttctagaagttcacttcaagtagatatggagtacactgaagcgcctaaatacaacatttgattagtttgtcaactgaattgcggagcatcgcactgataaatcagcccagtttaggttattgtttccttttttctatcaaggacacacctgatcagttccttgcacaccaatcacaaacggggttcgggactacaaatacaacatttgctgatgctggaaagcttcagcaggtgctgtgaacagatacgtttagagtggttttgttagcacaatgttagttcactgaacgtgtatactcacccttgtacgtgatgtgaatagtgagtttaatatagtgatattaactaccatattaaatagtcaactattaaaatggaaaggcaaaaaaactactgtaaaatatttatttttcgcgggctcaatatttcgcgattaaggtcaaagttggagttttggaataattcgcaaattctaattttcgcgacgcgctgggatcgcaatatagattttaatatttttgcatttcgccggaattgtttacgggacctatttttcggaattgtaggcgatttgcgaactttgcgagaattaggtcctcacgaaaataaagtcgttcacagtattttaaagtgaagatactgccttgattcgcttcgtcctgagtggtgctacgcagagaagcaataacatgtattttatgagccgtttgtgtggatattgttttaaggactgcgccgaattgttattagttgtaccaatgccttttactaagagatatcgtccacgaacttcaaaacactgtttcccctttgacagactcccgaggagaagatcgaatacttggaaccttaataagtgcagaggtggtcaccgaaaaaaattattaccttcaatatgtaggctatataagactctagtgcagtcaacgggactgtgaatgagctgttcagtgcgtcatggtgtttgtgtttgtgttcgtttctaatgtagctttgtgagatgtatctaggagtgccttcaaatacctcagggacaccacttgctgacaaaatcgaaaataaaaaaaaaaattgtgtaatccgtttttaatgaacaaatggcatcttgagtgtgaaggaataatatttttggtatatctaaaatattttttgattcatatttataatgtattttgaatacattacgcgcgtatttcgaatgcggccaaaataatacagaataaatacaaaatgaatattcgtactaaatatatttcaacttcgtttgtagtacggcctctttttgctaagggatcccgtagatccaaggtgctaaaacaatcgccgtcgttcagacatgcgaacagatcctcgatgcgtggcagggggtactgctcgagttcacacgcagggtttagtgttgccttgaagtccccgcagatgcgcaccgagtcatccttctccagcaccgggacgattggtgtagcctattctgagtgtgtgaccggcgaaataattccgacttccaacaatcggtcaagttctgctgaaaccttatctttcagaccataaggaagcagtcttgccttgcaaaacttcggtgtggtaccgtcctttaagtgcagtcgagcaggtggtcccgtgatcagtccgatgcccggagtaaacagatcctgaaactcacagaaaactgcctccagatttttcacgttgactggtttgctactcagcgccacgacattgcctgtcaggcttaacacagaggtgccggccttgttcagcttgaaaattaaatcacgtccacacaaacatggaccgcaccagttcaacacagtcaaactgcactctactagggtgcctcggtacgagacttgcatgtgcagctcacccagcacgggtattcttcctaggtagcaggacagtttcacctgcgatgcttgaagcttaggccagtgttcacggtgctgaatgtaaacctcccgcgagatgacacagacggatgatccagtgtctacttccatcagcagatcgactccgccccaagagaacttacgtcgcactgctggaaccagatccacagttttggtcttcaagctccatatttgcacgtcttcggtttccgtttcttcccacgaagtccctgctgcttatagtgctttggcttgcacatgcggcctggagtatgacctctgttgcccaggatgtttacagttccgggcccagtgaccacattttccgcagtggaaacatgtcgttcctttgtgctggcagcggttgccttcgtgctctcggcttccacagtgctcacaaacccttgtgtgttgttgtcgtgggcgaaatttttcggacctctttccttgaaccttcatcctgaggacttccgaggtttcattccgagtcattcttttgacgtccaattcagcagcttcagccgctatggctagcgcttctgcatctgctaatgtcagttccctttttgacagcagttgcttctgaaggttctttgaccgcacgccacagacgatcctgtctctgagcattctttccaacatcgccgaaaaattgcagttatccgctattctgcggatttcgactatgaattcgtgaatcgactctctctctttttgacaacgattgaaaaacataaagctctttggcttcggatcgtagtgcgcatctaaagctgctaccacctcagcatacgttagagcgttaggtttttgtggagccactcttccacagagtagtcgaactgttttggtacctagtgccgctacgagcagtgctcgtctcttcgcgtcatttgtaacctcattgtcctcaaagtaagcctctaccttgatgaggtacgtactccatttgtctttgtcttcgtcaaactctggcagctggtgattcatctttgaaaaacccgcagcctggtgcgctctcaggatggaagaaggatccccctcgctgtgggtgtcttcacagtcctggctcgtcgccactgttataaaccaagactccggagccgacgagacaatatcgagacgtgtagcggtttcagaacacagcagtcttcttctttatttttcacgcggctccatctgtcgcgaggacccacaccgtaaatattatggatctcgcgacatcgactatactctgtttcatacttagcgtacaacgctgtcaaggctactggcgcgagcgcgtggcttcatctatggttttgtttgcgcgagaacgcgtgcaaatggtcaacgacatcaagccccacgctcttgccagtagctttgacaacgtcgcacgctaagtatgaaacggagtatagacgctttacacacgcgccagattgagccgccatagttgcccttctcttgtcttaccgagatgccgagccactgaagagggcgttgacgggtcttcacaagggcctatgctgggcacaagaacacagtagcatctaaaatggcaataacctgtcctgctgtggtaatgatgaagtgaagcgaacggaataacagggaacaaaaactgaagatcagacgctttacagcagctgtgcatgggcgccaccataactgaccttcagtttttgttccctcttattaccacacctttttcgcataacctcaaaccagccaggaactgacgtaccctcgacctggtgcatttttggattacccgcttacaaagggtatgcaaccgccaagggcatgggcgaaaaggcttaaaaacggacgtcgtgcatgagttagttccgagtgctcctttttaccatgctgcaatttccgaaaatctacggttgtcttcctaccacagcgtggtcgatggaaaaataatttaaaaaagcataagaacaatagaagcaagtgtgccatgagcacaaaaagctgcagcacgagtgtggctgcaatgttgtccagcttcgcattttccccaagaatccttatttatgaaatcagtcgattgcgagcttgaattgcgagagattcgtaccagaatcaacgtcacgtttaagctcacgaccacttcgtctacgacaagaggaccgattttaattggcagtgtctattctgccggcagccggtagaataaccggggggaaaaagtgccggcagtagtcgcctattgggtctcgtataaaacggattgtaaacacgcctattctaagctgtggattagctcagagtagcgcgtgcccccgttcggaacggttgcaagtttgatgagctcccgagaagcgtctgcaacggctttcaccggccgtggttcatttactgaaatgtctcaggattcctaccgagtggttctgccgtctctgcccacaggtaccgaagttttgaactctgtatttgcgcattgtgacacctccgggcgaccatacaagatagacgattttcgaacacaaatggaacgccatggcgttctacaagatttgattggagctggccagtaccaaatgaaccatgtttggcttttcacgtttaactctctgactgcgaagaggaagcttcttgcggcaaaagaactgttcgtgaaagaaaaacgttgtttactcatcgaccctgacgaatgcgaggtccgactacgactgcactggacaccgattcacataagcgacgaagcagtacggagggccctggagccttacgggaaggtgaacgaagtgtcccgggacacgtggagggtggaaggattccagaatgttcagacgacaacgagatctgttaaaatgaacctcaaggagggcacaacaaaagatcatctcccgcaccagctggttatgttcggcagcaaggtcctggtcgtcgttccagggagggcaccactctgcctccgatgcaagaggacaggccacattcgcagagagtgccacgttccccactgcgacaagtgcaatcgttatggccacgagcaagaggactgcattcgaacatatgccaccgtgatgctgcctgctcctggggaagacaactcggagttcttcatcgataaagaagaagctgagaaagtcgaagacgacattcgacatccagtcactacctgtgacccaaagtttacagacggacgacaggaacacctagaacgaaagaatgacaccaccttgtcaagatgtccaaatggtcgtgagggaggccctgcacgagaggacggcagtttgacgtctaattgccaagctgatcgtgaaaatgacctatcccggaagaacgacaccatctcatccggtcctctggccggtcgagagggagacctagcacgggagagcgacaccatcttcccaagttgcctgggagctgacaaccccgcggttgggaacgccagtccggacgtcgacggtgctgcatcggacccctcaaaggaccagtcaacgaaaccagcttgcatgagcgatcaccattcggacatcacgtccgaagacgacctggaaatggatgaaggtgctgacccctcaaagaggcctttagacctcgtagaggaggggcctgactggactccagttcacgggaggaagaaacggtgcaagccccgccctcccccccaggcaatggacgagagcgaacctcgtagaaggtggttactttctggttacatccaaactgtgaacgctttaggtcatgtctttcttagattcattttcgctttactagtgccagttgcaaagttacgcctgatgtagcttccatgtgaggttgttcatatgtcgctttccaatgcgcgcttcctcctccaatcccaacaatgcttccgactaaaaaaactggcccttccactaaaggtttaacatttggaaccctcaacattagaggactaaactccactcgaaaacaataccagctgctacgtttgcttcacgaggagcaattagactttttggccttacaagaaacaaaaatggcggaggaagagtaggtgacgagggcgttacagccttttcttacctcgtacgaggtatgcgtaacgcatgcagttggcactgtaggtggttgttttttattccttaaaaaattctgttcccctttcagatgtgagtgtcattaccgacgaccatgggcgttttattttgtgtgactttaatttgttggaagggcagtggagagtaatctgcatctatgccccttgtaaagttagtgaacgggaggcattcttccgagggatttcgcattacattaaatgtgatcggaccactatacttctaggcgactttaattgcatttgtgaagcaagagacagaactccattcacgcgcgtaagtgattctagtgcaaatgtcctgagtgaaataatcgctgagaataatttggaagatggtttttacatttcaaaaagtataaagaaaattcagttcacacactttcagaaatcctctcacgcacgacttgaccgcatttatttttctagcgacattgtaaataacattggatcttatcacgtaaaacctgtgttctttagtgaccactgtctcgtaaatgtcacaattggaaaaaaccaaacccctaggtcaaagtttaactggcgattgtggaagttgaacgcaggcctacttaaagacaagatatttgaagctgcaatggacgatctccttgatagaatggttgagcaaagcgggatgtgccccttagaacggtgggagcggttcaaagaggaggttaaaatgtcagcaattgaaagatcgagcacgctcaagttttacgccagggcagaagagcgaaaactgcagcacaatttagaggccctgagtgaggcagaatgtactaatcctggtcaaggagtaaaagacatagaaaatatcaaagcccaactcgaacaatttcagaaagcgcgatatgaaggcgctgtggtccgcgcaagaacgcaagggtttctttgcggcgaacaacctaccaagcaagctttgatagccgaaaaaagatatgcaatgtccaaagaaataaccgaaatcgagaggaaaggcaccctcaccgcggatagcacaaacatcgaagaagcgtttgtagaacattaccgacggattttttcactcacttcaggaaggcacgattgtgaaatgaaagacctcctgtctcttatgccgaggctagacgacaacacgcgggaatggcttgaggaacccatcagcgttgaagaagtagaaagagcaataagtgacctgcccgggggtaaaacgccaggccctgacgggctttgttcaactttttacaaaaaattcaaaagtcggctgtgtcccattttgctcgctgtcatcgaaggatcttataagagaaaagtattgccgctgtctttcatgaaaactcgcacggttttaattccaaaatctgaggatatcgccaagttgcgtcgcgtagagggctataggccaataagtctctgcaatgtagattataaaatatttgcaaaaattctcaatagaaggctgcagcatgtaatatgccaattggtaggcgatcatcaaacatgtggtataaagggtagaacaatacaaacaaatattcacgtagccagaagcattctagaatgttgtaccgatagagaagatcagattgccatgctacagattgacctcgagaaggcattttaccgtgtgaaccataaatttctctgggccattttgcgacatgttaacattggacacgttttatatgacggagtgcgaatggcatatcaaaactgttccacaggactgagagtaaaccgcaacgtaactgagagcattcccgtactgtcctcagtgcgacagggttgccccctctcaccattgttgtttgcactttatttggaacctctctgtttgagcgtcgcgaacaacgcgaatgtacaaggttttctgttcaacgcgctcgaagtcaaggcattggcgtacgccgatgatgttgcagtttttttgcagcgataaaagaagtgtgaccaacgtcatcgcattggttaaacacttttgcgacgttagtggtgcggctgtaaatctagaaaaatgctacggtttttggcacggctcatgggctacgaagccattagagttcgaaggaatcaaatgcgcttgacgcctacaaaataccttggtgtgccactccagcatatgcacaatcctggtgtttactggtccgaagcaacagccgaactgaaacggaaggtatcacgctggcccagacttgtacacgttactgaaaaaaagtaactgattacaattacaattactacagtcaaaaaagtaaccgattaccgttactgattactgcctcccagaagtaatcgaacaattactgcaaagtaattgattacttttcaagttactttcacgttacttcttattgcgatgacagaaatacacaaatacacagtaatatattgcgtacacaattttgtttggttattgttcccttttttgttttcagacccggaccttgtcgtgtagctgacgcgtcgacctaaggaacaaagcccactaaaaagtcaatagcgagttcccgcttcccgtcgactttatcagcaatctgcaacgagatccggaactccccagccaaggctggtggcgcgcttgtagaagagcgtggcgtaaaagaaaaaaggatttgccgactaatccaagttttattttttttagatgttaaaaaaatgtcaatcatttttgctccatggctgagtgactatgctgatttttgtgagaaaaaagaattgtgggatgaaaaatgtaattggtaattgtgtaattgattttgtaattgattacagaaaaaaagtaattgaattactccgagcgttacagcttgacaaatgtaattgaagcgttacaaaattacacttaactgtaattgattacaagtaatcaattacttgtaacgcgttacgtacaagtctgcgctggccgaaccgtgatttgtcaatttttgtgagggcaacggcctgtaacatcttccttgtcgccaagctcatgtatgtgcttcaagtgttgcaatgtactcgaagttgtatgcaaaaagtccatagaatctgtgctatgtttatctggaaatcgagttgggaaccgatgagaagagataatcttttccgtcgcatctctcaggggggactgggccttgcacacctgtttgtactaaaacttgtgtcacgattcttttttctacgagacatcgaacaaccatttatgcgcactgtcattcaaacaaaattgacgtggcacttgcctacatttttggtctcaagctgcggggagctaccatccaaaataggaggttttctcaaagaactgacaattttttgtcagttcgcttttccagggactttttgtcatctgtaaataggaagggcctgtctaatgctctgtatgacagtctttttccagagcccttgtatcgcgcagtgcacaaacaaagccctggccaggatgttctttgtcgtgttaaaaaaatggcgatcccgccgcgtgcaaaaagtttcttctttaaacttcacacctcgaccctcccagtgaaagcatggctccacgagaaaggaatttttgttccttggaccaccaactgcctattgtgtaaaacgcctgagactatagagcacgtatttattttttgttgggacgcccttttgttttgggacgtgttacagaggacattgaaaaaggacttagaaataacgtcacaatcgatgcgttttcttccaattacttctcatgaacttgtgccgtacgacctcataatgctcgttggtctatacagtatctggtgctccagaatggcagttagaaacgcagatcttaacccacggccagttgaagcatacttcgtggaatttgtaacacaaatacgttgtatctacacggatcaagatgaccttcgtggccttcgtgggtaaagaaatgtgaaaaactatgtgaaaactccaaacgttcttaatgatgtgtgctaagcaaatgtatatgtaatttgaacatgccgttggtgaataaaactgttataaagacaaaaaaaaactgtggattagctcagtgggtaagatgtgcgcctcatacacagcaggatcttagttcaatcccccgagggtatttttttttcttcggaattttgttttttgttgaggtattaggcgatatttaggacatctctcttttagaattaacactgaaaaaagagtacaaaaaaaaaaaaagacacgaatgttgttgacgaaacacatcctttttgggggtgaatggaggacagcggggcttgggccggccggcacgccgccgcgatgcggtggtactggtgggccaaataggtcaatatatttctaatgagcagccgcagactgtcgccgctaaaggagggggatggggggggggggggggggggctatgttaacgagctccccactgatacacgcgccgtccgaatctgccggcatttttttcccagggctattgtgccggctgccggcacaatagcctcacccaaaatacaaatttcattagtttaccggcaggtgtcacgtgacttcaggcagccaatgggaggtgaccgccggtagaatttcggaaaaattattctgccggctgccggcagaatagacactaccattttaattctcggtgccggtggtccaattaggttatcactgcaagccccatggtatgtaaaaggtatgaaaacgtttacatgccaccactcaagatggagctatcaaatgtcgagagcttacctgcatagactacattaaactgctcatatatacttcgctgcggaaactcaatcaaaacacccaaccgtcttcgtcctcgttctctcgaggagggaaggtgatagcctgggagtagccagctggattcaaccagacaagctccaaccaagttattgcagcccaccatagccaagtctagccaagttccccccatacccacaccgttgcctatccagatagctgtgctgccagaactagccggtatttctttttctaagccgctagacgacgtcgtcggcgctgcaattctcaagatggcggcgccgttaaagaaaaggtctatagtacataacaaaaagattttttaatttttcttatttttgggggttttggggggggggggggggaggggggttggtttggaaggattgggggtgattttggaagtttcccgattatcaaaagtcgcgactttgatagcaccatatgcgttccccagaattaatgtaattttacgtggatttttccagattagctggaatgttttaattgattttagactttttatattttaaaacttaattaaaatgctgcaattggcaccagtgatgataattttgacacttttgattgccatatatattcgctcgtttgaaattagatcataagcagcaaattacataagagcttgagaaactacgtattcaaatatcttaattctattattgctattaagacaaattgcggcaatgtaaatgccacgatcacaaaaatacgccatttagccataaaaaacttttcagaaaggttttgtttgttatattttgagcacatgaaaccttctgacatcgtgattaagatatatacagacaaacagccaaacactggatgtaatatgaagtcctctatgcgacacgcgctgctttagaaaaacacgcacacttctgctgtctcactcggattccgtctttggaattttgtagtcaaaagttttttttatttatatgctttgtgaacatattctaaactgatcacccatgacgatattttgtaaactttgaattgattttgttattcttgtgcagcgaataatgttgaagcaattaattttctaaatacccaaaataccatttcaagttccgcagttcaatatttcaaatggcgcttatcagagccagaaaatggagcaagaacacaaagataggagcacatactttttgaacaaatacaaccttatatgttaccgctaagtgtaggaaacacactgtctttgaagggacactagactctccaaaatattttgaagtgtctggattgaacacgcatgtcacaaaataaagtttccgcaaatgactttcttagctcaataataacgctgtgagacaaaccgtgagttatgaaagaataggatatgcacgcctgttccgagaagtccgaaatagaggttagtttcggtttcgttcggtaataaaaaattgcctctggcgtaaatattacgctgaacaccgttttggttttcaggataaagatgtgactggcgctcataacaccctagcttcctcgtataagtaggaatattttgtttccctcagtgaagccatccccctagtcaggctcggcaactggtatacccgcacacgtctccgaccctcactctaaccgccatttcggaaaacatgtggcgccacctataattagttggagtcgcgaatactttcgcgtacctttattttcaagaatcgcatcgatgcattcttaacagggtacaaggccgcaggactgttttcgttgctcagcgcaacgttactgaagcacgctcagtttcacagctcctcctgcgacatgggctcagtggtgttcacgagaactagcagcgctgcagtcgagtcttacttccggattgtctagcccaccaagtgtgaatagcaaagatgaagatgaagtgtaatacgccacggagttgagagtcagcgctgtgtgagaattccctctttgattgttcgaaatgtgcgtctgtttcctcgtgctagaaagtgttagtttaaataacaacgtcaatatctgcatcaacgcctcgccctgtggttctcgccgagcatgagatgcaacaagatcgcttgattcgacgcttcgatcaccagtctttccttacttgaaattgagccgtcacacccaccagtctttcttctttttttcttatctcaccctgcgggctttttaaacaataaattgtccgtagcccagttccaacactgttaggacgggtcatgaccacctgttttgtgccgggatgcacgagcggttacagcaagtttgcctcagccgatcgacatttctttgcgccaccaagggacactgctgactttaaacggtgggagcaagccctgcagagaattgacaggaaacttactgctaagtgcaaagtttgtgacttgcattttgaggatgaagacattattattgatggcaaaagaatacttatcgcatgggggaaatggcaattggcatggggtgccatccctcgcctgttccctaggctgccggcgcacttctcatatcgccagcacttggcagcaaaaagtgggtcactcgacaaatgtgctatgacgtatgtgagctcggcagggaatttatcaaatgagaattcaccggacgtaacagaggtccttcgaaaagaggacaactttagttccgaggtcggcctaacgttagatcgcttatcaactgcttcgtttccatcaggacagtggatgtttgagatttttgacgatgaggtaacatggaagaggtgcgacatacatatgttacacccgtcgcttggtggaagggtatttccttgtacagaaggccattgttatagacaaaggtttcggctgcgtggtgaattgttccagcaagcatcatcacacgcagttgtcatagagcattaaaagtgacgctgacgttgaacgtgtactgagacaagtggatgaactcaagatatgtgaaggtgtaattacagacaattcaagcagcgtgcgagtgcacacacaaaaaaacctgtttcgtcttgtctaagcggcaaagctgccccagctgtcctcggctgcgtcaaaaaatgcggcaaagaagtcaccaagcacgggcatgaacctcagcaagttgaagatgcgtaacctgaatagatcactgctgcgagcactggcgactcgcgagaaaaagaataaagaagtgttggacttgaaaaaaaagcttgaaaagacatcgggggagcgtgttgaaaaatatttccctggccttccatctcttcaacggcttgccgtaattacggcatttcaacagataaaagcgaaaacaccatgcggagtgaggtattgtgcagagcggttgttgaactgtatgccctgtcagaatttctagctcaagtgcttacaagctgcagaatgacctgaaaatgctgccactccaaagtatgagtcgcttgacacaaatattgaaaggcatcccctgtagatatgtcttcaactctatttcactggaagctatgcaaacgcaaatgcacaacaaatctcagcatctcacagtcgaaagtcttgttctggatgaggtgaagctgaagcagtggtatgactttaacaaatcaagttacaaagtcgatggttttgtaaactatggcgacatcacaagagaaggcacaaaccagctagctgaccatgctctggcgtttatgttcgtgccacgtttaaaagggtgggtacagcccatagctagcttcgccgcgaaaaacgcagcgccagggcgtgtcttggccgaactcgtgcttgaagctgtcatgcagctctacaagtatggggcaaccgttattgccgtagtgagtgatgtcgctagaaacaacaagctcatgtggcaacagtttggaatgagtggctgtatagtaaacacaaggcacaagattcaacacccatgtcttcctgatggacaatacttgcaatttatttgcgacgtgccgcacgcactcaagtcaagtgtgtgagaaaccatcttcttaagcaacagtacggccaggtagcacattagtctccacaaaaatcatcaaatatattcattgttttgcacatagaccctaatgtttacctttgcacatggttttcaggcaggagaacacccaataaatttagctttttacaaagtgctcttcgagactgcaaaagagacgcacctgaaggctgggcacaaactgacagcagcacacgagcagccaaccaatttgcaaaaaaatgaacgtgcgacttgctacccaggcatggcatatactactaatcttcatttcgaagttgattgccttttatatgactattcaccaacattttattctttcgtgactattaacatgaaagctttatatattataatttattacttgcagttgttcaaccgcagcacagcattagcgcaaagcgagtgtaggaaggccggtgtcggttgaatttcaagactcgtctggtacagtggtttttaccagaatgatgaacgatctcttcgacgcacttaatgcaaagcatcctcttgaaggcaccagagaaaactctccaaagtttcaggtacgaacatttaaagcacctgcattcactctgtttgcactccttgtgcgtttcactaggtcagatacatgtttctgacatttcaggtcatcaggaactactttgggatgttgaacgaaatggaacacaattacttacaccgaaacatgctgctgttcgggtgaccctgctttccaccttgaacattattgaggatctccgcaatgcgggggtactgtacattctgacagccaagctgaaccaggatccacttgaggtaatatgcaaagcagattataaatactaatcaaaagttaaataacctgcaacagcggctgtacatttttgaacatgtaacgtttataggcgggtatttagttgaaagtgaatgactaactggtgactgactgactaccacctcgaatgtgaataattgaagcatcgcaggacccacacaatattttgtgaccaggcactctccctcccaggacagtcgccatagcccccccctcctcccctcaccccaggacgctcgccgtaccactgcaaccccgcccttattcccaggatattttgtttccaggtacctaaccctttccccctcccaggatctatcgctaccggatacccctccccccccccccccccccccccccccccccccggtatttcgtgtccgggtacccctctcccgcgatatttcacgttcgggtacccccctcccctctcacccccaccctcgcgtattaaccaacgaacgttacctgtgcccacactagtgctttgcactttaccatacactttcttgccttattttttgcagagggtctttagccttgcccgctccttcaaaaggaatgaagaccatccaactatcgcacatttcagccaaatttacaggctgttgtttttgtacacaccgattgaaactgccatcaaaggcaattgccctggcacgtgcgactcagttctcgtttcgtttaaggagagcttgggtgagaaagttaaggctgtagctgatattaaatcggccgttgagtcaaagctgtatgagaaggtccagcacgttagctttcccttggaaacacattgagcgtgattatcagaaacctgacgttcaggacaggcttatttattacctttgtcgatatgttcacaagaaagtggaaaaagttaatcattttagggaataccagcagtctctcacagtccctcatgaagagcttgcacacatgccagccgagagtcacctgaaaacgataaggtcttttaaaaaaggttgcttacgctacccattgcgcaggtttttctgctttacaggaactagttcaccccctataggtcacgaaagttgcaaatataacttattccttattttactaactaaattgtgcgttcttttatcttcaccttcgcctttaacaacgtgacaatataaaagccagtgttcggagttacacttagtacacagggcgctggttgtgatgaatccatcgctttatcccggtccttgcgagcaacatatggctacggtcacttcagatttccgatagctaatgttccaatatttcttctgttgcattctcactcgaaatgctctccattggctccattgttccttaacctgatccacccaagtccggtggacattcatcgctcgttgccctgggctgctcttcatttcgggaagccttgggtgtcccaggcgtcctcgcctgaatcacgcagcccaggtggacactcctgactgaccactggagagtgctgttcttgttaaaaaatgatgggaaccagtcagtaatctcctgtcacacgtgcattgggagatcactgtcgatgagttgtcgggagcgcccagatttttggatttcccgataacgtttcaatctattatgatggacaactggccgctgccgttaagaagcttcataccccattcgaaacgctgcatctgaaagtttcgtaataacagtataaggtacctgtcatagtaattggagcttcaacaattcaccacgtttcactgcggggaaataaagtagcactttgtcgccaacgttaaaattctgttcatgaatgttccgattaatattgtttattcacttcttcgttatgcactgcagcagccgcaagcactatctgtaagttttctttagtctgccagacgctttgtcccagcgtgctaaaatcactgataacatgttttaaaaaggggtatggagcgaaatatcagcgcctatttttgtgtaaacctggccaccttgtttggatgtttacatgtacgttttaaaaagtcacgaaggtgacgtattggcgtctgattgcctccaccaatcggaagacaatttgtcacatctgtgaccgtttaaaatgcacatgtgaatgtccagcctagccatcacggtctcgtttgtaaaggagtattcacacgacggagaaatcccggggatttctccccggcacgcgcgcatcacgagatcaaaacgcgaggcctttgcacatcgcaaagcatgacgttttcgtcgtgggatgcgcgtgccggggagaaatccccgggatttctccctcgtgtgaataccccttaagagtagctcacaaacagcagggggtgttcgtccgtaaacccaagaaaagcaaaatgaaaacgaataaaacgatttccccataccccctggtagttgaggg

SEQ ID NO: 172 - DNA, 21566 bp, Ixodes sp.
  source 1..21566: mol_type = other DNA
tggccctgatgtgtttgaactgttgcgatgtattaaacaacgacacgcgcgcctcaatagtgacacaagtacatgctgtgtattcattcaaaaaaaattctacgagaaattgcgcacgttggcagttaaattctatgtaaatgatgcccgagtcggccatgtctcgattaacttgttcaagatatgcgtcggccatgtgcgacccgcgtcggccatgtctacgctcgcaccaccctttgttaatcgtcgttccaagcgcttgcgggtttagtttcctttctctccgctttcccggggtggcggtcccgtcgcgcgtcttgttttctccggctcctcggggcgggtctgtgccgtgtgcaaaacagcttcgttggtcaaccaccttcagagtggaatggctcaagcgttttttttcctttttaattgacgcgttcttttggtgttcataacattacgttttatgaattatatcactgttgtttgtgaaaattggtctcaaatgaccaacagctttgagaatatttcgtgtaatatgtcgtatgcggacctcgaacccgactcatgacctgcgcttttcgtgtataaaaacaaacatattttgagccgcaaatatttgtatttgcagttaggtcctcataaatcgtgtctcagttgtgacatttcagaaagtatgaataccttggcaatgccccgttaatcttgatgcttgtctttactgtgacgcagtgaattatgagtatggctattttaattgaaatgcaagttttcaagaagactgagtgtacgaacgggtatatctggatgcaaacatgatattaaggctatcaaaacgttgtggatctacgtcctctaagatctgttgaagtaaagtattcattttcgattttatttatacagtcactttcgattccctgtaaatgacatttgttcaatcccgctagttcaacacttgtaattgtaaactagacatgtaaggtatcttacatgtctagtttacacacttttatgcgcttttattaaagtcgccattcacacaatacttacaaaggtgtttctgactcagcttcttgaagtttgagtacagatatgattggtttcatgcctgtcacttccttagggttatatccacatacgattgcaattaagcaaactttgagcgaaataaaaaaaagcgagtacttgcctcaagacatcccggatacaatatgtttatattttccatgtctaggtaatcaagctgccctccctctgcctagatccggtgactcggtaccaaaaggcacagaacaagaaacagcgaacagtcctgacggcgttggcgatgttatcgaagacaaagaaccaccaacgacaacgtcaacgaggaggagtagaggcgacgctttaagcggcggcaccattgtcgtaccggtagtcgtaagcagtaatggtaatggggaaacgaagaacaatatcgacacgccttcccaagacaagcacaaacctaaccaagctccagaaggcccggagcttggctctgcaactggccatgtggacaaaggaccattgcagaacatcgaaagcggcaaaccggattcaggcgctcacgaccctttggccaacgtgaacgtcacagagttcatagagcgaaattgtggcaaagcccattcgagaaagcgtcggatagtgggtggcactataagctcagtgactacgtacccgtggaccgtgagtacttacctcaaaatagtataagtgaaaaccaacccataaaggttggttcatacattagcatgtgggtgtgaccgactacgtgacggctcctggcgtttcacttcttcgcgttgcgcggacatcggttgccacagcgaccatgtcctcgtaagaagtcacaagcgagatctgtcatgcttcctgctttttaccagggacaaccaggacacctgagacatttgtcccagttggatattctgttcgagggacgacactgttgaaatcagggaaactaataaagggagcgggcttggactagaagccgttagtgtggagtagtctactttttttacagccataatggcgccccgagcttgacttttgttcactagtaaatgcaaactcaagccttcattgtcacctttccaaggctccactgaaacaaatatatataccacggataattgtaatgttttgcagctgaaatttatcaataataaaaacatctccatcttggtccattgtacaaagtaaatattaacagaaaatctaatcagctcttagcttttgcccctttgccgcttttcacgtttcaatatcaattccaaacagcgttctcgggacgacaatcacgaaatctgaacatttagtatgcccatacagttttgtgaataaaagaatctattgaacttgtttcaggtgggaatctttatggtaggctcttccaagccatactgcggggccgttctcataacgccatggttcgtgctgactgccgctcactgcacccgcgggtgagtccgggaagtctttcatacgatgcgacaccgctttttttaaagccgtaatagaaacaaatgcacaggctgctttcccccagcaagaaatacttcttaaccctaactcaaagcgaggatttatgatttgaattgaactaccactcgccagctcaaaatgatagttcgaacatggtgcccactagagtcacaaaatacgctatacgcttagagtaacggcacaccattccccggttttcttggagacgccgccgtttttgtgcttagtgaagagcgggcggaattcgcgacagaaaggatttgaaaatgcgatttcctcagcttcaggtacggtgtccgaaagctcaggcgatgttgattttctctgtcgcggactgttttcacagatctgggcccgtttgctcgaagccggttaactttaaccgcggttaaaagttaaccacccttccctattaggtgcctacaagtacctagccaagtttgacgagggctggatgagcgatagctccgtgttttattatagggtgacagctggtgtcacctactggttgtagcgattataaatgggttccgtgtaaaaagctcccaaaaaaaagggggggggggggggggggggacccgacaacgcgcgctctaccgggttcttgcgacgcagcgcggcatacacttgaacagacaaattttttgctgctcgtggtacagatattgggtaaggtaaaactaaattcacccttgtttggaaaatttctaaatgcttggctgcctgaattgaagacaagcctcgttgaaattttcttccaagtccgaaagaggacgacgaagttcagttctaaaaacgacaaggaagaagtgagcagtgaaaggcgggaggtacaccggcagcatggttggccagcatgtatgaactgtatttaacaccatcataaattgaaaaacctgtaattcggctccagtgaaactaggcctattagtaaattaccaaggcatcgaggagaacgctggacgtgtacttctacagtccgcgcgtggcggccttcctcttataaaagattcaaagtaaataataataaggccttgacgaacgcgcgtgcaaggcaaaatttgttttagactttttgctttagaacaattactactgcacatgccagcacgtgcaacgcgtgcaaggttactcgttgtacagtgtactagaatgtcgtagcatgcacctcggtgcttgggaaatttagaaaaaggtctattggggcgctgtctgcttttgtgtcaaggcaatccactttccaaagaagttgtcatgccgacaattatcgcgttcatttacgcttaggaatggccagaatcaaaagactatctaaaaaaatgcgtcgaggtcattgctcatgctttctgacttaagtgaggtaaggcaaagcgaaaggctcccgcaccattcattgctgactaacgcgcccaatattgcagatacaacgacatattagttttaaagcgagcggcgctcactcaccggggcaccgccaggtttcccgcatccctaccgagccagtcacgtgacttcaaaatctctctcctagctactgcggttaactttagtcgcggttagcgcttaaccgcgctttgagcaaacgggccctagaggacagaaaagcgttatctgcgatttcaaaaagagcttcaggtaactggcaaccatgattttaagcacaaggatggctgaagtctcgtctcacttcagctgaagccaggattgctgaagcgatgtgcttcagtcatcttagcttcagcaagatgcgcttcggccatcttggctgaagcacattccatacgtcatatcggtttacttctatgaacgaattggagaattttaggcatgaaaaagaaactccggttgcagaactcgtgcagcagtcatctcctactcctgatcattgccttctttgaaaacggattgtgaaaaggtggctatacttggtatcaactattttgtgctacgttgtcaacgctagcatacatttgacagtgctgcaaccttgcattgctgcgagagcacgtctacgcatgcgcaaagaaggcttcatacaaaccactctccaagtagctttcacggcgttgaagcactgaaaaagttatgctagtcttgacaatgtaacacgaacaatacgtcatttccttaaactgaaaaacacgcgcatcacaaaaaaaaaaaaagaaaaaaagaaaacggcgacacgcgtttgttgcttgaaaattagcttttttcgctttacagaagaccagcagcggatctaagagtagcctacgggctgcagaccataaacgagcgcaccttggaagaacggcaagagcacgtagcggttgttatgaagatacatcagcacaagaaattcgtggacatcgtgcacggagacgacatctccatgttgcagctgaagacacccttgctcgcggacggacagctagtgccgcccatctgcacgccccaggtgtcccagctggaccgcagctccgtggtgaacacaatgggtgtggttgcaggctggggcaggacaacgtacagtgagttcgctttggtcgttgttaatgggaaagcattaactatccgatggagcgaagccggcaacgtcagtaaccgaaaaaaaaagaacgcgaaagaaaatcccatttttccattgcctgagcaaagcggctcttagatagcttcataatggagcagcgcgaatttttgcaaggacagaggaaggaactggacaggacgagcgctgactaacaactgaaaggattattttcaggaaaccaccaagaaaaacatacaacacgactctctaatcacgatggaaatgcgcatgcgcctcacaaaattggatgctatcagttacacaatgttatatgcgtcatccccgatctaaaaagtgaaagccgtttacaactccctgtaacgccgaattggagcgcagctcttgaggaggaggagggaagggtagtgaagggagaataggcccctcctcctcctgctcctcccctcattctttaatatgctccgggggggtcacgtgacttcggggggagggggtcacgtgacctctgggaggggccacgtgaccttggggggtcacgtgggggccacatgggggtcacgtgaccttgaggtgcccttggaaggggtcacgtgaccttgggaggtcacgtgaccttaggggtaacaaggtcacgtgacctgggggtcacgggaccttggggtgacctggggtcacgtgacctttgggagtcgcgtgaccttgggaggggtcacgtgcacctggaggtcacgtgaccttgggaaaggtcacgtgacctggggtcacgtgaccttgaggtgaccttgggggtcacttgaccttggggtgaccttggttgcgccgacggcgacgccgctgaagccggaaacgggcgcctaaaggcccgaccacactagcgtgaacggcgccaccgggcggcgccgccgggcggcaccgccgtccggcgtcccaaagtgaggagtccacattgacctccgttttgcaggcgtcacgtgacagcactggttcccgcgatcgcgcctcccgtcggatgtcccgctctttcgtcgtctgctcttcgttagattcttccgttccgcactcgctgccacacatggtaggaatccataatgacctggtgatcagcgtgaatgtgattatcctagcctgttcgttgatcttgcgacgtcgccgcgctctgaagggaaggaggcgcaggttttgggtccggccgagttggttctaccgaaacactgcgggacaggacaggtctggcgcgtcgccggggctttgctgacccggcggcgcgccagagatgaaggctactttcgaaactgtcaccaaatcaacacgacatccctcacaacacagacgacatgcaacaagtgccacggagaaactcacttgtaattccgaattcctctcctataatttcccagcggttgttcttagcgtccttatctaggtagtctggctgcgtcttgtcatataaaaagggaaacagtcgcgcagtttcaaggaaccgctccgttggggaaggcaccgggggaaaataggaagagcagacgacgcgaaacacgtccttcggaacgtgaaagacgagccgaggaccggcttgagcgttgccatggcatcgcgacgccactatctacgccacttcccattggttcctctcttctgcggcgtgcggcgcccggctttgaaccgcgcacggagcggttgactctgcggcgccgtacgtcgcgccgttgaagccgaaaactggtttgggtcggcaagcggctgcgccgaccgccgcgccgcaggcctccgcgacgccaatgtggtcgtgccttaagagctgcgctctaaaattcgacctcactgtcagcaaattcaaggaagcctgactcacgcaggctggcccctccttctttattctatgagcttcaacaatctctcgagctttttggtccctgtgtttatacaaaacaacggctttgtcaagtaacggtgtgcaggcgcagtccctgcagtgtaacgccaagtgggaacttgccgtacctgttaaagggacactgacagggtatttatgctcgccgaggtttttagttgtacgtgacatatgagagctcaactacccagaacagaatttgcgactcgaaattcggtttctttccgcccgaaaaccgccgatcaagaactggccggttcgagtctcgctcactctctttttcgcggtcaaggggccgttttctaaggtatcgatgcgaccaccaaatttaatcaaagtcgtgggccactgaaggaacacactcaatattaaaaatagaaaaaaatatgaaacccattttttgtggcttctaaaaagctgtaaatacgttgattgaaaaaagaagttccacagacaaccggaagcattctgtgcgttcgtcgttcgcgtatcgtgggactcgcggggacggcgatggcagcggacggcgggcgtgggacctctatttcagaactgtcgttcgttttaccggcgaattctgtctaccattaaaagagaaatttgggactgatcaaaagaattgctattcatcccgtacgacacgcccggccaccaagcctatttgcacgaagacgtcgccgagccgtcgctcccttctcgaggctgaagacatcgctcgcgcaaacgtcaagcacgacgtgtctacttcgagttgaatatgcacgcgtatgatttctttactaggtgcgaatgtgcccaaagcgtggtgcttcccgacttcgacccgggagtgcttttgctagagaaaaatcgacagcaaactttccaacttacagtttaccggctgaactattactaaggaaagagatccaccagaaaagagatgccccagtagctcgagagaagcgcgtgcccccgttcggaacggtcgcaagtttgatgagctcccgaggagcgtctgcaacggctttcaccggccgtggttcatctactgaaatgtctcaggattcctaccgagtggttctgccgtctctgcccacaggtaccgaagttttgaactctgtatttgcgcattgtgacacctccgggcgcccatacaaggtagacgattttcgaacacaaatggaacgccatggcgttctacaagatttgattggagctggccagtaccaaatgaaccatgtttggcttttcacgtttaactctctgactgcgaagaggaagcttcttgcggcaaaagaactggtcgtgaaagaaaaacgttgtttactcatcgaccctgacgaatgcgaggtccgactacgactgcactggacaccgattcacataagcgacgaaacagtacggagggccctggagccttacgggaaggtgaacgaagtgtcccgggacacgtggagggtggaaggattccagaatgttcagacgacaacgagatttgttaaaatgaacctcaaggaaggcacaacaaaagatcatctcccgcaccagctggttatgttcggcagcaaggtcctggtcgtcgttccagggagggcaccactctgcctccgatgcaagaggacaggccacattcgcagagagtgccgcgttccccactgcgacaagtgcaatcgttatggccacgagcaagaggactgcattcgaacatatgccaccgtgatgctgcctgctcctggggaagacaactcggagttcttcatcgatgaagaagaagctgagaaaggcgaagacgacattcgacatccagtcactacctgtgacccaaagtttacagacggacgacaggaacacctagaacgaaagaatgacaccaccttgtcaagatgttcaactggtcgtgagggaggccctgcacaagaggacgacagtttgacgtctaatggccaagctgatcgtgaaatggacctatcccggaagaacgacaccatctcatccggtcctctggccggtcgagagggagacctagcacggaagagcgacaccatcttgccaagttgcctgggagctgacaaccccgcggttgggaacgccagtccggacgtcgacggtgctgcatcggacccctcgaaggaccagtcaacgagaccagcttgcatgagcgatcaccattcggacatcacgtccgaagacgacctggaaatggatgaaggtgctgacccctcaaagaggcctttagacctcgtagaggaggggcctgactggactccagttcacgggaggaagaaacggtgcaagccccgccctcccccaggcaatggacgagagcgaacctcgtagaaggtggttactttctggttacatccaaactgtgaacgctttaggtcatgtctttcttagattcattttcgctttactagtgccagttacaaagttacgcctgatgtagcttccatgtgaggttgttcatatgtcgctttccaatgcgcgcttcctcctccaatcccaacaatgcttccgactaaaaaaactggcccttccactaaaggtttaacatttggaaccctcaacattagaggactaaactccactcgaaaacaataccagctgctacgtttgcttcacgaggagcaattagactttttggccttacaagaaacaaaaatggcggaggaagagcaggtgacgagggcattacagccttttcttacctcgtacgaggtatgcgtaacgcatgcagttggcactgcaggtggttggtttttattccttaaaaagtctgttcccctttcagatgtgagtgtcattaccgatgaccatgggcgttttattttgtgtgactttaatttgctggaagggcagtggagagtaatctgcatctatgccccttgtaaagttagtgcacgggaggcattcttccgagggatttcacattacattaaatgtgatcggaccactatacttctaggcgactttaattgcatttgtgaagcaagagacagaactccattcactcgcgtaagtgattctagtgcaaatgtcccgagtgaaataatcgctgagaataatttggaagatggtttttacatttcaaaaagtataaagaaaattcagttcacacactttcagaaatcctctcacgcacgactttaccgcatttattttctaacgacattgtaaataacattggatcttatcacgtaaaacctgtgttctttagtgaccactgtctcgtaaatgtcacaattggagaaaaccaaacccctaggtcaaagtttaactggcgattgtggaagttgaacgcaggcctacttaaagacaagacatttgaagctgcagtggacgatctccttaatagaacggttgagcaaagcgggatgtgccccttagaacggtgggagcggttcaaagaggaggttaaaatgtcagcaattgaaagatcgagcacgctcaagttttacgccagggcagaagagcgaaaactgcagcacaatttagaggccctgagtgaggcagaatgtactaatcctggtcaaggagtaaaagacatagaaaatatcaaagcccaactcgaacattttcagacagcgcgatatgaaggcgctgtggtccgcgcaagaacgcaaaggtttctttgcggcgaacaacctaccaagcaggctttgatagccgaaaaaagatatgcaatgtccaaagaaataaccgaaatcgagaggaaaggcaccctcaccgcggatagcacaaacatcgaggaagcgtttgtagaacattaccgaaggattttttcactcacttcaggaaggcacgattgtgaaatgaaagacctcctgtctcttatgccgaggctagacgacaacacgcgggaatggcttgaggaacccatcagcgttgaagaagtagaaagagcaataagtgacctgcccgggggtaaaacgccaggccctgacgggctttgttcaactttttacaaaaaactcaaaagtcggctgtgtcccattttgctcgatgccatcgaagaatcttataagagaaaagtattgccgctgtctttcatgaaaactcacacggttttaattccaaaatctgagcatatcgccaagttgcgtcgtgtagagggctataggccaataagtctctgcaatgtagattataaaatatttgcaaaaattctcaatagaaggctgcagcatgtaatatgccaattggtaggcgatcatcaaacatgtggtataaagggtagaacaatacaaacaaatattcacgtagccagaagcattctagactgttgtaccgatagagaagatcagattgccatgctacagattgacctcgagaaggcatttgaccgtgtgaaccataaatttctctgggccattttgcgacatgttaacattggacacgttttatatgacggagtgcgaatggcatatcaaaactgttccacacgactgagagtaaaccgcaacgtaactgagagcattcccgtacatgtcctcagtgcgacagggttgtcccctctcaccattgttgtttgcactttatttggaacctctctgtttgagcgtcgcgaacaacgcgaatgtacaaggttttctgttcaacgcgctcgaagtcaaggtattggcgtacgccgatgatgttgcagttttttgcagcgataaaagaagtgtgaccaacgccatcgcattggttaaacacttttgcgacgttagtggtgcggcagtaaatctagaaaaatgctacggtttttggcacggctcatgggctacaaagccattagagttcgaaggaatcaaatggggcttgacgcctacaaaataccttggtgtgccactccagcatatgcacaatcctggtgtttactggtccgaagcaacagccgaactgaaacggaaagtatcacgctggccgaaccgtgatttgtcaatttttgcgagggcaacggcctgtaacatcttccttgtcgccaagctcatgtatgtgcttcaagtgttgcaatgtactcgaagttgtatgcaaaaagtccatagaatctgtgctatgtttatctggaaatcgagttgggaaccgatgagaagagataatcttttccgtcgcatctctcaggggggactgggccttgcacacctgtttgtacgaaaacttgtgtcacgattcctttttctacgagacatcgaacaaccatttatgcgcactgtcattcaaacaaaattgacgtggcacttgcctacattttttggtctcaagctgcggggagcaaccatccaaaataggaggttttctcaaagaggttgtcgatacgtacaattttttgtcagttcgcttttccagggactttttgtcatctgtaaataggaagggcctgtctaatgctctgtatgacagtctttttccagagcccttgtatcgcgtagtgcacaaacaaagccctggccaggatgttctttgtcgtgttaaaaaaatggcgatcccgccgcgtgcaaaaagtttcttctttaaacttcacacctcgaccctcccagtgaaagcatggctccacgagaaaggaatttttgttccttggaccaccaactgcctattgtgtaaaacgcctgagactatagagcacgtatttattttttgttgggacgcccttttgttttgggacgtgttacagaggacattgaaaagggacttagaaataacgtcacaatcgattcgttttcttccaattacttctcatgaacttgtgccgtacggcctcataatgctcgttggtctatacagtatctggtgctccagaatggcagtcagaaacgcagatcttaacccacggccagttgaagcatacttcgtggaatttgtaacacaaatacgttgtatctacacggatcaagatgacctgccttcatgggtaaagactatgtgaaaactccaaacgttcttaatgatgtgtgctaagcaaatgtatatgtaatttgaacatgccgttggtcaataaaactgttatgaagacaaaaaaatgccccagtagctcagtggcaaagacgtccggttcacacgcggtaggaccgggttcgatcccccgtgaaacttttttttttttttcaatcattttttgatgttacatacctttttcttttttttacaatcatcactgaagaaagaaacaaacaaacaaacaaatgttgtggacgatacttcgctgaattaaatggtatgggatttccgttttggcacctgcgaactcgatgtaatcacttttcacaaaatgcaaagagcatataaatcaggtagcgtccgctttccgaggtgcccgtatatgttctacaggaattgcagccagccattggtcccgatcccgttcatctttcggaaactctgtcgcacaatgccactttttttcggatgcaggacatgtgagccagctcttcacgcaacatcttgggtgtattcttttcggagccgatcatggaaattcaccacgggcactcactactcatctccaactcttcaatgtacaaaacaactcatcttgagtacagaacaacgagcggaacaaacataactgcaaaagaatcgcacgccgcatgtcgtgtcgtctgctacggagaggagaaaaaaaaacgcacggtagggtgtagccacgtgacttccgccactcactctcttctctccacttctccgacctccgtcgggtttcggtttccagcagttgcgtcttttggctttattaaaaaaatacgctactctgttgcaaaatattaattgggtagtcctccgacaccataataaagcgcctggcaaaaaattaaaaaaaatttttggggggtttcagtgtccctttaaagaagtacggtgttcccgcaggcgaatgttgaggcaccgccccgtttgtccgatgtataccttcccgcaggtggaaggtatcttgtatactacacccaaggtgcatggcacgaaatcaatgcggtgttttatgccgcacgggctctccccctgtttctctaccttgttaacgcgcttttccactgcagagcaaatactgcttagcttgttacatgccgagaacacaacatctaccccgaacttcgaggctgctcttttaaagccgagaaccttgggtgtatactacacccaaggttctcggcacgtaacaggctaagcagtatttgctctgcagtggaaaagcgcgttaacaaggtagagaaacagggggagagcccgtgcggcataaaacacctcattgagttcgtgccatgcatcttgggtgtagtatgcaagatacccttcacctgcgggaaggtatacatcggacaaacggggcggtgcctcaacattcgcctgcgggaacactgtacctctttaaagggtacggcaagctcccacttggcgttaccccgcagggaatgcgcctgcacaccgttacttgacaaagccgttgttttgtataaacacagcgaccaaaaagctcgagagattattgaagctcatagaataaagaaggaggggcgagcctgcgtgagtcaggcttccttgaattagctggacagtgaggtcgaatttttagatcggggatcacgcatataacattgtgtaactgatagcatccaattttgtgaggcgcgcatttccatcgtgattagagagtcgtgttgtcgtatgtttttcttcgtggttttctgagaataaacctttcagttgttagtaggcgctcggcctgtccagttccttcctctgtccttgcaaaaattcgcgctgttccattatgaatccataccgactcgcccagttatcctgttttcttagatatcattggcggccacttcacgagagcgcgcgatcggccgcctgtaaaacaatcatgctgatctgcatccttcaagttgatgttgccgtctctaaatatttgaatggctagtttcccgtcaagcaatcgctccagcggtatcctttgtcttcaccagatggcgaaagtagctcggaccttcgagaggtttctctgcccatcgtgtccaacaagcgatgttcggaggtgttcaaggacgttgtcgaaatcacggacgggatgatctgcgctggagacatcacaggaaagaaggacgcctgtcaggtgggacacactaaagtcacttccgagtaccttgaggcaaacgtacgaggaaaagcggatttgttggcaacttgcgtgctgcatgtgtcaccaaaagcaaggtacatagacgggacgagaagctttccccttctcaacgaaggaaggaacttggccgtgaaccgcgacgtcacggtgaagatgcctcctgttgtgtcctgccataggctatggtcctgcttgtgccattacttggatggagagcaggacaatgaacttgtatgcgacgtttccagaaggggtttaatgttgcagtcgcgcaaaaggcagcgggaggaagtagcaacacaaaagcaacatggcgcacatactactctcgaacagggggtcgctccgtcagtcagtaagagtcttgagagcaaggaaatcaaaggaagtgttgctgagccggaagctcaatatgtcacctttgggtcgctcctagagcagcacccttctggtgggtacacaacacctcccattaaagttaggcgtttgtaaagtcatggctcctcccccacggccacgtcacgatgaacttacttcgtcggtttgaccagcttagacataatgctcttaatgtgtgacttccctcttagctgcgtgtcattttaatgacaaattctctttaaaggggccctgcaacaacgttttgactggttttgtagtgtgggctacactggccgaggacgagcagtttcgcgtgcctcgcataatgagccctgctccgtactgcgcatgcgcgaggagcagtgacgtcccacggcgcacagctggcgcgccggagccgccgccgccgccgcgcctgcctcgccgttctgcacattccagaggagtgacgtcctagccgcggcagacgcactggcgccgccgcgtgcccagctgtgcgcctccgttgcgcagtagccaagtctgacgctggcccggagccgcttgatagcgcctctcattttgtgcgcataagctcacgctacgcatttcttggcatagccgagctaagccaccgcattattttcatttgcaccgaacctgagcgcaccgaacgtagtagcttagtgaaacttttgtcgaatttcgctttagtttaaaagttataggcaaattaaaatgacaaaaacaagccaaaaataacctcattcatgacgtccttgcttgggtggccgtcaactagaggaggggtagtgagctcagcgagcgctcacggctgccgcactccgtgtcgacggctcgggagggcgccactaaagcatgtgcaggaaaccatgttgaatatagctgagactggggtagaaaggaacataaaagtcgaagaaacagaaagggacaggcgtcgtcctgtccctttctgtttcttcgacttttatgttcctttctaccccagtctcaggtatattcaacatggttaacatccaccagctcgcctgcacccttactattttatatgtgcaggataggctggatgaagcgggcggctcgcattgcatttgcaatgcgatccgccctgaagctaatttggcatgacacttcattgcccacaaacgacagtaaaaacggggtaaagatcagttcagaacaggagccacttcgcgctgccaaactaccaaacggccaaaccacaagccaaacctggtcgccgaaggtcttgggaacgctcggagccggtcggatcctcgagccctcatacgaccgcagcgccgccacgtacatccgggacctttccgggtcggctcccgatcccactacccctttctagtatgcgccgccttttccaccgcttgctggcgggtatatgtcgacgggtcatttcttgttttcctatacattataaactgcatttctttcttttctgatctaaaatactgagcaaaactactttcataaataattgaaacggttcgcaccacttatattctgaatttcgacggaaaaaaaaaaaaaagcttttagcggctctgaccagtagtaaggccaggaccaaaaacgtcacgatgtcgtcacatattgcgcgctttcggcaccgcgggtcgtccccgtaggtggaggaggtttctgcgtcgttcggttaaaatatgacgcactgatatttagttagtctctccgtgcccgctggcttgcccgaaccgtagataacgcgatgtctctgacatttggccatacaccgtttcacttttaagtcctaccgcagtcgacaccagtgatttccatacactctcccccctttgtttttctgaaggcacccccttaattcacgactcctatattctcaatgccccccccccctcaaaatttagaccccccccccccccctagtttcaattcctggggaaacccctggtcgacgctacggtccgattgagccaatcaaggagcgccaaaagtacaacgtcactgcgctcgtcgccattgtacgttcgctgtcaccgaccaaaccagtcacgcaccgtgatttcgccgtgatcatacgtttttaaggcgaaagccttacttgtcccattacgcaaaaaagcggcggcgttgtgcctgaaaaatggtcataaaaatatgtcatcaagcacgcacctcaaaaataaaacacaaagaaaagcacagcaacgcgggtgcttcgtcatggaagccgtcggggttcaccgcgcctgcgcagtgagggagtgtgacgtcaccgccggagtgccgtgtgggataggaagacgtggcgcgctgcttgtagtgcgctctgtgtaggaaagctttcgcattcctacacgcagaaatgcttgtgtagggacgctttcgcattcctacacactaccgacgggctgtagcgcgatacataaaataaaagaggccagggttacgaggctatcatttcgaacagatggatgtcggatgcaagatgatgtggcaatgactataggtttcgctatatagtgtgtatcctcgtgtagtgagatatatcatgggcactctccgtcgtcgttagtgatcaccaaagggaaaataatcgaaaatatgtagatgaatgaaccatacttgatcgaatgaaagaaagtctacgaagccgccgaaaggcaaaatcttaggcggagtcggggtgttgcctttcggcggcttcgtggactttgtttcattcgatccagtactattcctccgcatattttcgattaattcatgtagagagatgtattgactctgctgtggttataaataactaggaaaaaattccgactttcatgttaactgttcgcttcgagtgttggacaattttcgttatttttataatgctgtagaacgttgaacgcggcagtatttattaaagataaacttgagcaagccgctggtttttgcaaagtttaaaactattagcacggtatgtggatcctgcagggtttccccatttggtcactgcagcaggcgtctgtcaacctgcggcatcattggcccatgtgcgaattcatcaattacaatttattaaaagattatgaacgccgcgccgttgcttttcttgttttcgtttcagggagactctggcggccccctcatgtggtactcgagcgtctttgagcgctggtacgtgatcggtgttgtctccttcggcgtcaagtgcgccgagaaaggctactatggcacgtacacctgggtcgagaagtacctggactggatatgcaagatcaccgaagggctggtctgcctccgaaccacggggcgccagcagaaacaaccaacatccaaaaccgaaccagggacaaaggaaccagaactagatgaaaccacgaagaacagcaccgacacacaagagggagccacgtccactacaaccagcaacgaagagtcaccgcttacagcgccagaatcaaccccgcaacaagcgaccacgtcaaaccaatcagaccatgccgaagaccaaaagaaggcggaactacctgctgaaagcccagcagaggctataccaccgacaacacaaatggtcatgccatcattaccgaaaccagagtcaatgccagcgaaacccaatacgtataaaaagtcgcctctccaaaatgggttgggctatggcggatacaggaaaaggaggcggcgtaaaaagctcaggggcagaaatgaataaatggcgatcattatggcaaccgacagcgatgagccaatcaccttaagaggttttgttgtctgtatgttggtatttgtttgtgtccggctagccgctactttcccagatccaatgactttagctggcaccagtaagcgtcgactaagcggaatgcgcgtggaaaaacaggcattcgagaacccaaaaggaaattcgccattaaactgttccccgaataaaggctgaagtatattggcttaaacgaaatataaacagaactgctaattgatcgccatcttgattttagatttgacatcatccggtacgacgcacctgccatgaaacaaccaaacctgattgctggtttttcctaccgttcgatcagatgaaatgcgtaggcactgcactggcagtggaaccaagaacgctgcaatgaaaacgtagttcacgcatgaaaaactccgaaaacaacacacacttttttatcgcaaaattgtgtatacacgtccagcaatttcaacccactacaaattagcatgcttttgcgaacaattcaagaaggaacaccgccaatcggcagatacaaaataatactgtcgagaccggttataacaaagtcggttataacgaaatagcggctacagcgaagcgatcgcaatttcccattcccttttgcacttcgttataaccgaagtcggctataacgaaatagcggctacagcgaagcgatcacattttcccattcccttttgtacttcgttataaccgaagtcggttataacaaaatagcatatatatcgaagtgatttccgatttcccattcccttttgcacttcgttataaccgaagtcggttataacgaaatagcggatatagtgaagtgatttccgattcccgttgacgtcgttataaccggtctcgacagtacctatcctgtattcggtgattgaaagccggtttcgaagacaagggtgtccaggcaaatcacaaacatgcacactttgatgtgtagtgagagtgagcggtagcttcgttcgtgcccaagagccgaaaagccgcagattaatgttgtaggtcggttaccgtgacaccaagtagtgaaagaagttgtcacaacgaaacaacaaactgcactaattatggctaaaaaaagttaaagaaaaggccatgcacttacgacctacttgaaataaaatcgtttaaaataactgacctgtttcttaaaaaaagaatatctggatatgcgagtgaccgttgataacgcccctgttccgtcttcgtgtatttttctttttttcattgtagtgcttttcatagatccaaaatttataaaaaaaaaattgcgttaggatttttttggccctggagctaagttggtggtcatcgggggaaccagaaaagatgcaaaattagctaattacctgtcaaattcattcaagcgttaaatcaacattaaattcatactcgtttttagaaaggaggggggcattatgtaattggtgaatcgaggctcgagttattattgtctagctgtgatgtgaaaatcatttaaaaagtcgtgtatttcgcccacaatgcgcgaaaaaacgaaagctgcagcacggtcacgcaatgcggttggaatggcgccgtcacgaacctgaggacggaggagcgacggggttaattctcatagccgtcgtggatgccactgacgacgactgccagcagggatccgtggagcgggtaagcgtggtggaagtttctacaaccatccaacattacgcacagcaactgggtgctgccaaagcgggatttcgcataacgcgagtgatgtttgaaaacaagtctttcaagcagacgacacgaggattctcccttcgtcgcgccattcttggcgggacgccagggctgcccgcttcgctctcttcgcgcgacacggctgacgcaagccgacgggaagcaacacccactaggtaacaaagccgtagcgctgaatcagatggcgtcatcatcgaaagccaacgctgatcaccgattggacacgacgattacgtcaacgttcggctcaaacttgactcgaagccgagcattgtgacgcagcactcgtctccaatatgcgtccagtgttggccttcgctagtgaggcaaaagtgtcagcactgcgggcggccttgtcttctaggcggtgttgcgggaagtcccgacttccccctctccgcggcgagaggagagaaaaagagttttttttttcattctttgcgcgcgtggcgacggcaacctacgaggacgaaatctctgcaaagtctcgccccataaaggtatcgctttaaaaactcatagtgggtgttacggtgcaagaaatggcatccttgtacacaaactcaaaccgaaaccaagccggtaaagagcgcccatgacgtcgattccttcaccctgtgccagctccgcaaccgacgtacgcgccgcgccgcaggtaacg

SEQ ID NO: 173 - DNA, 22469 bp, unidentified
  misc_feature 1..22469: note = Fanzor polypeptide
  source 1..22469: mol_type = other DNA
cctctaacagatttggggtccggcagaaacggttcggtaaaactcatcgcgatgaacgggcagttttttgcattgaaaacaggaagtgtagaggcagatcgtgcgaacgaaatgcgaattcgtagtgatttcaatactgacttgttgcattatgcatactacacaaccgtcgtcgagcgtctaccgcattggttggcaaataacgagaatctactcttgtccgatttcgccgccaagtcgtatgataaagtgccgttgcacaccatatcatccattaggaatgccatgaattcgatgctgaaattctatttgcgttcgttagaattggagaggaacggactgtaccacgttgatcaaaagcctccgaacattatcaaaatgtcgggtaaggcgtttatctccgattttggaaacatgtggcactcggattacgggtcggatgtgctgtgcacaccctattactcgttctacatcgaagggcgctacgcacataaaattgctaagaaaatcgaaggtcaccttaataatatacgcaatagacgtgatgcttttcgtgttaaacttactaaacctggtgaattgtggtcaagtaacatctacggtcacgttcggtgcgtggccttgtatcaaattatagtaacgactctcgagtgcatgagaacaagtgtgttgaatacaagacaaaatacaaggcaattcgatcggtttcttaatgaatttgtggtgcctcttgtagaggttctgctagaaggaccccgcggttccgatcatagtgacagaatccagtccgtgatcgataaagggctccacgaggaactccggattggctcgactgcaactggaggaggaggaggtagcgatgattttatgcttggtgatgagataacaaaccatgatgagttccagataattccagagaatttactacataaaacagaattattccctattaaaggatcattagataagatttaccatgatccggaggacaagatgtacataaacacaacatcccaaccaaggggcggcggaggtctatccaagacgcgctatgagctggtatgggcgtcggtcgccttgggtttgacgactctggtctcggcgttctctcagtgacgaacgaggccaacacagctgatccccgttcgaaactggttccgactgtatttattcagcgccgcgtgactttgccaaaccgaggacaccccggaagtacactcgccttcaccgcggtttgggggcgggtagccgacagccggttctcctgtcgaacatcgtacctgtacccgagaggccgcgccaaccttcccgtcggtgccacaatatcgcaaaatcggcgcggctgggacggtgtgaacagaccgtgtgtatcgccggtgttctccatagggttattgattttttcaccgggagcgcggcgcccttcgaatgcgagcaacaccaagagcgcggcgagcgtggtgagcagcgtgccggtggcgagctggaagcgatccgacgcgtcccgaaacgccagcgtcgcgcacgtcatgaccggcaccgttacagcaatcatgggatcgaaccaggggtaggaatccgagggggcgaccatacactctttgcaatctaaaacctgtacaccactttttgggcaaaggactctggcacagacacgcgagtgtattctacgacttcgcgctgatgcgctgaaaagggccggacgcttcgcgccaacacgcgctcaggcgtgcatctcggcgcggatccactcccgcgtcgcggggtggctaaccgcagcagtcatgcatctccacgcgttccacgggcagccgtgggcgcgcgcccactgcaggacctccaggcagccgaatatcgccgcatcctcgcacgtcaagtcgtcccaggggcagccgtgggcgcgcgcccactgcaggacctcaggtggccgccggccgccgcgaattggcacgtgaactcgtcccaggggcagccgttggcgcgcgcccactgcaggacctccaggtggcctccgagggccgccgtcgcacacgtccgggcgtcccatgggcagccgtggtcgtacgcccactgcaggacctccaggtggcctcgttccgccgccgtcgcacacgtccgggagtcccatgggcagccgtgggcgcgcgcccactgcaggacctccaggtggcctctttccgccgccgccgcacacgtccgggcgtcccaggggcacccgcccgcgcggagccactgcaggacgcccaggtggccgcctttggcggcgaacgcgaacgtcgtttcgtcccaggggcagccgtgggcgcgcgcccactgcaggactcccaggtggcctccgagggacgcggcgtcacacgtcgactcgccccagggacagccggcggcgtgcagccactgcaggacgtccaggtggcctctttccgccgccgtcgcacacgtccgggagtcccagggacagccggcggtgtgcagccactgcaggacgtccaggtgccctccgagggccgcggcgtcacacgtcgacccgccccagggacagtcggcggcgtgcagccactgcaggactcccaggtgccctccgagggccgcggcgtcacacgtcgactcgccccagggacagccggcggcgtgcagcaactgcaggacgtccaggcatccccgtcgcgcggcggcctcgcacgtctgccggcccataacgccgccgccatcgctaaccgcctccagcaggagggggtagcgggggtcggcgcgcgcggcgtcgcggaggtcgcggcaggtggcggccagcaacgcgaacgcccacgggggcatgtgtgacatgatgtccagcaccccaaggcacgcgacggcggaggcggaggagtccatagtctctgatacgacggtcgatgatacggggagggaggcaggcaagcaggttttcggcccgggcgcgtgacgccttcaatttgtatgtatcgttggctggcctcggcaatgtgaagcgcccgccggcaaaaaacgtccggaaatcgataccccaatggttacacgcggtccatctcggcgcggatccactccagcgtttcgggctcaaactccgcagcgtcctcgcacgccgacgcgtcccaggggcacccctcggcccgcagccactccaggacctccaggcggccgaagaacgccgccaccgcgcacgtccgctcgtcccaggggcagccggcgccgcgcgcccaccgcaggacccccaggtcgccgcgcatcgccgcgcccgaacacgtcgacgcgtcccaggggcacccctcggcccgcagccactccaggacccccaggtggccgccgagcgcggctttcgcacacgcggactcgtcccaggggcagcccgcggcgcgcgccagcttcaggaccgccaggcggccgccggacgccgcggcggcgcaggttgtcgcgtcccgggggcagcccgcggagagagcccaccgcaggacctccgggtggccgccttcggccgcggccgcgcacgtccgggcgtcccaggggcacccgcccgcgcgcagccaccgcaggacgtccaggtagcccagcctcgcggcgcactcgcacgtctcctccgtgtcgcctctgccgacgccgcttatcaccaccaggaggcgggcgcggcgggggtcggcgcgggcggcgtcgcggaggccgcggcaggcggcggacagcaccgcgcccgcgcgcgggggcatgtgccacatgatgtccggcgaccccaagcacgcggcggcggaggacgccatagtgggcggggtggaggctccattggccggggccgaccgcgttagattcgtcccacaatcggacgcgcgctggccatgaagcgggccacaatcgtacaagtgtgcgcgtgcgcgtgcgcgtgcgcgtgcgctgtgtgtcggaaatggtacaatattttccgttacaaaacaacgcacccccgccaattttcacgcacaaaaatcacttccagcgcgccattgcctggaactcggctgcggacatcttccagtcgccctgtatctcgggggcgatgcacgcccagtcgtccttgatttccgaggcggtgcacatccagtcgttccggaggggagaaggaccggaggtcggcgtgtcgtacatgttgtggatgaccttcgcaatggcggacttgccgccgccgaccgtgccggtggcctcggtcgcggggcgactcgggctcgggagctccatcgatccgctcgtgggcggtggttggtctgtgaggttctgacgccgggaggttcgctcaccgcctgtatacactcctgccagcgcgctcgcaggcttccgggcgcctgcaaaaaccacaccgccaggacgcgcgctggctgtagccccggacgcttagcggttcatctcggcgcggatccactcccgcgtcgcggggtgcctcgcctccgcggcggcctcgcattgccccgcgtcccaggggcagcccgcgccgcgcgcccactgcaggacctccaggtggccgccggtcgccgcggcgtagcacgttgtctcgtcccaggggcagcccgcgccgcgcgcccaccgcagcacctccaggtggccggaagacgccgcgaagcggcacgtgagctcgtcccaggggcagccgcgggcgcgcgcccaccgcaggacctccaggcggccgtgcgacgcggctgcaatacacacctcggagttccaggggcagcccgcgccgcgcgcccactgcagcacctccaggtggccgcgtcgggcggctatcgtacacacttcggagttccaggggcagcccgcgccgcgcgcccaccgcaggacgcccaggtggccgccggtcgcggccatccagcacgtcgaaccgccccacgggcagccgttgccgcgcgcccactgcagcacctccaggtggccgccgagcgccgccaccgagcacgtgctctcgtcccaggagtagccgtgcgcgcgcgcccacttgaggacctccaggcgaccaccttgcgccgcgccccagcaaacggccgagtcgaccgcacgtcgctcggcgtgcagccacttgagcacctccaggcggccgctggaagcggcggcagaaaacactccgccgtcccacgggcaccccgcggcgagcgcccaccgcagcacgcccaggtggccgccggacgcggcgttcacacacgctgcagagtcccaggggcatccgttggcgcgcgcccaccgcaggacgcccaggtggccgccggacgcggcgttactgcacgtccgggcgtcccaggggcagccggcgccgcgaagccactgcaggacgcccaggtggccgcctttggcggctttaccgcacgtccactggtcccaggggcatccgttggcgcgcgcccaccgcaggacgcccaggtggccgccggtcgccgcggcgtcacacgtccgggcgtcccaggggcacccgcccgcgcgcatccaccgcaggacgtccaggtagcccagcctcgcggcggcctcgcacgtccgccggcccaggacgccgccgccgttgcgcagcgcctccagcaggcgggcgcgccggggttcggcacgggcggcgtcgcggaggccgcggcaggcggcgcccagcggcagggccgcccacgggggcatgtgcgacatgatgtccggcgaccccaggcacgcggcggcggaggccatggttcaatcgtcgaaaaacaaagactcgcgcagtgcgttatatgtccggcgtccggacacgaatattttacacgcgctccctctcggcgcggatccactcccgcgtcgcggggtgcctcgccgcagcggcctcgcatcgcgccgcgtcccaggggcagccgtgggcgcgcgcccacttcaggacctccagctggccgccgaccgccgcgaaggtgcacgtatcggtccaggggcagcccgcgccgcgcgcccacttcaggacctccagctggccgtaagccgccatatcgcacgtccggtcgtcccaggggcagccgtgggcgcgcgcccactgcaggacctccaggtggccggcgagcgccgccaccgcgcacgtccgggcgtcccaggggacgccctcgccgcgcaaccaccgcagcacctcaaggtggccgccggacgcggcgtctctgcacacattgccgtcccaggggcagccctcgccgcgcaaccaccgcaggacctccaggcggccgccggacgcggcgtctctgcaaatttcattctcgttccaggggcagccggcggcgcgcgcccactgcaggacctccaggtggccgccggacgcggcgtacttgcacacgtccgagttccacgcgcagtccgcgccgcgcgcccactgcagcacgcccaggttcccgccggacgccgccgtcacacacgtccgcgcgtcccacggacagccggcgtcgcaaagccactgtaggatgtccaggtggccgcctcgggcggcggccgcacacgtccggccgtcccaggggcacccgcccgcgcgcagccaccgcaggacgtccaggtagcccagggccgcagcggcctcgcacgtcttccggcccaggacgccgccgtcgcgcagcgcctccagcaggcgggcgcggcgggggtcggcgagggcggcgtcgcggaggccgcggcaggcggcgcccagcggcagggccgcccacgggggcatgtgccacatgacgtccggtgcccccaggcacacggcggcggaggtcgcggtcatctcaatcgtcgaaaaacaaagactcgcgcagtgcgttatgtgggagtccggacgcctatatttttacgcgcgctccatctcggcgcggatccactccgcaatcgcggggtgctccgcggcagactcgcgtcgcactgcgtcccggacgaccccccgggggatataaaaggggagtgtcgcacggtttgggctcacaacgcagttgtccagtccctccaatacctaccagcccctccaatgcctcgcagacctttcaaactgtgccggacaacgggttttgtgatgcccgagcccgagagcgagagaggccgggagaaccttcccgacgaccttgcgtgcttgatatcggacaaccttcaacccatggacctcttggcgatggcctttgtgtccgcgaagtggcgccatgcaaccggcaccacccgccggacccgtccccttgacatcccgttggcaccctgcgtgatcatgacctccgccgcgcgcgaggggcgcctcgagtacgcccggtgggcgcgcgagaaaggatgcccctgggacgagcgcacgtgtcaggccgccgccgaggcaggccacttacacgttctgcgcttcgcgcgagagaacggctgcccgtgggataagaccacgtctgaggccgccgccgaggccggccacctggacgtcctccggtgggcgcacgagaacggctgtcattggaacgtgacggcagccaacctcgctgcgaaccgcggccacctacacgtcttacgatgggcgcgcgagcagggcttgacttggcacgacggaacgtgctactacgccgcgcgcggcggccaccttgaggtcctccggtgggcgcacgagaacggctgtcactggaacgtgacggcagccaacctcgctgcgaaccgcggccacctacacgtcttacgatgggcgcgcaaggagggcttgacttggcacgacggaacgtgctactacgccgcgcgcggcggtcaccttgaggtcctccggtgggcgcgcgacaacggctgcccctgggacgacaacacgtgctgcggtgccgtcgaggcaggctacctggacgtcctccggtgggtacacgagaacggctgtccctggaacgtgacggcagccgacctcgctgctaagcgcggccacctacacgtcttacgatgggcgcgcgaggagggcttggtctggaacggcgactggctgttcccctccgctgctttcaacggccaccttcacatcctccggtgggcgcgcgagcagggcttgaattgggacgacagaacgtgctactacgccgcgcgcggcggccaccttgaggtcctccggtgggcgcgcgacaacggctgtccctgggacgacaacacgtgctgcggtgccgtcgagggaggccacctggacgtcctccggtgggcgcacgagaacggttgcccctggacattgacggcagccggccgcgccacggaccttggccacctacacatcttacgatgggcgcgcgaggggggcttggtctggaacgacgacttgctggttccctccgctgccctcaagggccaccttcacatcctccggtgggcgcgcgagcagggggtgccctggcacgagatgacgtgctccttcgccgcgagaggcggccaccttgaggtcctccggtgggcgggcgagaacggctgcccctgggacgacggcacgtgcgccggcgccgcacgcggcggccacctgaaggtcctggcgtgggcgcgcgagcaaggatgcccctgggacgacagcacgtgctggtccgcggcgcgtgccggccatctggacgtcctccggtgggcgcgcgagcacggctgcgactggaaagagagcacgtgcatggccgccgctcgcggcggccacctggatgtcctcatatgggcgcgtgagaacggatgcccctgggactatcgcacgtgcgaggccgccgaccagaacggccatcctgaggtcctggcgtgggcgctagagcacgggtgtcctcaggtcgtgatgtaattacactccggacatcttgaagcgcaagtgatggagggtgtgtagaaaagatatggcagagtgtataataccatgcagcgtgcgacaatgccgacgggatgcatcatctacctgaaggaagcgggacatttcaagacgtacacactggccgatgtgggagaaatcaaagcgaaagtgactgtcaccatcccacaagttgccggcactctcaccctcgaccgcggagatttgacgaaggaggagctacgaaagagatcctccgttgcaaattcctgacgattttgtgttgatgaacaccagtaacggaactcccgtacatcctgtcaacgactactacaccccttgccatatttttctgcacaccgggtaatgtacgacaagcaacttgtgcatcgtgcagtcattcattacttgcatttcaaccgctcgttgcggaaagtggccacagtctacgggtgtggctacacgacgctgggaggatgggtcagaaagcagctcggtacatcgacaccgcctccgcgaaaacggaaatcgccggtcagcgacgtgatacgcgaggcggtagcgcaatgcgtcgaaaacaacccgttcaccacactgtccgatatcgtgaaacggatacgtgttgacgggcgaaaggcgtcggcgtccacagtcaggcgggttatgcaaaaagcaaacatgtcgaggaaacgggccagggtgcgcttcgcgcccaagaaacccaccaagcagcaggcggagcagtttttgcacgagattcgaacgcccgctcaagaagtaatttccatcgacgaaagcagcgtcgtgctagaaagcgtgccgacgtacgggtacagcctcaagggcacgagggtagtaaagcgaaccaacaaaccggtacgaggcaaccgcgtgacgctgctcttggcgatatcgaatacgcgaggtgtagtgcaccatgcgacgtattcgggtagctgcaattcccagaagttcgccggatttcttggcggcctcccacagttttcgtcgcggacacccattattctggacaacgtgcgattccatcattcacacgtggtgaaagccgccgcacacgcaaacaacctgcacctcgtgttcacgccgccttactgtccggacttcaatccgatcgaaaacgcgttctccgtcatcaaatccgtgaccagacgcttcgacgactcgctccccgatgccatacggagcgtgacgcccgagaagtgcgcggccttcttcgccagatcgataaggcacgcggcgacgctagcggagacggccccggacgcgatgcaaccccccggacgcgtcgacgagtgaccggacgccgtgtgctgtgctgcgcagcgcggtgcggcgcggcgcgcccaggcggtgcgttcggcgagcgcgcccgcgacgcacggacataaagggaactccatgcagcgagcaaggccagaatccactccgccctcgacaccgccgaacctaccgctcacggagtatggaggcggacgtggccgaaggccccgtcctcgggacggggcgaaccacgaccgtcaagtgctgcttcaaagccgccagcgcgtgcaagcgtcgcaacgccgttttcggccgcgcctgtctccgtcgcagacgccccgtcaccgcgcagcgagtgcgcgcggccaagactcctccgacggcgttcaaagacctcgcggacatcgtggacagcgtggtcaatctggtttccaaggcggctcgtcgaggctccctcgtcgccatgctgacggtggtgcgcacgctggagaggaacaacggcaccctgcccgctgggttcttcggcagcagcatggacaccttcttcggacagtgcttcaagtttggcgcgttgaagcgcacggagtacggcatgacaccggacatgccgcgcgctgctaccagcaacccgtggatcctcgccgccctgcgcgatcataggattgcccaggcgctcagcaagcaccgtgtccgccgacagccaggggactccaacctcctccaatccgccgccaacgcctaccagaccaactttgtcaactttttcgactacgagctgcctcgccgcgtcaagaccatggtcaaggcgctgtggcggcgcagctacccggactacaacgcgccgcgcccgaagggacagcttgccagggcggtcaactacgccgccgtcctcgtcgacggcgtgcccgagccggtcggcgtgccggacgcctttctgcatgcggtccgcgagctgcggactcggcatttcgctgccgtttcgcccgccgccaccgagaagctgcgtgcggacgtgacggagctgactcggcggcgtgccgccgagcccaagaacagcaaccgttggaaggccttgtccgccgagctcctcgaggcgcggcgtcgcgtcaagtacgcggcgctcggcgggaagatcgagttcgtgtactggctgctccgtcggctgcaggccatggaggccgcggacggcgtcgtctacaagaagttttccatggctccgctggctagggagcagcgcgcgcacatcaccatcgacggcaaagtgctcagagaatacctctttccgcgcctcaaggacatcggctactacgccgccggcatgacggcgtccgccttggacgaccccgacatccgcgcggcccacctcgccgcgctcttccccggctgcgagaacctccggtctcggcgacgaggatgggtgtcgtcgtcgtcgttcaagacggacggctactccttgtgcgcgtcgtttgctcgcgactccaacctgacggcgaagcgcgggagcggtccgaaacgcgtcgcggagagcaagaagaaaaagtcggagaaacgagccgagaagctgcaaggcacgttcggcgccatccccgagggcgccgtggtggtggggtgcgacatgggcatcgtgtatccgtacgccgtggcgtggttcggcgcggacggcaaacggcacacccggctgctctcgcgctacgcgtacaagaagctctctggcatcaaggctcacgagaagatcatggcgcgtcgccagagccgcctggaggaggcgcaccgtccccgcagcgagacgtccgccaagagctcgcgactcggagacgtcctcggctacgcgaccgcgtgcaactcgagctgggaggagacgtggaagcagaacggcgaccggaggtctttcaggtcgaggatggcctcgtacattgggagggagcgcgtgctgacgcgcttctggaacggcgtgctgcgcgacgtgctcgctagccaccctggcaagacgcgcggcgatgtctacgctgccgcgggattcccggacttcaactgctgcacccgcggctgcccggcgtctccgaccaccgcggcgttcaaggcgatgaagcgcgtggtgcaggtggttcccacggacgagtacaagacgagccaagtgtgcgcgaggtgtctctcgagcctccgcaaaccaatgaatcgcattacactcccagacggtcgcgtccggtaccaagagctgcgaggtttcaggctgtgccaacagtgttttctggagtctcgtgcgcagccagcgtacccgtgggagacggagaggtggcgaggttacaagcggtttcatcgcgacctcaatgccgcgatggccatcctcctcgtggcgggcaagacgaacgaagaacgccccgagccgctccgtcgaccaagtagcagacaacgcgaagtcgtagaatacactagccccagcgactgctgcgcagaataggcgcctctgtgccagcgtcctttgccaaaaagtggtgttcaggttttagatggcaaagagtgtaccatatccaatccatacattgctacaagttattgtattgctcgcgcccagtcctatcgctagattctcagattcaacacgctacaacccctaaggaggactagcaaggaggggggaacccctgtgcacaccacttgggggcaaaggacgctggcgctggcacagagacgcctgttgtgcgcagcagtcgctggtattctacgacttcgcgttgcaggatgatggccatcgcggggcatgtgacacggcatgtgccacggcatgtgccaggccatggctcaatcgtcgaaaaacaaagactcgcgcagcgcgttgtgtaggagaccggacgccgacattttcacgcgcgctccatctcggcgcggatccactcccgcgtcgcggggtgctccgcggcggcctcgcaccgattcgcgacccacgggcagccgttctcgcgcgcccactgcagcacctccaggtggccgccggacgccgccagcgtgcacgtcacctcgtcccaggggcaccccgcctcgcgcgcccaccgcagcgcctccaggtggccgccgtacgcggcgccccgacacacgaacctgaccggacagccctcgcccaccgcccaccgcagcgcctccagctggccgccgtacgccgccagcgaggacgtcgagtcgtcccaggggcacccggcctcgcgcgccaacttcagcgcctccagagcccgcgcctacgcccgcgggggcaggcgccccagcaggtccgggcccaggcaggcggccgcggagaccatggccggcgggcggatgcgatgcgcaggaccatgactgtgccggtccgggcgcgtgccgccctcaatttgtataataccttgcatgcaacaaatgctcgttgacgctgcaccgaacttcattcctccaagtcaatatgacgtgctggtcaccgacatatgtgaagaagacttgaagtctgtatgcatcgagcttgggcaggagtacctttctgttcaagagaacaaagcggaatttccgctatccggactgttctacggaagcaatcatcgattgtttgtttgtctgccagttgaacagaggaacatcaagctcaatgtgccgtttctgatcgatactggggcaccgtatacatatgtgacaagagacgtgtttgaaaaactgggttacgtagaaaattgcccatcttccgccaccatacatgtgaatgataccgtaatgaatgtcaaccggtctgttggccacttcaaaaatgttaatttgttgggccaatacttttttctttacgctaaattgacattatcggtaaactatagcgagcgcactgttatcatttcaaagtgcatttagaactatgcaaaaaacgtagccgtcgcgtggcgcatctgctcgctggtgctgcgccgccgctctacatttccgagcggatccactccagcgtcttggggtgcctcgccgcggcagcctcgcactccctcgcgtcccaggggcagcccgcgccgcgagcccacttcaggacatccaggcggccggtggacgccgcgaaccaacagacctacgagctccaggggcagccgttctcgcgcgcccactgcaggacctccaggtggccgaaagacgccgagaagttgcacgtggtctcgtcccaggggtagctgcgctcgcgcgcccactgcaggacctccaggtggccgttttgggcagccgcttcgcacgtccgggagtcccaggggcaggcttcgccgcgcgcccacttcaggacctccaggtggccgtttttttttgcacgtccgggagtcccaggggcaccttttagcgcgctcactccagcacctccatgtggccttcggacgccgcggccatgcacacgccctcgtcccacggacagccggcctcgtgagcccaccgcagcacctgcagcaggcgggcgcggcgggggtcagcgagggcggcgtcgcggaggccgcggcaggcggcggtcagcggcagggccgcccacgggggcatgtgcgacatgatgtccggcacccccaggcagccggccacggaggccatggccatggcagcgcggatgatcttttggccgggatgaaaaaaatgaaaatctatcccgttcaacaattcgtgtgcagggaacctcgcgccaacacaccgcgcgctcaggggcggcgcatctcggcgcggatccactcccgcgtcgcggggtgcttgctcccaagcgcccgtgcatctccgctctgagataatgcgcggcgcgacggcacagcaaagaatacctttcagtgcccctgattttcccgccctccctcgacgcacatcctctccaccatagcggtcaggctcgccagctgcacgcggatcgcggccaggtccggcggcggctccggagccgctggctccgccgacgcatccaactccggagccactgccggccccgccgaccctggagccgccgcctccgctgactccggggcggatgactccggagccgtcgccggctcgtccgacaagtcgatcagatccggggcatggctcacgtcggggatgagatcgatctcgtccgccacgcccgtcacggtatcgtcctcgccgtcgaccgccagcgtcgccaggatggacgcccggagcatctccgcctgctcgcgccacttgtagttagccaggatgtgctcgcggcacgcgaggccgtgccggcgacgcagctccgggtccttgtaatacagctcgatgccctccgccatgtcgcggtagtcgatcagctgcgcctcgccgcccacgccgtcccgcgtgcggtccacgtagtacgccatcacggggtcgcacagaatcgcccgctccgcgctgaagaaatccttgtgcccccccacattggacaccacctgcggacaccccagcgccgcgtgctcaaagttgcacaggccgaatccctccccgtccgacgcgctgatcccgatgtccgcgcagttcatcaggatggtcacgtccgcgtcgctcaggcgctggggggcgtccagcatcaccagatgcttgcggccctcctccatcgtcatcccgcgcttccccagctcgcgctcgtacacggccagcaggtcccacgccccgtgcagcgacgtcccgatcagaagcttcacggactcgcctcggtggcggctcacgaagtcggcgaacgccttcaggcagatgtcccaccgcttgcgcggctggttgcggttcatgttgagcacgatgaagtccgtgctactgatcccgaagtaccgccgggcgatcgccctgtccacggggaacttggccgcggggtccaacgcgtggcgcaccacgtccacgggggtcgtcacgccctgctcctccagatgccgcttccagtacggcgtgaacgccagcacgcggtcggcgcgcgcgttcagctgctccacgaacgggcgcttcatgtgctcgtacacaaggtcctggtacaccatcaccttgaacctccggttcggcaccgccgccagcttctccgtcaagaggctcaccaccacgctgtcgttggagatcaagaccacgtccggatcgcgctccgcgatgtactccgccagaaggtcctcgccgaaaccctgcttgcgcgggacctcgtgcgccatcgcgtcgaagacctccaccttgtccgggagcacccgcttgttccggctgtcatcgcccgtcgtgttctggaacccgaagtagtatatcttctccatctccggaaatgcgcacagatgctgcgccagactggtcatcaccagactgtacccgttggtgttccatggatgcgtggcgcacagcacgagcttcatgcctttggcaaagccgctcagggaaaaaatcgcggacgggcaacgcgagggagggggggcgacggtctttttctgttgcgatcctgacaacgaacccccctcccgcatgtgcgacctcgcactcgacagcggcaagcccgcctcgcgctcgctcgccgggtacgagctggtccgcgcgctccaaggcggcatcagcggcgcccgggtgtcgcacgcgcgggacaccaagtccggacgccaggtggtcatcaaatccctcgagccgtcgcgcatcacctccgagattctcgccagctgcctcaccaacaagctccccgcccagcaccgcagactgttccctcgcgtcatcgacgccggcgtcgccgacgcgggggcgcccgggatgtgccccgccggacacgcattcatcgccatggagctggtggacggcgtccccatggacgagtacctcgcccgaaacccgccgcccccccggcacgccacggccatcgtgttccaggtggccctggccctgcacgccatgcgcgaaacgcacggcctgcgacactgcgatctccacgccggaaacgtcattgtggacgccgaccgcccccacacgcggaacaccgggcgcttcgttctcgcgggacgcaaacaccgacacgtgttcaacctcgccgggtgcccgcgcgtcaaggtcatcgacttcggactcgccgaggcccggaaccccgcccaacgcgccggtaacttcttcgcgcagtacctcctccgcatgtaccagctctacctcaacccgaacgacatagagcgcgtccggctcaagattcgcaccggacagcgcatatcgcccgagctcgcccgcttcatgcgcgcaaacaccgacctctgccgcagtcagcggtcggacatcgaaagcgtcctcgggttcgaggacctcctcctcggtctggtcgggatggacgcggacaccccggccgccgcccgcgtgccccgtccgggcacctccaccacatactaccgcattctcacctcccgccggtttgacaccctccgctcccggtctccgtcctcaccaaacggataagttccacacgatgcccggacaagttacaggcgtgcgcgagcccgggctcacagccccccgcatccgtcagcactgcatgggcgacgggtcgcgcgtgcaaaacgtctcgaacgcgtccgtcacccgctccatgtcgcctacaaaatactccagcccccggccgccgtagcgcgagaaacgctccttgaacactccgatcagccgccgctcgcagtcatggcagtccacgatacacccgaacgtccggacaaagtagcaccccttcgggtactccgatagccgtcgcttcaggtcgcacgtgcgcccaatcttgaacacgtttccgggcatcgacgggtcacgcaggacgtacaggtacccctgcaccgccagcgaggcccgcgccctcgccctcgcgcccgcgcccgcgcccgcgcccgcgctccacgcggcgtttccctcgcgtcgcccggactctagcatgctccgccgagtcgacgaggctccggaggctcgctcaggcttgggtgtatgtcggtctcgggtcccttaaactctatgtctgggaaaatgggacacccaagacagtttatggcttcgcgctcaaactcgcgctccaccggtcgctaaaaaaccgggctaaaaaaagtgtcccgggcaagccgaaccgaatcgccgccccctcgtgtgcgacgcgtgcggtcacgcagtcgaacgcactccatgtgtatcgagtctacgcgcgggtccgcagtcgcaacactttcaacggctcggcgcccatgcacgcggacgctcccggaatctcggaaggggggcgtccggcccggtcggaaaccccggtgcggagacggatacggagtccgcgcttccgggctgatcgcgcccggtccggaagcaaaagagctaaaccatcggacaagaaccggctgtcccagacggaacagccgggcctcgcccctgagctccatgagccgggggtggggtggggtggggtggagtactcacctcctcccctggatgagaaggaacatgttgtcctcgcgcgcgcgctcattgatcttctcctcgagggtcatggcgcgcggcatcgtgggttttgacatcacgatatgcttgcttccgggattcagagtgaagatgtacccaaagaaggggaacccatgcaactcacttgcatggcaatgggcgaacaaggactcgggcgtcaccccgcaacgggggacctccgaggcagacacgccgggcccagggacgatggtgtagccctgggagcgtgcgttggcatatccgtagcccatcgcgtgtgaatagtgtgcgtgtgcgtgtgcgtgtgcgtgtgcgtgtgcgtgtgcgtgtatgcgtttgtaggaggagaccgcgtcatcgtcgcttcaatttttctccactcccggagccgcgtatttcttgcgcgcactctatgtccgggagaaacgggagaaacactccgcgcgcttgcacctgcccgcgcggttggtcggggcgcatccggcgcccggatgtttccgtgcctacgtgtacgcgatcatgacaaagaggaacaggagcatcttgacccagctcatgatcttggcggcgacgttggtggggtggatgtcgccgaacccggtggtggtccacgtcgtgatggtgtagtgaacggtgtcgaacaccgacatttcttccacgttgtatttggccactttcgtcaccaccagaatcacgttgaccaaacacatcaccaccagaagggaaaagtgaagcgcgagcttggtccacactcgctcgggcggaagcaacggagcgaacatttctttcatgtgcaagaaatacttcatgtgcaagaaacccttgagaaaacccgagaaacaccggagtgacacaacggcggtcgcccctccggcccgacgcctcccgacgaggctgctcgtcgtataggaacgattcttgaagcccgcacctcgcatcatcggtaccaatccccgcccccccatcccctcgagtcgcaggagccatggacgaaaaccggatcccgaacgtggtgcccgctctggtgagcaaaaagggcaagcgtcccaggccggtcgggcaggccccgccacccgataccgcgccgggggcatacgggacgtccttcgtgcagaaggtgtacaacagcatgccgcggacgtgccccggcggggaggtggacgccgcatccgccgcgggcacgtcgtccgcggccgtccggaagggcgccgcccgtgcccccgcccgttccggcgcgcacaagtcggagctctcgaaccaccgctcagagattgtcgagctccgcgcgcagctctcgatcagccgcgccgaggcgggcacgctccggacccagctcgcggacagccgcggcgaggtgagctcgctcggcgacgagctcgcggacgtccgcggcgaggtggacgcgctccgggcgcagctcgcggaccgcgccgcgacaaccgcgcggctcgaggccttgcaatcccggctgctcccatatgcgcgcgccggcctgatgtaccagcgcgcgagcgtggggctggacagggcccttggcacgatcagggcaacgcacgcggagaccgttgcggagctctcggccgcccgggcgccgctggactcgtgcgagatgtgcaccaaccacgagatagagctcctcgtggacgacgcggtgcttcggtgctacatctgtccgggctgcgcaagacccaactggtgctgcaactccgcggagtgcgtcgcgatgttccggaccttgggctgcgtggactgcaagacccccctggaaatgtccgactaggtgtccgactagtggtgtccgaccaggcgtcgcccggacgctgtaatccattcccctcccgccatgcagacggccgtacccgcgggctgcctcgcgtcgccgccgcgaaagttttttaatcgccgaccgcccgcgcctgccaatcattacctgcgcgaaacgacgccatcatgaccgcccccggccgagagttggccctgtttctgtcgagccatgcgacgagctccgcctgggccgcgagggagcaccaagacctcgtgaaggcgctcaggctggtcaccagcgggctggcgaagtccctgcccgtcagcatgtgcgtccggatctggcgcccctcgaggagcgccgcgcccctcccgcctggctggttccgccacctgacggccgtgcaagagatcgacctgacgaagtacaccacgcggccgccgatgcgggagctggagagcctgtccctcttcgcgtccctgacgaccctcaacatgtgctgctccgtccagctcaccgttccgtcggagatcctggagagcctgccggggtccatcaccgacctgaacattgccagcctgaaggtgcgcgccgacgcggcgtggctggagcgactggtcctccgcatgccgcgcctcgaggccctggacatcacctcgtgccgcccggtgccgaggatgccggcgccgctgccctccgggctgacgcgccaggaggccggcgagctcgtcggggtgtccgggatcacttcggggggccggctccagcacctgtcgctgcgggggcgcacctcgctggagcagagattggcgtccgacacgctggccggaatggtgcacctgcgcgtgctggacctgtcgtgctgcagccgacacctcagtctggtcgggcttcacacgctgcctgcgctggaaacggtcatcctccggtgccgcgagttacgcaacacggacacggtggtgctgtcccactgcaagcgcatgacccgcctggacctgtccggtgcgaggctggcgtggagtctggacaacgggctgtacggaatgcccagcctaaccgacctcggtctggccggcgcggtcctggaccccatgcacctgataggcgagtcggtcgcccccggtctgacgcggctggacatgtcggccaacgcgcaactgcgcaacccgctgacgagactgtgccagttccggagcctgacgcacctcgacgtctcggactgcccgcgcctgacggagggcgccgaggtggccgacacggtccggtgcctgcgcgcgctgcccagcctccggaagctgtacctcaccagccgcctggtgccggaggagccctcggcgtgagcgcggagcgcgcgcccccctcccttgccattagtttctgcgatatgtggtcctggaacgcacgaagtccagcgaccgcttcgctcctaggtgactcctttgccgccaaaacgtggtgtgcagtttttatgtggcgaagagtgtagcaatcgtgtgcggcccaatgctgaagcacctgtccgagccgtggttcagcctagtctacgtcggcgccaaaacgtttgaggggcggctgggaaacaacgccgacttcaaaaacgcgccggtgggctccgaggtcgtgtggttcaacgacgacatgggaaccaggcgccaggcgagaacaatgatcacctccaagagcacgcacaggtcgttcggaagcatgctgcggagaaagggggtgccgaagtgtctgccgaccgtccagagcgtggcgcacggcgaggccatctacgaaaagttttactccaaggccaagcaagacgaacacggcgtgctgtgcatggggctgcgggtgatcggccggtgaagagcggcgggggggcaaggatgggcggcaactccccacgcggccggacgtgacctccggccgccggccggcgccttcccgtcgcgcactcccgtccggtgttggatgccgggtggaagatagatctcgggggaagtgtaactgagccaaaaatggtttgccaagtcctggtacagacggtggtggtctttctcacgttgtttgcggtcgggggaggcggcgggagcggcggcgggagcggcggcgggagcggcggcagagggcggatgcggccggtcccggtcccggttcgcgtgagaaaatactccggaaaatattgatttctcaacgtctgcagcgcgggggcagccaacccgatggacgcggcaaagtattccaaacagctgttgagcaggggcttctgcgtggtgcctctggggcaccatgcggctgcaccagccgtca

SEQ ID NO: 174 - DNA, 22463 bp, unidentified
  misc_feature 1..22463: note = Fanzor polypeptide
  source 1..22463: mol_type = other DNA
tgctcgcccttttccgccgactctccgccggccattctcgccttcgaagagcgcttcctcgccccccgcgtgcctcctcgcctgggcatttttgtgtaacacgacagaaaatcaaacggaaaaaaatgtgattaaacgggcacgtgcgcgtgcgcgggctcctcgggcaccatccggcatgacaggtacagcgtcctgaggccgggcagccgccgcagggacgccctcgccgcgtccgcgtcgaggccggggcagtccgacagatccaggcgcgtcaggcgcgggtacgcctccagcccttcgatcggccccgcgaggccggcgcacgccgacaggtccaggctcgtcagtccgggggcgagcgagttccccatgaggcgcatggggtccgcggccgctccggacagattgaggtcggtgagggccggcatgccggacaggccgctctccagcgacgacgtcgccccgcagaaggacaggtccagccgcttcaggcggctgcatctggccagcacggccacgtccgtctcccgcagcttgcggcaccgcagcaagagcgtctccagcgcgggcagccggtgcagcccgacgatggagacgttgccgccgcaggaagagaggtccagagtccggatggtcgtcacggcggcgagcgtcccggacgccaggtccctctccaggctcaggcgggccctgagggacaggtgctcgaggcggcactcggggccgggtcggatccccgacgcgcccgacatgacgccggcctccagacgccgccagccggccggcagcggcgccggcatccgcggcaccgggcggcacgacgtgatgtccagcgcctccaggcgcggcatgcgggccgccaggacctccagccacgaggcgtccccccggatggtgaggtaggcgacgttcaggtcggtgatcgaatccgaggtcagcgcgtccggtgacaggccggggaagaccgagccgcacaggttgagcgccgtcaggccggagaacgcggtcaggcggaacgcatccgccggcgcgagtcgccgcccgaccgccgtcagatcgacgacccgcgcgcgtctcaggcggagggcccagtcgctcgggatccgggtggctcgcctcgaggggcgccactcccggacgacctggctcacgtcgagctccctcgccagcccgcgggtgacgagcctcagcgcccgcgcgaggcgctggtgctcccgcgcggtccaggcgaccgccgtcgccctgctcgtcagcatcagtgccagctcggcgtcggggtccatggcgactctttttctttgtttccttgtccttgtcccttgtccgtgggcggcgtgtcctctggcttggctttgcccccctcccgcggctgttcccgcttcaaaaaaatgagatggaaatgaaaaaaagggggggactccttttattttacatgctcggtccgggggactcggtccggtatacgaatcgccacacgcggaggaccccggaccgaggggggcgctgcgccctccccacgatctgccggtccatccgggagtccacggcgtgatagatgatgacgtcggtcgcccggctgaggttgagcccgcagccgtagtgcctgcagttgaccagcagcgcgcgcggctcggacgcccggtcgaactcgcgaacccgcttgttgatcaccgacgcgttgcccttgagcgcctcggccctgatgcccgcgcgctccatcgcgcgcttccccgcgttctccagcgcgtactcgttgtcgcagaagaacagcaccttgctgccctccccgctgcccaggtgccgcaggaggcagtcgaggttgtctattttgggacgcaggcggtcgaacgcgacccccccggaccgatactcgtcccgcggcggactcgccggctccccgtctcggcacaccaggaagtcgctggtgagcagccgccgcttgcacatggggcagctgcgggaggcggaggtgacccacgtggtgatgcacgacaggcagaacgagttgctgcagcagggcaccaccgtcttgttggccatgtgggagaagcagatgaggcagtcggcggcgccctgtattcggtccttgacgttctggatgttctcccggatccgggcgaccttggcgcgctggcgcgcgaccgccgtctccgcctgcgtccgagtggcgtaccgccggcgctgcatgaactccagctccgcgctggcgttgtccagctcgaggtcgaactgcgccagcgccgccgacacgatgttctgctcgctgtcggtgcgctccgggtgcatgtacgcgagcgccgtgtccaggtcgcccgcgtggagccgatccaggatgtcgcgggacgcgatgcccgacagcgcgcgcgtgtgcagcggggccaggcactcgacgagcaccgtttcgggcggctgcaggtcgaacgaggcgtcgacgaacgcgttgtcggtgatgacgaccgtccgggaagcgaatcgcgaccaggtgacgcagtcgaacgagaagaacgaccggatgtgcctgctgttgcagccggaccccgtgacgatgtcgtcggcgacgacgccgtccgagtgcagggccaccacgggcccccgggagacgcgccacgtcgtgaacaggttgtgcacggacgcggtcacgaaccagtggaagcgcgcggggcacacgccgtcgcggaaccgcaggctgtccgcctcgtcgaacaccacccgcgtcgccctgcgctggtggccgcgcagcacggtgcagacgtccgggtagagcgacgccgacaccatgatgagccggaccggggactccccctccgccagcgcggcgacgacctccacggccgacgagaggtccccggtcctgctgacggccgtcgcgcgctcccccgcgccgaactgggcgagcacccgcgaccactggccgacgatgttgtgcgggaccacgaggacgttgagcggcagggggtccaggtggtcctcggcgggcgccatggtcgcggacatgttgtggcatatccgggtgcggacggcggagcaccccgggatgtggtcgtgcccgcagtcgagcagcagggcggcgaccacgtacgacttgccgctgccgggcttgtcgcccagcacgcccatgcgcgtggagacgctgtccccgtcgcccaccgccaggtcgtcgcagccgcgctcggtgtcgagcatggcccgcagcgcggccagctggtgcggcagcagcagggggtggctcgcggcctccgcccggggggcggtcggcccgacggtccggatctccatgggggtcggggtcggtcaggaggagaacagccccagcaccgagcggaggatcttgccgaggctgcgcaggtggtcgaacccccccatgaccagctgcgttaagtccgcgtcggcctgcgcctccacaaagtaattgacgacccccagggtgagcagcgggatcgcttcgacgagcgccgccttcaccgcccccatgtcgaagctgagcgcggccttgagcgcggggatgacggccatgacggtgacgacgaacgccgtcccgcccacggtggtgctgatggcctcggccaccgccgacacgaacgacgtgaagtcccccgtgacggggtcgtgccgcaccgagatgcggtacacgctgtagaggctcatggcggccacgatggggcggtacgtggggaacaccgccatgatgccggtcgccagcatgaggtacatcaccatcgggtcccccagcgcccacatgtacacgagcgtcgccgtcagcagcgcgagcccgccccccagcgtcagcatggcggacgcgttttcagagtccatggtcgcgtccccggcgcagttgacacaaggccgagttttttctgagccgcagagaacggagagggacggggatggcctggttcgcgctcaccaacgccgctcggatagcgatggttttgctcgtggtcggcggctgggccgccctggggcagctggccatagcggtgatgcggagagcgtacaccacggggctcatgacgctgaggacggcgacgcgcaagcggcggcgggcgcggctcgcccgggtggtggccaccgtctggatgtacgccatcgtgttcacgatgatgctgacgaccttcatcgggatgggcgtcctcatgaaggacacggccgactttttcgggttccagaagcacattctgagctgggagtacgtgctgcaccccaagttcgttgcgctgctgtgcgcgtgcgggctgtcggccagcatcgcctccgtttaccgcttcaggcgggccaaggtgatgaacgccgccgcgtacgacgccgcctgcaagttcgggttcaaggtgttcatgggcgcggcgggggtcgggttcgcgatcatcatcatgctggaggcggtcaggctggcgggcgacgtcggcgccaccatgccgacgggcgagggggtgtccaaggcgctggcggtgctcgtggcgtcgcgggccccgctggccgggttcgggggcgtgcccaaggaggaggtcgggtggttcgtggacggatacatgaagaggatgggcgtcgcgggccgggacctgacccgcctgagaaacttcgcctactccctgccgaagcgcgtggacgtggccatggagtcgctgcaggggcgcatgctctcctcggggttcgacgcggagacggcgcgcgacgcggcggccgagctgcgggccgcggtggtgcgcctccgcaagagccgcggcaagcgcgacccgccgtccgccgagcgggtggcggagatctccgggctgaagaggatcgtttccaagcagcgggagagcggggcgacgccggcgccgaagggcgtcggcgacctggtggccgtgttcggggagcaggcgtaacggcggcccggcgcgtcgcggggggcgctatcttttccgagagcacccgtcagtcatggagaacgtccttgaaatccggaccgtgcagtcgtcggtcatcaagacgctcgtggaggcgctcaaggagctgctgaccgacgtggtgctcgaggtggacgagaccgggctgcgggtgatcgccatgaacaaggcgtgcgcggtgctggtgcacctgcggctggacgcgtcgcgcttcgagcagtttcggtgctccaggcccctcaacctgggcgtcaacatcatcaacctgcacaagctgataaagacggtgggcaacagcgacaccctgacgctgtacgtggaggagggggagagccacctgggcatcaaggtcgacagctcggagaaaaacagccgcacggtctacaacctcaacctgctggacatggagaacaccaagatcaccgtgagcccgatgcagttcgaggacgtcatcgtgctggggtcgtccgagtttcagaagatgtgccgcgacatgcacaacatcgccgacgtggtggagatcaaggtcgtgaacgacgaggtgaccttcagctgccgcggcgacttttccacgcaggagacggtcctcgggaacgggtgcctgcagaaggtggcccccgaggaccgggaggagcccgacggcggggccgaggcgacgcccgtggacatggacggcgactcccggatcacgcagggcatgttcaacctcgactacctcgtcatgttcacccggtgcaccaacctcagcccgaccgtgcagctgtacctcaagaacgacttcccgctgtttgtgcgctacaccgtcagcaacctgggcgagatcaagctggtgtgcgcgccgcagtcggcccagtagtgatgtagtcccgggtccactcccccgaccggtccgggtgcgacgactggtcgccgcggtccatggcgtcgaacgtgtcgatgatgcactcgagctgcgcgaggcagtgccgcatgttcgccgcggcgacaaagcgcctggcctggggggacgcccgcaggtcgagcgcgtcgccgcgccccgcgatgtagcgctcgcaggtctggcaggcgtccaggctctgcccggtgtagccggagcacaccacgtaccgctccgagttggcggggcggctggtgctgggcttgcggatgtcgtggcgctcgaagcgctccacgaacgccgccagcagctccacggtgtcggggttgaaggcgtcgaacaccttgatgaccgcgcacccgccccgccgcagcagccgcatcgccaccagcacctccgccgccagcaggcgcgtcatctgcgcctcctgctcgttaaagttggagctgaagtcgaagccgccgtcgcccgtcaccatgtcgcacgacccgtccccgccgcagtcgcgcacgaacgccgcgatgttggccagccgggtgacgtcccccgtcccgtccgcgccgcggcacagccccacgccgaacgcgcgcatccagggccactgcagcttccagtgcggcacgctgcggcggtccgagcccacggtgatgccgcggtgccggtcccggggccgcccgtccgccgccgccgccgccagcgccgtctcgcggaacgtcaccaccgcctccacgaacgagccgggcgcctccgccacgtaggcgaagctcttcggccgggggtccagcagcgcgcggcggatgccgtcgtcgtcgcacacgatctcccacatcttgtagaacgcgcggctgatggggtgcttcctctcgccgtcgacggacaccacgcacggcggcgccgtgtacaccagctcgtacgggttgcacgcgatcttgtaaacgtcccactgcgcctggttgcgccctatcttgtccttcagcagcgccaggctgcgccgcacgtgctccgccgaccgccgccgctgccgctcctcttcttcttcttcgctggacatagcatacaccggacactttctgccgcgctcacccgtcgcgcggcggggggtcgacgctcggggtgacgaagcgctccgccaggcgggcgcccacgatgctggagctctcctcctcctcgttggcgcgcatggtgtccaccatgaaccggagcatgttcatgtccagccccgggcggcacgccttctggaacagcaccgggcactgctccatgaacgcggggtacttgcggctgtagcgctccgctttcgcccggacgtcacctggtccggactgaatctccgacacgatccggagaatggtctccgagtccagcggcgccgaagggggccggctcacggcgctcttcatgctctcggtcatgatgcgcgccgtcgccacccggtcctcggcatccgccctcgcggcccgcgaccgcttcttcgtcccgccgccgctgctcttgtcgggcatgctttggttttcccgtccggtgagaaaatagggcgccccccgttcacgcgcgccccgtgatgatgcgcgggatgtagatgccggccacgcaccccagcaccacccccagtatgtccgagtacatcgggaacgagtcgcggccgctggtcacctccacgatcttggccaccatcagcgcgcagaacgtgccgaccgtgtccgagatgaggttgccccacgcctggcgggtcagctcgccgtccgggagggaggggcccagcaccgccgccagcatgttggacagggtcatcggctcgtcggaccagatcgaggtccacagcgccatctgatccacgaatccgaacaccgccccggggatgaggcccaggaagaacgccgtgaccgaaaacctcgcgtcgccgttcaggaaccacgccagcccgcgccactgccccgcgcgccacgtgaagaacaccgccgccaggaacagcgtcagcatcagcgacagcaccaccacgagggtcagcacgatgtcgcgcatcctcttctccggcgtcgctccctccgcccgtccggattcgcccccgccgtcacccgttctcacccctcgtttcgacgccattgttcctttccacgcccatttttttcaaaacgaataaatacagggcccggccggtccccccgccccatttttcttcccgtcgccgccctctcccccctctccgccatgacgaagacgtgggccgacatctgcggcgacgacctgtcccacaggatcctgtacagggtcatcgacccggccacgatgtcggccatcgacgacttttcgcccgcgatgcacgagctgtgcgacgccgtgcacgcggctcacgccgaccacaaggccgcgatcgatcgcctcgtgggggcgctgaaggaaggcgcccgcctccccggcgccaagtccaacctggccttccactccgcgctgctggccatgtacaacgaaagcatcaagcggttcgtcatgagcatgcgagggacgctcaagatcatcgcggtgacggaggtgcacgaggtgagagacgacaaggcggccctggagcgcgtgagccgcgtgtcgcagctggaggacctccagcgccccctggacgcgcgcatcaaagccctcgccaggagccagaccgaggagaagcggcgcaacgccgacgcggcccgccggatggccagggaggcgaaggcgcgcttctgccgcaggattctctgcgtgatgtacggcacgcacaccgaagagagcgacgaccaggaggcgtggagcgaggcgtccgactgggcccgccaacggctggggggcggcgagtgcgtcatggacaggatgcagcgcgtcctctcggagatcgtccgacacaagagggcgatcgactgggagatagactcgcaatgggcctacgacggggcgtcgcccagccgccgcttcgtgggcggcgcactgtaatcaaaaaaaaaaaatcactctatctgctccgccttgtccgagaggtggcggacggcctcggacagcagttccgccgtttcgtcgggaacgcgcatcccctccgcgacggacagcaggcgaagcacgaactcggaggggcgcgcgacgggcgccgaaaaccgggtctcgatcctcccccggtgacggtgccactccgccgtcacgcagacggacatcccgtcgcttgtcccctggatgcagacccgctcgtcgctctggccgtcgacgtttttccactgcagctgcagtcgcaccgtccccctgtccgtcaccaccgtcttgtccacggtgttcgtgtcgaccaacatgtatgatatacaccccttgccatatttttctgcacaccgggtaatgcacgacaagcaacttgtgcatcgtgcagtcattcattacttgcatttcaacctctcgttgcggaaagtggccacagtctacgggtgtggctacacgacgctgggcggatgggtcagaaagcagctcggtacatcgacaccgcctccgcgaaaacggaaatcgccggtcagcgacgtgatacacgaggcggtagtgcaatgcgtcgaaaacaacccgttcaccacactgtccgatatcgtgaaacggatacgtgcgaaaggcgtcggcgtccacagtcaggcgggttctgcaaaaagcaaacatgtcgaggaaacgggccggggtgcgcttcgcgcccaaagaacccaccaagcagcaggcggagcagtttttgcacgagattcaaacgcccgcgcaagaagtaatttccatcgacgaaagcagcgccgtgctggaaagcgtgccgacgtatggatacagcctcaagagaacgagggtagtgaagctaaccaacaagccggtgcgaggcaaccgcgtgacgctgctcttggcgatatcgaacacgcgaggtgtagtgcaccatgcgacgtattcgggtagctgcaattcccagaagttcgccggatttcttggcgacctcccacagttttcgtcgcggacatccattattctggacaacgtgcgattccatcattcacacgtggtgaaagccgccgcacacgccaacactctgcacctcgtgttcacgccgccctactgtccggacttcaatccgatcgaaaacgcgttctccgtcatcaaatccgtgaccagacgcttcgacgactcgctccccgatgccatatggagcgtgacgcccgagaagtgcgcggccttcttcgccagatcgatacggcacgcggcgacgctagcggagacggccccggacgcgatgcaacccgccgtgcgcgtcgacggttgaccagacgccgtgtgctgcgcagcgcggtgcggcgcggcgcgcccaggcggtgccgtcggcgagcgcgcccgctacgcacggacataaaggaacgccatgcagcgagcaaagccaggatccactccgccctcgacaccgccgaatctaccgctcccggagtatggaggcggacgtggccgaaggccccgtcctcgggacggggcgaaccacgaccgtcaagtgctgcttcaaagccgccagcgcatgcaagcgtcgcaacgccgttttcggccgcgcctgtctccgtcggagacgccccgtcaccgcgcagcgagtgcgcgcggccaagacgcctccgacggcgttcaaagacctcactgacatcgtggacagcgcggtcaatctggtttccaaggccgcgcgtcgaggctccctcgtcgccatgttgacggtggtgcgcacgttggagaggaacaacagcgctctacccgccgggttcttcggcaacagcttggacacctttttcggacagtgcttcaagtttggcgcgttgaagcgcacggaggacggtatgacaccggacatgccgcgcgctgctaccagcaacccgtggatcctgagcgccctgcgcgacccgagggttgcccaggcgttgagcaagcaccgtgtccgccgacagccaggggactccaacctcctccaggccgccgccaacgcctaccagaccaactttgtcaactttttcgactacgagctgcctcgccgcgtcaagaccatggtcaaggcgctgtggcggcgcagctacccggactacaatacgccgcgcccgaaggaacagcttgccagggcggtcaactacgccaccgtcctcgtcgacggcgttccggagccggtcggcgttccggacgctttcctgcaggcggttcgcgagctgcggtgtcggcatctcgctaccgtttcgcccgccgccaccgcggcgctgcgtgccgacgtggcggagctgactcgacggcgtgccgccgagcccaagaacagcgaccgatggaaggccttgtccgccgagctcctcgaggcgcggcgccgcgtcaagcacgcggcgctcggcaagaggatcgagttcgtgtactggctgcttcgtcggctgcaagccatggagaccgcggacgacgtcgtctacaagaagtttgcaatggcgccgctggctcgcgagcagcgcgcgcacatcaccatcgacggcaaagtgctcagagaatacctctttccgcgcctcaaggacatcggttactacgccgccggcatgacggcgtccgccttggacgaccccgacatccgcgcggcccacctcgccgcgctcttccccggctgcgagaacctccggtcgcggcgacgaggatgggtgtcgtcctcgtcgttcaagacggacggctactccttgtgcgcatcgtttgctcgcgactccaacctgacggcgaagcgcgggagcggtccgaaacgcgtcccggaaagcaagaagaaaaagtcggcgaaacgagcggagaagctgcaaggcacgttcggcgccatccccgagggcgccgtggtggtagggtgcgacatgggcatcgtgtatccgtacgccgtggcgtggttcggcgcggacggcaaacggcacacccggctgctctcgcgctacgcgtacaagaagctctctggaatcaaggctcacgagaagatcatgacgcgtcgccagagccgcctggaggaggcgcaccgtccccgcagcgagacgtccgccaagagctcgcgactcggagacgtcctcggctacgcgaccgcgtgcaactcgagctgggaggagacgtggaagcagaacggcgaccggaggtgttccagatcgaggatggcctcgtacattgggagggagcgcgtgctgacgcgcttctggaacggcgtgctgcgcgacgtgctcgctagccaccctggcaagacgcgcggcgatgtctacgctgccgcgggattccccgacttcaactgctgcacccgcggctgcccggcgtctccgaccaccgcggcgttcaaggcgatgaagcgcgtggtgcaggtggttcccacggacgagtacaagacgagccaagtgtgcgcgaggtgtctctcgagcctccgcaaaccaatgaatcgcattacactcccagacggtcgcgtccggtaccaagagctgcgaggtttcaggctgtgccaacagtgttttctggagtctcgtgcgcagccagcgtaccagtgggagacggagaggtggcgaggctacaagcggtttcatcgcgacctcaatgccgcgatggccatcatcctcgtggcgggcaagaagaacgaagatcgccccgagccgctccgtcgaccaagtagcagacaacgcgaagtcgtagaatacactagcctcagcgactgctgcgcagaataggcgtctctgtgccagcgtcctttgccaaaatgtggtgtgcaggttttagatggcaaagagtgtatgacgagcgacattctgcagagatttttgtctgccttgagaaccaaagtcacatcatgagcagcggatgggtgttcaaagcggccgcgtccaacggcgacacgctgtcagacgcgctggagggggacgccgtgctcgcgaccatcaactccgcgcatcgctttgcctttgggtgcggggcggcctcggcggcggtcctcttcatcgactcggacggcatcgacgccccgcggatatcgtgcgggggcaccgtgctgaccacgccctcctcccgcatcgacgccgccgccgtggagggccccctgtcgccctctaacgtccccgacggcggcgtcaccgacgccaagatcgcggagtccaacgtccggacgcaccacctggaggactccgcggtcaccgactctaagatcgcggaatccaacgtccggacgcaccacctggaggactccgcggtcaccgactctaagatcgcggaatccaacgtccggacgccccacctggaggacgccgcggtcaccgacgccaagatcgccgagtccaacgtccgcacgcaccacctggaaaactccgccgtcaccgacgccaagatcgccgagtcgaacgtccgcacgcaccacctggaggacgccgccgtctcggcagccaagatcgccgagtccaacatccggacgcaccacctcgaggactccgcggtcatcgacgccaaaatcgccgagtccaacgtccggacgccccacctggaggacgccgcggtcaccgacgccaagatctccgagtccaacgtccggacgcgccacatcgatgacgccgcagtcaccgacgccaagatcgcggaatccaacatccgcacgcaccacctggaagacgccgcggtgaccgtcgccaagatcgcggagtccaatgttcggacccaccacatcgaggacgccgccgtcaccgacgccaagatctccgagtccaatgttcggacccaccacatcgaggacgccgccgtcacggacgccaagatcgccgagtccaacgtccggacccaccacatcgaggacgccgcggtcaccgacgccaagatcgccgagtccaacgttcggacgcaccacctggaagactccgcggtcaccgacgccaagatcgcggagtccaacgtccggacccaccacctcgaggacgacgccgtcacggacgccaaaatcgccgagtccaacgtccgcacgcatcacctcgaggacgccgccgtcacggacgccaagatcgccgagtccaacgtccggacgcaccacatcgaggacgccgcggtcaccgacgccaagatctccgagtccaacgtccggacgcaccacatcgaggacgccgcggtcaccgacgccaagatcgccgagtccaacgtccgcacgcgccacctcgaggacgccgcggtcaccgacgccaagatctccgagtccaatgttcggacccaccacctcgaggacgccgccgtcacggacgccaagatcgccgagtccaacgtccggacccaccacctcgaggacgccgccgtcacggacgccaagatcgccgagtccaacgtccggacccaccacctcgaggacgccgccgtcacggacgccaagatcgccgagtccaacgtccggacggagcacctggaggacgccgccgtcacggacgccaagatcgcggagtccaacgtccggacggagcacctggaggacgccgcggtgaccgacgccaagatcgcggaatccaacgtccggacgcgccacatcgaggacgccgcggtcatcgacgccaagatcgcagagtccaatgttcggacccaccacatcgaggacgccgcggtcatcgacgccaagatcgcagagtccaacgtccggacgcaccacctggaggacgccgcggtgaccgacgccaagatcgcggaatccaacgtccggacggagcacctggaggacgccgcggtcaccgacgccaagatcgcggaatccaacgtccggacggagcacctcgaggactcagtggtgaccgacgccaagatcgcggaatccaacgtccggacgcaccacctggaggacgccgccgtcaccgcagccaagatcgcggaatccaacgtccggacggagcacctggaagacgccgccgtcaccgcagccaagatcgcggaatccaacgtccggacggagcacctggaagacgccgccgtgacggcggcaaaggtattcgagcagctgccggtgtcggtgggcggcacggggctgtccaccgcctccgaaggctgtctcctagtgggcaacgccgcagacccgtttctcaccagcccactcctgtactgggaagactcgacagaaaccctgttcgccggaggactgtccgccagcaacgccgctgtctcgggaaccctggcggcgggcggccgcccggacgtcgagcaggccctcgcggacatcgagtcgggctcggccatcgtcgacgacggcatcgtcggtcgccacctggcggacgccgccgtcgtcgaccgccacatcgcggagtcgaacgtcaggaccgtccacctggaagacgccgccgtgaccccggacaagatcgacggccccgtgccggtgcccacggggggcacggggctggcgtcggtccccgcgggggcgctgcttttcggcccggacgtcgacggggaccccctggcgtactccgacgcgctgaggtacgacgcggcggccgccaacctcgggtccagcaacgtgttcgcggaggacaggctgcacgcggcgtccaacatcatcctaggcggggtgggggcgacgaggttccggttctccgtcggcggcgccagcaacgacgacctcgtcatctcccgcatagacgagaaccaggtggagtcgtcgtacctcaacctgggcgacctcgtcgcgctcctgtccaacgtcaacatctacgacccgtgaggcgacacgcgcgcatttttttccgggcaaggaagcaaaacacccttcgagggcatgagtgaaaactacaacatatccgtccgggacgcgctggacgtgttctcccttgacccggatttcgacctcgactcgctgaagcggtcgtaccggacggtggctctgagggttcatccggatagaggaggcaacggggagcttttccaaaccgttaacgagtgcttccaggtgctgtgcctggagcacaacgcccgcagcgggggcgccccccacgaccagctcaagcgcgacttcgacgccgacatccgcaactacgacgccaccacccgccgcgacgtcaagttcaacatccagcagttcaactcggtgttcgagcagacccgcgtcgaggacgggatccgcgacaccgggtacggcgggtggctgcagtccgacgaggacctgccgtcgtcgcgcgcgaagccccgcatcagccccggcgcgggggtcgacgccttcaaccgcgcgttcgaggagagcgtcccggctccgaagaacgaggagacggccatcgtcgtgcgccccgtggacgtcgcgtgcggctcctcgctgtggctgaccgacctgggggaggactccgtggaggactactcgcaggcgggcgcattcgactgccgcctcgcgcacagcacgcagcgcctcgccgaccccagatcggtgcacctgtccggggactgccgtcgcatgactccggagcagatcgaggcgcagcgctccgccgacatgagccgcggactgtcgctgcacgagacggacgtgctgcggcgcgaggaggagcgcgcggcccgactggaccgggtccgccgcgagcgggagatggaaaagcaccgccgcttctccgacgcccacgccagggccaaccgaatgtttctgggagcgtgatccgacgctttttttttttttacctttttctttttcccatcgatgatcggatcttcgccaacgcgcccttattcgtcttctccttcttcggctttttcgccttcttctccttcgccttcttgaccccgtcgacgacctttctcttcagattgccgggcgcgttccggaccgcccgcttcgccttccgcttcatcgtctctcgcttggtctttttcaggttcttcttggcctgcttcgcttccgcggctcgctcctttttgattttggcctccgtctccgtcgccttcttgtcggcgctctccgcgttgtccttggcgtcctgcgacttggcgtccaggtccgccgcctccgcgtccagccgcttccgctcctcctgcttgttcttcaagtcctcgttcagctgatccctctccgccggagaggcgctctctttcagccgcttcttcaggctctcgatgtcggcgtccgcgtcgctgacctccttcctctttttcttcgccgcctcgtccgcggcccccgcctccagctgcgcctgcttccgcttgttctgcgcgtccatcttgtcctgctggcgcttgacctccgtgccgaattccttgtacgtcatctttccggacgcgcgcttctgatccagcaccttcatgtcgtcgaccgtctttttcgccgcctccaggtcggcgtcccccgcggccttctccctcttcatggcgtccagcttctcctccaatcgcttcctttcgatcgggtccaggctttcgtttcggaggatgcgctcggcgtcggcgatggcgtcctcgcgcttgtcctgctgcttcttgatctcctcggcctgcttctccgccatccgggtggggtcggagacgcggctgtccatcagcaccgcgttgaggtcgttggtcttcttctggacttcggcctgggcgcgctggatctcctgcacgctggccttcttctcctccagatccctcgtgtactcctccaggttggcctccgcccgccgctggaaatcgcccagttcgttcttcttcctgtcgatgtcggcggacaatttcgctttcttttcgttgctcgaccacagctttgcgtttatttcgcgggctttctttttcgcatcggctttggtgatgcccacgtccattccgttgttgaccatctcgatggcgtgactgttccgcttcccttccaactggttgcgttccttcttcttgctttccagctcttgtgttaactgctctttcatactttcgggcattttcttaatcgcctcctccatatttttgatttccaggtcggcggtctccacgtcggccttcagcgcctcgtgtttcgtggtcatttccacctgacgagccatcttggccttttccttttcgtaggaggcgatgtcggaggtgagactcgacacgtcgctctgcgccttgtcgatctcttgctgccggtcttgcgtgtgcttttggaggtcggccttggtctcttccaccgttcgggcggcgtcctgaagctcggcgttcgtcgcctgcagcttcacgcccagcgcctcggactccgtcgtcagcgggcctatcttttcctcgtagaccgcctcggcgtcggcctcctggcggttctgtttgatctcttcgtcgcgtttcttcatctcctcctcggcgtcctccagcttctcgttcagctcctgcagctccttcggatcgtcggtttcttggatctcctccctgatgtcgtccgcctcctccttcttctcgtcggccgcttccatcgcctcttcgttcttctccgcgacctctttcagcttggtggccgtctcttcgccgagcgcctcgttcacgatggccgccttctgttcgtcgggagccgtcaacataggcgcggcttccagaccatgatcgaatagttcattaccctcgtcctcctcttcttcctcgtcttcctcgtcgtcctcgtcgtcctcgtcttcctcgtcgtcctcgtcgtcctcgtcttcctcgtcgtcctcgtcgtcctcgtcttcctcgtcgtcctcgccgtccttgtcctcgtcctcgtcgccgtccttgtcctcgtcctcgtcgccctcctcctccacgccgtcgccctcctcctccacgccctcgccctcgccttcgccctcgtcgtcgtagtagtcgtcctcctgctcgacgttctcttccgcggcgacctggtcttcgcccgtctcgtgcttgcgcacgcggttgacgatccacctcagcagcattcccgccaccaccaagcccgagaccaacaccgtggtggtatgcgcctgcagcgcgatcagtttgctcaccgttttgggcaccgtggccccctcggtccccgaatcctcctccccggacgtcgacgtcgacgacgatcgcacgcaggacgcgacgatgtccatggcggagctggcggcctcgcagtcgttgagcgcgctggcgacgttggcggggaggtagacggacgcgagggaggtgtcggcttcgaacagcatgttgcccatctcgatcaccagccgcaccgcggccacgatgcccgcgaaagtcaccccgcgcaccagcacgtggccgatccgaagaaagggccgggacttgaatgcgaccttttggacgactcccaccagggcgaggatcgccatcgccgtggccacggtgagcgcgtccaggccgatcaccgaccacatgacgcgcgtgtcgctgtaccccgcgcactcgcacatcccgttttcgcaagatcgctccacgcacttgtcaagcgtcgctcgcgtgtcggacacgcacgggtcgaaccacggccaccacctccgcgtcaccatgctcgaccagaacagcgtgtgccagaaaaactttatcgtgtccacaaactcgcactcgccgtcctctcgcaggcacggggtgtcgaatcggatccacgtgaacaggttcgccagattcggcacgttgaggaacccgtgccggtggatggggtcccaccaccagaacagcagcagcaggcaggtgacgatggcgtctatggcgatcttgacaaagagcagagagcgaggtttggtcacactgggacgcggggggaacccccacagctttttgccgatgggcaccaggatcgccaccagcaccgccgcgacaaacagcgccgtcatgaaaacgaacagccacatcccccgcgtattggcgtatcggcacgaaaattgctgcgtacccgcgcgacgcgcgcaagcgcgtgcaaaatattttgaatcgtgcatgccacatttcgccgccacacgcaaaccaaaatcgctctcgaaaacagaaagccacccaacgcgatcgaccgaccccgacccctaaaccgccaacaccaacatcatcatcaacatgtcgaaccccaagggaatggcggctcgcaacggcttccggatgtcgagcgggccgctgaaggtcgccgtgccgcacggtctgcagctcaccctgcagctgtgcaagcccgggcggctccccaagagccacccgcaccacttccgagtcgtgcgcctgtgcttccgctgcgaagcgccgggcccgctcgaggggtgcgagctggtagtctacatttccacccccctgttccgtcacggactcaacatccgcgcgagatggttcctggcgaccgccctctggctcgtgggattcgagctggagggcgtccacgacccgcgcgccgccatgtacggctatgtcatggcggcgtttcgggccgacggattcgccgcgcccgccagcccgccgccgggatgcccgcgcgcggtgtcgctcgacgcgtcgcgccccgcggcgcccatagcaaacgacttcgaagcgttggccgccgcgctggggctctggacgagggatagcgcggacgagtcgagcggtatggtgcgccgtaccgccgacgaacgcagcaggtcgctgacggccaacatcgtcaccgccgacatgcgcgtcggctcgaaccagtggggcgacccggaggccgagaacggcatcgcgggcgccgtcgtccgcgcgacgcacccggactgcgagttctcgccgtggacctgcctgttgtgcttggatggtcccaagggcgagcacgacgagtgtccccactgccgcgtgcaattccacgccgactgcgcggccatgatgctactacacgacagggcctgcgccagctgtcggaagccgatcgtcggggggtccgacgaggacgaggacgactacgggaccgactacgggaccgactacgactacgactactacaccgacttcgactacgacaccgactacgacaccgacaccgacgacgggaccgacgacgacgcggagccggagccggagccggagcacgtgacccgcgagatcatagaggctagcggctaccgtctgggatcggtgtttgtcgagcggtggggcccgcacaacttcgtcaccgagaccctgctcgcggcggcgaccgccgtctgcgaagccagaccctgcaccatggacgagatcgccgactacctgttgggcaagggatgtctcgcgctccccgccatcgccgccaacccgtcggacctagccgccgacgtcgagcggtacttggcgagcgacgacgtgtaaaataaataaaaaaataaatagtaattgtataaattacacattttagattatttttttttgctttgattttctttcgggcgacagacagaaaacgctgcgctcttctcacttgcgagcttctaccagccacacgatggtgtccagcatgccgggcatggccggggcgaacccctccggcttgtcccccttcaaggtggtgctgcaggtcaccaagtcgacggtctcctccatgagccggtcgcagtcggccaggatgtcgcgcctcccggcggccaggacgtgctccaccacggcgacgcatatctgggggtctcggccctcgaacgcgcagcacacggcgagcgagtcgacggcgcacgtggagtccttgatcgctttcgcgaacgccgcgcgaagcatctccaacttggcggccggcttcatgtcgcactcgatgatcccggggacgacggcgaacgggtcgcgctcgatgcgctcttggagctcccacgagtgatacatggccatgacggcgtccggggtgaagcgatcgtcgctcttgagatcgaacgactcggaccagttgcgggtggcgcgcgcgaagggagacatctcgaggccgtggtggcgcgacatgatgatgcgtgatgcgtgatgcgtgctgtatatatacacggccggcgtgccgctttcaaaaaaacaaaaacaaagcgtccgtccggtcagcagaacaggccgttccggagcgcctccgaggccgaggggcgggcctccgggtccgggtccagcagcgcggcgcacagcgcggcggccttgggggcggccgggttgcgccacagcacctctgcggcggcggtcccctcccgctcgccgaacgggtgcgccgtgagcgacgggtgacccaggcggtacagcagcacgccgagcgaccacatgtccatccccgggtgcgccggtccggtatctgggcacgcgtacacccccgaccccggctcgtcgagcgcgaccccgatctcggtggcggcgtgcaggtctgtcagcgtgcatcgtccggaccacatgcacgccaggttccccggacggatggcgagatgcaccagaggggttttggcgtgcagctccgccacggcggcgaacgccgggcgcgcggccgcggcgatctccgcgtcgcccctggcccgccgctcgatgcgcatcgagcgcctcgcccccggacaggtctgcaggacgacgctcgggtgcgccggctcgggggccgcctccgcaaacggcccgaagtcgacgtccgaatcgaagcacaggcggtggaacgcgccgcccaccaccagcccccggtcgcacgtctccgccttctcgagggcgtggaactcgcggcgggcggaggagtcgtctcggtggcggtggatgacgacgcgcctgcggttggctctgtcccacccctcgtaggcggtcacgcgcccccagccggtgatgggcctcgcgacgacgaagttcggctttgtcaccgtcatttttgcaggtag

SEQ ID NO: 175 - DNA, 22427 bp, unidentified
  misc_feature 1..22427: note = Fanzor polypeptide
  source 1..22427: mol_type = other DNA
tttttacaagccgcggcggcgccggccggccccaccgcctaggaggaggagtaggaggaggcgtcgctgcaccgccggacgaacgccacgacttcgcgggccgcgtccgccacgtcccccgccgcgtccacctccagcgtgcccggcgcccgctcgcccgcgtacttcgcctcgtgcagcgcgtggaggggcgccagcgtcgccgcgtccaggccggcctccgagggacgccccctggcgcgcacccgcgccatgcaaagctccggagacgcccgcaggtacacgcggcccacgcactcgaaattcagagcctgggacacggtgttcaccagctccgtgaagcagcggtgctggaacgcgtcgaacaccccggactgcagcttgtactccgcgaacagcgccgtgtcaaaggggtcgcgctcctgcaccaccacgccctgggcggcgtcccccgaaagcagctgctggatgcgcgtggtcaggacgtggacctgaaagcccagcgcgtggcggtggcggtcgcggtagtacaggtccagcggcgcgtccacggcctcgccgcggtgccggaacggcgcgcaccagcgctccacgggctccggaatcacgtgcagccccaacgccgcgaggcgctgcaggagggtcgtcttcccgctgccgatgttgccgtcaaccaccacgtaccgccgactgggcgcgcccgacgcttgcatcgcggctccgggtgcggaccgccgtcgcgcttaacccgcgccagacgcgcccgggattattgttacgtttgaggaaaccctgaccagcgcccgcccgtccgccatggccatgttcaccgactttgtcagggacaccaccacgcgcggcgacggcaagaaggtgcgcgtccccggccgcctggagtttacggtctccgggcaggacgtcgcgctggtgtccggcctccgccgcgcgatcatgaccgacgtcaagatcgccgccttccgcttcgacgcggtggaccccgccgcgcaggacgtccgggtgtccctgaacaccggctccctgcacaacgagatcatcggcgagcgcgtcgggctcctgccgctgcacctggacaaggcggccctcctggacttccggccggccgcgtggcggttcgagatcgacgtggagaacaccggctccaagcccctcgacgtcaccaccgccgacatctccatcgtgcccacggacgacgccgccgccgccgacgccgcgacgaccgcggcgcgcgtgttcagggcggaccccatcaccgggcggcaccccatcgtcacggtgctcatgccgggccagcggctcgccctcgaggccaccgcgaccctcggcagcggccacgagcacgcgcggttcaaccccgtcgcggcgtgcgccatgttcccgctgcaggacaaggccgccgtggacaaggcgcgccggggccgggaggacaaggcaaccttcgacgcgctggacgccaagcgcatcgtgctccgggacgcggccggggccccggccgcccaccgcttctgcctcgagacgcagtgcggcatgagcgccgaggaggtcgtggaggccgggtacgaggcgctggccagccggctccgcgccctggcggacgccaccgacggcaccgcccgggtgcacgacgtgcccccgcagaccgggtcgcccccggacatccacagcctcaagctgtccggcgaggaccacacgtccggcgcgctggtgcagaccaagctcttggagaagaccgacttcgcgggctactacctcccgcacctcctggagcgcgccatcgtcgtcaggatccgcgtcccgcccggcgcaaccgcgcgggggatgctcaaggaggcgtgcgagtcggcggcggacctgtgcgagcacgcgctggccgagtggcagaagaccgcgaaccccggcaagtgagtgagcgggatccggccggtcagtcgaacgacagcgtggtctgcacccgctggtggatgccggccgccaccggccgcgcccccgccttgccgcccgccgcccggtcgccgccgccgggcgcggggacggcgggcgcggcggcgaccggggcgcgcttggccacgccgccgtccaccatggcgcgctcgatggccctcttgttctcatggatgtaatccaggacgcccgtctcgatggcccacttgaaaaagttgagctgccccaccgtcgtctcgatcgcgtcgtccgggccgtcgccgtacacgaaccggatgcgctcgtgccgccggaacggatcgaactgctccttggaaaacgtcttgagcgcgctgcggtagctgtggtacacgttgaactggccgccgtcgcgcgccaggatcacgtcgttccgcttggcgtggttggtgatgaaccactcgatcatgcgcagggacgccggcgagctcccgtgcacgaccgacaccatcggccggatgttgtccgccttgctgtagaaacggtttatcgccagcatcaggatgtcctggttctggtgcatggcggcgggcggcgggcggcgggcggcggctcctcgcgcgaaacctcgggcgctgcttcactcgggcgggcgcgccgccgggctccgggcgtcttacaccccttcactccgggccgccggcctcctcgcccgccgcactcgcagccgggggcacgtgcacgcccagctcctccgggccccagaacgccttgcagtgctcgcagctgtacaggaaccgcaggttgagggcgtcgtacttgacgtacagcaccctgcccttctgccgcggggcgcgcgtgcaccccttgttggggcacggcaccgtgtccacgcgcggcagcgtcgggtcctcgtggagcagcggcgtcagcaggtggtggtacttggcgcggtcgtcccggtagtccgtctccactatcggctcgctggagtcgccgacatcgtaggtcgaggagcagtagttgcactggtagatgacctcccctccggacagcttcacatacaggagattgtcgcacacatcgcagaacctcatggcgaggaggccggggatcggttccggagggacttgctctacccgccgcctataaaaggcggcacacttacgcgcgcagccctaacgccccgagccggcgcccgtcccgtccgtcgtccccgcgaccccggcgtacgcctcccgctccacgttgcggtagtcgatcatctggcacgccggcagggtgtccttggaggcggtgccgatgtcgggctgcggcgggcgatacatcgaggggctgctcaccacgcccttcttggggatatagtcgtagctcgggcaccgggtcgccgtccgtgtctgcccgcgcaggtcgttctccagcgcgatcatatccccccacgcctggtgcacggcgtccggctgcggctgcgggcccaccgtgctggtcgtgttccccgcgaccaggccgcggtcgtgcgcgcacgggtcggtgtgcgtgaagcggttgatgtccaccgtgtgcgagaatatagacacgttgtcccggatctcggccttcgtcgcgcacgagtcgtagcgcaggcggttgaacatcctcgtttcgttgtcaaccacgcagaattttttttcctcccccgccatgacgacccgcaggaacgccggcgtcccccggacccaggcgtcgagcatcaaggccggcacgtaccgctccctaagtctcaacgacaccccggtctcggacgccttctcccggatggtcatcgcgcgcatgacccagcgcggcgtggccaccaccgacgagaagcactggtccctcggcgagatgctggacgagttctcgagcggaaacatcaacgtgtaccccgactaccagcgcggcatggtggccaccgtccagtgggcgcgcgagctcatcggcgtctgcatgctcacgtccgccccgatcgcccccatctacctctacgccacccccacgggctgctacgaggtcgtcgacggcgcgcagcgcctcgccgcgtacttcctgttcatgatgggcgcgtttcccgtcgtcgacgacgcgggcacggagtggtggttctgctccgggagcgacccctgccactggacccgcgtcttgggcggccccacgcacgagaccggcgtggccgccctcatagacgactcgcccgtcccggaggccatccgccgcttccacagccagacgcgccccttcctcaagcccccgcccgccgacgcggccctgctgtccggcgagatccagggccgcctccgcggccggaagcagtccatcgtggtcatgcccaagacctgggaccgcgagctggccatcctctacaccgtgttcaccgggctgaaggcgtggcggcagaccaaggacgagtgcctcgtccacatgcacgaccacgcctcccgcgcgctcaaggccctggagcccgacctcgtccaggcgctcgcggaggcgggcgtgcccttcagctcgcccacccgccaggtgtacggcgtcctcgtgcggacgttcgcgtgcctcgagaacttttcccacgtgccggtcgagcaggacgagcgcctgtacgtggacctcatgatgaagctcgccgccgactacgcgaccgccgccccccccgcgcgcaccatcgccgccctccggaagggcgtcgactggctgcacgccaacggcgccgcgctgatgagtaccctccccccgcgccccccgaagatcaccccggacaccctgtgcgcgctcctctacaccgcgagctcccggtccaccttccgcgtcaagtccatggtcacgatggtcctctttgtctccgcgaccaagcccaagcgcctcctgctgctcagaggcggcaacatcgccaacgccgacgagatactaaacgactaccaggccgcgctcgaccggaggcgcgcgtccggctccaccaacctcgcggagctgtgcgccaccgcgtctcggctggtgaactgagagcacccgaacaccttcgtccggagcgctgcttcacgcgagccgcgggcacggagctagccaaccagggaaaagccggggacacgttcgtagcccgggtcgaccggtggagtgcgagtcagcgcacgaagccatgtccggtccggggtttcccgttttgccatacactgagtttacaccccttgcccgttgtgcaccgtgcggtcattttcatttcaaatgactgctgcgcagaataggcgtctctgtgccagaaaacccagaacgggcgtggtgcgcaggttttagatatttaaaattctacgcgatgtccgccggcacgctcctcacccccgagctggtctgaagccgccgcgcggggggggaggcgcccgcgccgtggcggtggtgcgactcgtggcactcggcgcagagcggctccaggttgaaggcggcgtcccgcacgcgccgctccgccgaggcctgcggcacgcggtggtgcgtgtgcaccgccggacgccgcccgcaccgctcgcacacccccatgaacacgcccgcattgtagttggaccgcttccgcgacacggcgtagtccgggtcgtggccctggagccgccgcagggcgtgcgcggcgcgctccaggaacgtggcgggcatgcccagggaccggcacaccgtcacgccgtacgtggtctcgcccacgccgtcgcggagcgtgcgctcgtagaccaggcaccccgagtcgtcggtccggaccgagaggtgccggacggccacccccccgcccccgcccccgcccgccaggcccagcatgtccacaacgtcgtgctggtgtgtggccagcaggaaacggcacccgcggtcgcgcagctcctccacgcccgcggtgattatggccgtggccgacacgcgctccgtgccgctgcacagctcgtcgcccaacacgaggctcatggagtcgctgtgccgcaggatctggttgagctcgctggcctccacgctgaaggtggacaggccgcggttgatgtcgtcgttgttccagatgcgggtgaagagccgcgcgaacggtcccaccaccaccgagtccgcgctcacgtacatgccggcctgcgccatgcacaccgctatgcccaccgacttcatcaggcagctcttgccgctgccgttgatgccgtacaggagcatgccgcagcaccggtcgtccatggagacgtcgttgcccacgtactcgtgcggcccgtccagggcctccaccaccgggtgccgcaggcccgccgccgtcacgaacgcccccttcccggacacaatctccgggcgcacaaacccgcgatcctccgccatcaccgccaccgcggaggccacgtccaggtcctccagctcccgcgcgcacaggaacaccgcgtccgcggtggcggcgccgagggccgcgcactgcgccgcgtgcacggacgcggtcagctcccgcacgcggcgccgcgcgtcggccaccgcttccagcgcgctgtccagatcggggtgcgccagcaccatgtcgctcttcttcgagcggtgcccgcggagcgagaggtccaggcaccggatccgacgccccgcgatctccagcgccgggtcccgccggcgcgcctcgcgcattgcggcatcgaaccggcgccgggtgacggcgatttccagcgccgcgggcgattcatccacacggaagtgagactcggacaccgctccggagcacccctccaggctccggagcgcggccgctagctccgcgtccaaggcgccgctccgggcgcgcgcggcatccagctcgccgcacacccccggccggaacaccgtcccggacgagtagcgggacgcctcgacatcgacgaccgcctcgaaggcggccgcggccgagtcggcggggtggtgcggccgcgcgcccagcacctcgacggaggcctccttcagcagccggagcgagtccaccatcgccgcaaacccagcgggcctgaaggtcgccggcctcgccagtccccggtggagcgtctcgaaatcccggacgtccccgaggagccgccgcagcgaccgcagccgcggcaccgccgccgccgcgacgtccaggcggcgcaccatctccgcggcgtcgcgcgacggccggcacagccgctgccggaacgcccggcgaccgggggcggtgcagcaccgcggcaggtggtccagcacgccgtccttgccgatgatgtccagctgacggagcccgccaatcgcgacgtccaggtgcgcgtgcgaggagatgagcgtgggcgtctccatgatgcgcagcttgctgtcgtcggcgcggaacacaaagtgcacgaggtgcgaaaacgcccgggcggcgtggcggcgccctcccaggcacgcgtaggtgtcggccgaccccgtcatcagcccgcactcgtcgaactgcctccggatggtctcccgcacgtgcgagtcgcgcagcgtgacgcactccacggggcggtagtccacgcgcttgccaaagacgcgcatgctgcccgcccgctcccggaagcgcgccaccgcggcgtccccgtcctccgtatcggtgtgcaccaccagcgtgtgcgccggggcgtccgccaggaccgcgcccagaagcccgccaaacgccgcctcgaagtcgccctccacaaactcgcatgcgcgcgtccgcccggtgttggactcgaacgtcgcgtaccccatgatctccggacggttgtccaggtacaccaccgcgcaaacagcgctgtcgcagtcgtacggcagcgcgatgggggtgcccggcccgtgcaccgccacgggcgcgcggtatatctcctcgcagccgttcttcttgcgccgcgtgaactggtccatcaccaccaccacgtacccctggtccgtgaaccgcgtcacccagttggcgagcgaatgcttcgggaacccggccatgtcctgcgcgttgtagctcagtccggtcacctcgtgcgcgatgcgggcctggtcgtcgtagaagttgtacatgctgccctgcatcatcgccaccgtcgtgcgctggccataaagcccggcgaactccgccacccgctcgtggtaaaacccgcgcacgctcgtcatcccggccgccaaaaataacgcgctccttttactaaaatgcaggccgcgcaggaggacgccgcgaccatcccgtgcgagtactgcgggatgagcctgccgatcgagcggtacccggggctctcgctgttatgtgccctcgggatcggcctcgccggaatcgggagcccgggcggcctcctcggcggtctcctcggcgaggactcgtacgaggacaacctccggctgcaggacgccatgggcggcccggtcaagaaggcgtgcaaggacatcaacctcgcggcacccgtcgtcgaccacggggcgcactccctcgaccggtgcggcgtgtgcctgtccggcgtcaccgaccggacccgcgtccgccgcgccgccaagtgcggccacgagttctgcgccgagtgcctggagacctggctgtcggagaacaccacgtgcccactgtgcatctcggacctgtccgaggtcggaggctccaggtacatcatggactgccccgccgcgacgccgcgcgcggcggatcccatccgcgtcccggcgcgtctgggaccccctcttccgccgccccccgccccgaggactggacggaggcatgtttggcgtcatcatgccgccccagccccgcgcagccccgccccgcgccgccgcgcgcctcttccccgcaccgcctccgccctcggcggggttcgcgccccccgacatgttctacccgtacttcaggtcgcccctcgaacacctgcggccgctccaggcgcagccccgccccgccccaaccgcgcgcccggccccgtcccgccggagcgaggacgacatccggcacgccgcggacgccgtgtaccatttcagcgccgtccaagacatcctcgaccggcccatgagggacgcgcgcgacccgtgaccgaagcccgcggtgaccgcggcccttcccccggagatgtaaactctggtgtttgagcgcgaagccataaactgtcttgggtgtcccattttcccagacatagagtttaaccatgtgaatcatcacacacacccacaaaacaggggtcgagggggcatgatacaccccttgccatatttttctgcacaccgggtaatgtacgacaagcaacttgtgcattgtgcagtcattcattacttgcatttcaaccgctcgttgcggaaagtggccacagtctacgggtgcggctacacgacgctgggcggatgggtcagaaagcagctcggtacatcgacactgcctccgcgaaaacgaaaatcgccggtcagcgacgtgatacgcgaggcggtagcgcaatgcgtcgaaaacaacccgttcaccacactgtccgatatcgtgaaacggatacgtgttgacgggcgaaaggcgtcggtgtccacagtcaggcgggttatgcaaaaagcaaacatgtccaggaaacgggccagggtgcgcttcgcgcccaaagaacccaccaagcagcaggcggagcagtttttgcccgagattcgaacgcccgcgcaagaagtaatttccatcgacgaaagcagcgtcctgctggaaagcgtgccgacgtacggatacagcctcaagggcacgagggtagtgaagcgaaccaacaagccggtgcgaggcaaccgcgtgacgctgctcttggcgatatcgaacacgcgaggtgtagtgcaccatgcgacgtattcgggtagctgcaattcccagaagttcgccggatttcttggcgacctcccacagttttcgtcgctgacacccattatcctggacaatgtgcgattccatcattcacacgtggtgaaagccgccgcacacgccaacaacctgcacctcgtgttcacgccgccctactgtccggacttcaatccgatcgaaaacgcgttctctgtcatcaaatccgtgaccagacgcttcgacgactcgctccccgatgccatacggagcgtgacgcccgagaagtgcgcggccttcttcgccagatcgatacggcacgcgacgacgctagcggagacggccccggacgcgatgcaacccgccggacgcgtcgacggttgaccggacgccgtgtgctgcgcagcgctgtgcggcgcgtcctggacataaaaggtacgccgtgtggcgagcaaagccaaaatccgctccgcctctcgacaccgcctccatctaccactcccggaagatggaggcggatgtggccgaaggccccgtcctcgggacggggcgaaccacgaccgtcaagtgctgcttcaaagccgccagcgcgtgcaagcgtcgcaatgccgttttcggccgcgcctgtctccgtcgcagacgccccgtcaccgcgcagcgagtgcgcgcggccaagactcctccgacggcgttcaaagacctcgcagacatcgtggacagcgcggtcaatctggtttccaaggcggctcgtcgaggctccctcgtcgccatgctgacggtggtgcgcacgctggagaggaacaacggcaccctgcccgctgggttcttcggcagcagcatggacaccttcttcggacagtgcttcaagtttggcgcgttgaagcgcacggagtatggcatgacaccggacatgccgcgcgctgctaccagcaacccgtggatcctcgccgccttgcgcgacaataggattgcccaggcgctcagcaagcaccgtgtccgccggcagccaggggactccaacctcctccaagccgccgccaacgcctaccagaccaactttgtcaactttttcgactacgagctgcctcgccgcgtcaagaccatggtcaaggcgctgtggtggcgcagctacccggactacaatacgccgcgcccgaagggacagcttgccagggcggtcaactacgccaccgtcctcgtcgacggcgtgccggagccgggcggcgtgccggacgccttcctgcaggcggttcgcgagctgcggactcggcatctcgctgccgtttcgcccgccgccaccgagaagctgcgtgcggacgtggcggagctgactcggcggcgtgttgccgagcccaagaacagcaaccgatggaaggccttgtccgccgagctcctcgaggcgcggcgtcgcgtcaagtacgcggcgctcggcgggaggatagagttcgtgtactggctgctccgtcggctgcaggccatggaggccgcggacggcgtcgtctacaagaagtttgccatggcgccgctggctcgcgagcagcgcgcgcacatcaccatcgacggcaaagtgctcagggactacctctttccgcgcctcaaggacatcggctactacgccgccggcatgacggcgtcctccttggacgaccccgacatccgcgcggcccacctcgccgcgctcttccccggctgcgagaacctccggccgcggcgacgaggatgggtgccgtcgtcgtcgttcaagacggacggcttctccttgtgcgcgtcgtttgctcgcgactccaacctgacggcgaagcgcgggagcggtccgaaacgcgtcccggaaagcaagaagaaaacgtcggcaaaacgagcggagaagctgcaaggcacgttcggcgccatccccgagggggccgtggtggtggggtgcgacatgggcatcgtgtatccgtacgccgtggcgtggttcggcgcggacggcagacggcacacccggctgctttcgcgctacgcgtacaagaagctctccggcatcaaggctcacgagaagatcatggcgcgtcgccagagccgcctggaggaggcgcaccgtccccgcagcgagacgtccgccaagagctcgcgactcggagacgtcctcggctacgcgaccgcgtgcaactcgagctgggaggagacatggaagcagaacggcgaccggaggtgttccaggtcgaggatggcctcgtacattgggagggagcgcgtgctgacgcgcttctggaacggcgtgctgcgcgacgtgctcgctagccaccctggcaagacgcgcggcgatgtctacgctgcggcgggcttccccgacttcaactgctgtacccgcggctgcccggcgtctccgaccaccgcggcgttcaaggcgatgaagcgcgtggtgcaggtggttcccacggacgagtacaagacgagccaagtgtgcgcgcggtgtctctcgagcctccgcaaaccaatgaatcgcattacactccccgacggtcgcgtccggtaccaagagctgcgaggtttcaggctgtgccaacagtgttttctggagtctcgtgcgcagcgagcgtacccgtgggagacggagaggtggcgaggctacaagcggtatcatcgcgacctgaatgccgcgatggccatcctcctcgtggcgggcaagacgaacgaagaacgccccgagccgctccgtcgaccaagtagcatacaacgcgaagtcgtagaatacactagccccagcgactgctgcgcagaataggcgcctctgtgccagcatcctttgccaaaaagtggtgtgcaggttttagatggcaaagagtgtatatcgcaccctgtcaaacctgaaatggccgattgctttcaacgctgtcccgcaccggccggcgacgcgcctcaactgccgggaagagttgcaaccatccccgacgagcagccgttcctcaccatggacggtcgcgtgacgagcctccgcacccgtagactcaaaccaatttccgcatgctagtgcgcaagaccgaatattttttctgttatatattgaaatgaaactatttaaaactgaggaactgtcgattgccgaccttcacattagccaagacgaaaaaaataacattggtaatagagaggtgcggcgagtggttccaaagaacaatggatacccaaagacatcggatcaagtgatgcgcctcgcgcttctgatgttggtcatgttttcagagagcccgatgagaacgcttaacgagctgaaattgggtcgagtcaagagtagcacgggtgatcctattgtgttaaacggtatcagttttttcgcggctttccgcgatctgtttcagacgttgacgtcgaaaatgtccccacagatcgcccacatgaaaacgaagggaggaaccaacaatgggtatcttgtaattgatggtgaaaatgcatatactgcaaacgtcgcccctgcccccactgaaaatgtaaaggtctacgacctgtcgctagatggaatgctgtatatgggtctagatgcgcgcaaattcatcatcgtgccgtcgtgcccggcggatttcaatatagccagtttcgacgacttcgaagcctacttccagtcgaacaggaatcccgaggtatccaattatgagggacacggtggtgacgctttcaacttccatacttacgtcgacgtgaagtgcgcagcgggaatcattttcggtcacccgactgaaatgatgaggtcaatgtacgggcacgagagggccgcaccgtcctcgcccgggtttgtcaggagaacggacgtgtgggtggcggaaatagcggctggtgaacagaccaacaccgtaacatatcgccccctacgccacaatgagatcgccggagaaatcagcctaagtgatcttgaggaagcgatataccgcgatttaatgaaattatctactattgttgaggagccaaattacgacaactacaaaaacacatttctgccgaccatctcggagtatgaacaagcatttgaaaatgcaaagaatcggctggagcagtcgcagtcgcaggcgcaggcgcaggcgcaggagcagtcgcaggcggaggcgcaggagcagatagaggaggaggaggtttggataactctcgacgaggacaagattcctgttttcacaacacattctctaggcatagcgccgtcggtgaagatcaccaagagcacgttggattacaacgtggagagaattctgggtcaaccctttgtgtggattccgggctgcaagcccaaccaaatagatgaggacggagaatcggtacaaagttacaaaacgtttaaatctagcctcgaattaggaagaaatgctgtttgcgcgagcggtcctagggtggatccggacttcgatgtttatattttcgacatggctttacaatacgatgttttcactgcagccggcaccggcatccgtgtcccgttcctcgacgttttgcttggcaacaacatgattttcaattcaaacagtataccatcccaagcggaggcaccggaagggattatcgcggcacatgtcaacgccgccgaggacagcgccgcgcctcaagatccgacgccgcggcctcgttcgacgccgcggcctcgttcgacgccgcggtatcgtcgtgacagtgatagtactccgtcgacccgaacaacaccataccggggtgcgactagtattcatgagtatatccgcatgatccagttgaaatgcgaaacacttagtcaaatgtcacgactaagttgggatgacatcaaagcactactgcagcttacgctcgacacatgtaatgccgtgcttgggtcacgagatgatgtagaatcgatcaggaaaggttttccggtgattgtcagcgcaattatctacctaaggcaactcgggttgaggctgtttgaacaactcacgaataccctgatcggcctgtgcaattcggcagccacagggacggcgttcaactttgatctgatcactgtcagatatgaagtccaatcactactcactaatgaaaacttttctgaaaacttctatctcggacgtctgcgtcaacaccactatgtccctctaacagatttggggtccggcagaaacggttcggtaaaactcatcgcgatgaacgggcagttttttgcattgaaaacaggaagtgtagaggcagatcgtgcgaacgaaatgcgaattcgtagtgatttcaatactgacttgttgcattatgcatactacacaaccgtcgtcgagcgtctaccgcattggttggcaaataacgagaatctactcttgtccgatttcgccgccaagtcgtatgataaagtgccgttgcacaccatatcatccattaggaatgccatgaattcgatgctgaaattctatttgcgttcgttagaattggagaggaacggactgtaccacgttgatcaaaagcctccgaacattatcaaaatgtcgggtaaggcgtttatctccgattttggaaacatgtggcactcggattacgggtcggatgtgctgtgcacaccctattactcgttctacatcgaagggcgctacgcacataaaattgctaagaaaatcgaaggtcaccttaataatatacgcaatagacgtgatgcttttcgtgttaaacttactaaacctggtgaattgtggtcaagtaacatctacggtcacgttcggtgcgtggccttgtatcaaattatagtaacgactctcgagtgcatgagaacaagtgtgttgaatacaagacaaaatacaaggcaattcgatcggtttcttaatgaatttgtggtgcctcttgtagaggttctgctagaaggaccccgcggttccgatcatagtgacagaatccagtccgtgatcgataaagggctccacgaggaactccggattggctcgactgcaactggaggaggaggaggtagcgatgattttatgcttggtgatgagataacaaaccatgatgagttccagataattccagagaatttactacataaaacagaattattccctattaaaggatcattagataagatttaccatgatccggaggacaagatgtacataaacacaacatcccaaccaaggggcggcggaggtctatccaagacgcgctatgagctggtatgggcgtcggtcgccttgggtttgacgactctggtctcggcgttctctcagtgacgaacgaggccaacacagctgatccccgttcgaaactggttccgactgtatttattcagcgccgcgtgactttgccaaaccgaggacaccccggaagtacactcgccttcaccgcggtttgggggcgggtagccgacagccggttctcctgtcgaacatcgtacctgtacccgagaggccgcgccaaccttcccgtcggtgccacaatatcgcaaaatcggcgcggctgggacggtgtgaacagaccgtgtgtatcgccggtgttctccatagggttattgattttttcaccgggagcgcggcgcccttcgaatgcgagcaacaccaagagcgcggcgagcgtggtgagcagcgtgccggtggcgagctggaagcgatccgacgcgtcccgaaacgccagcgtcgcgcacgtcatgaccggcaccgttacagcaatcatgggatcgaaccaggggtaggaatccgagggggcgaccatacactctttgcaatctaaaacctgtacaccactttttgggcaaaggactctggcacagacacgcgagtgtattctacgacttcgcgctgatgcgctgaaaagggccggacgcttcgcgccaacacgcgctcaggcgtgcatctcggcgcggatccactcccgcgtcgcggggtggctaaccgcagcagtcatgcatctccacgcgttccacgggcagccgtgggcgcgcgcccactgcaggacctccaggcagccgaatatcgccgcatcctcgcacgtcaagtcgtcccaggggcagccgtgggcgcgcgcccactgcaggacctcaggtggccgccggccgccgcgaattggcacgtgaactcgtcccaggggcagccgttggcgcgcgcccactgcaggacctccaggtggcctccgagggccgccgtcgcacacgtccgggcgtcccatgggcagccgtggtcgtacgcccactgcaggacctccaggtggcctcgttccgccgccgtcgcacacgtccgggagtcccatgggcagccgtgggcgcgcgcccactgcaggacctccaggtggcctctttccgccgccgccgcacacgtccgggcgtcccaggggcacccgcccgcgcggagccactgcaggacgcccaggtggccgcctttggcggcgaacgcgaacgtcgtttcgtcccaggggcagccgtgggcgcgcgcccactgcaggactcccaggtggcctccgagggacgcggcgtcacacgtcgactcgccccagggacagccggcggcgtgcagccactgcaggacgtccaggtggcctctttccgccgccgtcgcacacgtccgggagtcccagggacagccggcggtgtgcagccactgcaggacgtccaggtgccctccgagggccgcggcgtcacacgtcgacccgccccagggacagtcggcggcgtgcagccactgcaggactcccaggtgccctccgagggccgcggcgtcacacgtcgactcgccccagggacagccggcggcgtgcagcaactgcaggacgtccaggcatccccgtcgcgcggcggcctcgcacgtctgccggcccataacgccgccgccatcgctaaccgcctccagcaggagggggtagcgggggtcggcgcgcgcggcgtcgcggaggtcgcggcaggtggcggccagcaacgcgaacgcccacgggggcatgtgtgacatgatgtccagcaccccaaggcacgcgacggcggaggcggaggagtccatagtctctgatacgacggtcgatgatacggggagggaggcaggcaagcaggttttcggcccgggcgcgtgacgccttcaatttgtatgtatcgttggctggcctcggcaatgtgaagcgcccgccggcaaaaaacgtccggaaatcgataccccaatggttacacgcggtccatctcggcgcggatccactccagcgtttcgggctcaaactccgcagcgtcctcgcacgccgacgcgtcccaggggcacccctcggcccgcagccactccaggacctccaggcggccgaagaacgccgccaccgcgcacgtccgctcgtcccaggggcagccggcgccgcgcgcccaccgcaggacccccaggtcgccgcgcatcgccgcgcccgaacacgtcgacgcgtcccaggggcacccctcggcccgcagccactccaggacccccaggtggccgccgagcgcggctttcgcacacgcggactcgtcccaggggcagcccgcggcgcgcgccagcttcaggaccgccaggcggccgccggacgccgcggcggcgcaggttgtcgcgtcccgggggcagcccgcggagagagcccaccgcaggacctccgggtggccgccttcggccgcggccgcgcacgtccgggcgtcccaggggcacccgcccgcgcgcagccaccgcaggacgtccaggtagcccagcctcgcggcgcactcgcacgtctcctccgtgtcgcctctgccgacgccgcttatcaccaccaggaggcgggcgcggcgggggtcggcgcgggcggcgtcgcggaggccgcggcaggcggcggacagcaccgcgcccgcgcgcgggggcatgtgccacatgatgtccggcgaccccaagcacgcggcggcggaggacgccatagtgggcggggtggaggctccattggccggggccgaccgcgttagattcgtcccacaatcggacgcgcgctggccatgaagcgggccacaatcgtacaagtgtgcgcgtgcgcgtgcgcgtgcgcgtgcgctgtgtgtcggaaatggtacaatattttccgttacaaaacaacgcacccccgccaattttcacgcacaaaaatcacttccagcgcgccattgcctggaactcggctgcggacatcttccagtcgccctgtatctcgggggcgatgcacgcccagtcgtccttgatttccgaggcggtgcacatccagtcgttccggaggggagaaggaccggaggtcggcgtgtcgtacatgttgtggatgaccttcgcaatggcggacttgccgccgccgaccgtgccggtggcctcggtcgcggggcgactcgggctcgggagctccatcgatccgctcgtgggcggtggttggtctgtgaggttctgacgccgggaggttcgctcaccgcctgtatacactcctgccagcgcgctcgcaggcttccgggcgcctgcaaaaaccacaccgccaggacgcgcgctggctgtagccccggacgcttagcggttcatctcggcgcggatccactcccgcgtcgcggggtgcctcgcctccgcggcggcctcgcattgccccgcgtcccaggggcagcccgcgccgcgcgcccactgcaggacctccaggtggccgccggtcgccgcggcgtagcacgttgtctcgtcccaggggcagcccgcgccgcgcgcccaccgcagcacctccaggtggccggaagacgccgcgaagcggcacgtgagctcgtcccaggggcagccgcgggcgcgcgcccaccgcaggacctccaggcggccgtgcgacgcggctgcaatacacacctcggagttccaggggcagcccgcgccgcgcgcccactgcagcacctccaggtggccgcgtcgggcggctatcgtacacacttcggagttccaggggcagcccgcgccgcgcgcccaccgcaggacgcccaggtggccgccggtcgcggccatccagcacgtcgaaccgccccacgggcagccgttgccgcgcgcccactgcagcacctccaggtggccgccgagcgccgccaccgagcacgtgctctcgtcccaggagtagccgtgcgcgcgcgcccacttgaggacctccaggcgaccaccttgcgccgcgccccagcaaacggccgagtcgaccgcacgtcgctcggcgtgcagccacttgagcacctccaggcggccgctggaagcggcggcagaaaacactccgccgtcccacgggcaccccgcggcgagcgcccaccgcagcacgcccaggtggccgccggacgcggcgttcacacacgctgcagagtcccaggggcatccgttggcgcgcgcccaccgcaggacgcccaggtggccgccggacgcggcgttactgcacgtccgggcgtcccaggggcagccggcgccgcgaagccactgcaggacgcccaggtggccgcctttggcggctttaccgcacgtccactggtcccaggggcatccgttggcgcgcgcccaccgcaggacgcccaggtggccgccggtcgccgcggcgtcacacgtccgggcgtcccaggggcacccgcccgcgcgcatccaccgcaggacgtccaggtagcccagcctcgcggcggcctcgcacgtccgccggcccaggacgccgccgccgttgcgcagcgcctccagcaggcgggcgcgccggggttcggcacgggcggcgtcgcggaggccgcggcaggcggcgcccagcggcagggccgcccacgggggcatgtgcgacatgatgtccggcgaccccaggcacgcggcggcggaggccatggttcaatcgtcgaaaaacaaagactcgcgcagtgcgttatatgtccggcgtccggacacgaatattttacacgcgctccctctcggcgcggatccactcccgcgtcgcggggtgcctcgccgcagcggcctcgcatcgcgccgcgtcccaggggcagccgtgggcgcgcgcccacttcaggacctccagctggccgccgaccgccgcgaaggtgcacgtatcggtccaggggcagcccgcgccgcgcgcccacttcaggacctccagctggccgtaagccgccatatcgcacgtccggtcgtcccaggggcagccgtgggcgcgcgcccactgcaggacctccaggtggccggcgagcgccgccaccgcgcacgtccgggcgtcccaggggacgccctcgccgcgcaaccaccgcagcacctcaaggtggccgccggacgcggcgtctctgcacacattgccgtcccaggggcagccctcgccgcgcaaccaccgcaggacctccaggcggccgccggacgcggcgtctctgcaaatttcattctcgttccaggggcagccggcggcgcgcgcccactgcaggacctccaggtggccgccggacgcggcgtacttgcacacgtccgagttccacgcgcagtccgcgccgcgcgcccactgcagcacgcccaggttcccgccggacgccgccgtcacacacgtccgcgcgtcccacggacagccggcgtcgcaaagccactgtaggatgtccaggtggccgcctcgggcggcggccgcacacgtccggccgtcccaggggcacccgcccgcgcgcagccaccgcaggacgtccaggtagcccagggccgcagcggcctcgcacgtcttccggcccaggacgccgccgtcgcgcagcgcctccagcaggcgggcgcggcgggggtcggcgagggcggcgtcgcggaggccgcggcaggcggcgcccagcggcagggccgcccacgggggcatgtgccacatgacgtccggtgcccccaggcacacggcggcggaggtcgcggtcatctcaatcgtcgaaaaacaaagactcgcgcagtgcgttatgtgggagtccggacgcctatatttttacgcgcgctccatctcggcgcggatccactccgcaatcgcggggtgctccgcggcagactcgcgtcgcactgcgtcccggacgaccccccgggggatataaaaggggagtgtcgcacggtttgggctcacaacgcagttgtccagtccctccaatacctaccagcccctccaatgcctcgcagacctttcaaactgtgccggacaacgggttttgtgatgcccgagcccgagagcgagagaggccgggagaaccttcccgacgaccttgcgtgcttgatatcggacaaccttcaacccatggacctcttggcgatggcctttgtgtccgcgaagtggcgccatgcaaccggcaccacccgccggacccgtccccttgacatcccgttggcaccctgcgtgatcatgacctccgccgcgcgcgaggggcgcctcgagtacgcccggtgggcgcgcgagaaaggatgcccctgggacgagcgcacgtgtcaggccgccgccgaggcaggccacttacacgttctgcgcttcgcgcgagagaacggctgcccgtgggataagaccacgtctgaggccgccgccgaggccggccacctggacgtcctccggtgggcgcacgagaacggctgtcattggaacgtgacggcagccaacctcgctgcgaaccgcggccacctacacgtcttacgatgggcgcgcgagcagggcttgacttggcacgacggaacgtgctactacgccgcgcgcggcggccaccttgaggtcctccggtgggcgcacgagaacggctgtcactggaacgtgacggcagccaacctcgctgcgaaccgcggccacctacacgtcttacgatgggcgcgcaaggagggcttgacttggcacgacggaacgtgctactacgccgcgcgcggcggtcaccttg

SEQ ID NO: 176 - DNA, 21626 bp, unidentified
  misc_feature 1..21626: note = Fanzor polypeptide
  source 1..21626: mol_type = other DNA
cgcacacgcagattcagtcaaaggagattctttttattacttcatggtacctacataaaaataaaacaaattatgatttcctaccccccccacaattgttttagtgtattcggattcttgcatgcactgtcgcatgttcgctcctgtgtgggaggaattcgagatgagatataagtcaaagttcccattgtctaagatcttgaaaatcgaccgtgaccttttgagaaccgaaaatggtgcatttatgaccaaattgtcaaagtccttcaatggctacgtcccttttatttgcgtttttgacgcaaacggaaatgtaaacgagtactcgggatctaggacggtcgaagatatcgaagcgttcgcttctcagttcatgcttgacgccacgaccaaaatccaattgaaggcttcaactaaaaaaacatctggttatacttcttctggtaataatacatcaagacgggcatacttggaattgaagactgttaaggaattgaaagatatgctaagacatggcggatttactttaagtggaaaaaagaaagatcaaatcgatagattgtgtgaattgtctgtgaaagatttcagacaactttcaataaagtcaacggaatactacaatgaaaccgcttcgtgtacggcacaccttacggtgtaacctaatggtgtagcaacccacggggcagtggaacaccaattcgattttgaatcaacaaattgcaggatgttaacgagaatatcgtggttcttttttagatcacggctctccatcctgcagactccgtatcgttcttttgtcggtacttttgagagtgtccattgaaggaccagccgcacttaagcgatcgcctctttcccggtaccgtggcccaaaagaacacggggtctttgttgatgtgcaatgcgtcatgaaaggaggtttctttgctggacgggccattttgtaggaccatccactcgtacactataacgtctgtcgacgccttataccgtttattgggatgtttcattttactgttccgccgactgtagaggtacaacgaggaggaggttctgcaagtagtcaagctgactgtgtagtaggtacagttttttgtccaaaagaaaaatattgtaggagaccttcagcaagctgctaaaataaagggggagtcggagttgcctcgtttgcttttcgaaaatacactcggacaagggaattatgtttttgacatcgtccccagaccccgactaagttgggttcttcttacacacatcttctgataagacttcttcttgagtgtaaagctataatgtgtatcaaatatataaaagaggatgtctaactttatgcatcgtaaatgggggggggggggggggggcgtgttgcaatgtgtagtggggggagtgattgtctggtgaagtgagggaagtgggcacaagcagcatgggcaccagaagcctgggcatctactgggcaatccaccatccactagtgtgtgtggttgagggagtgatcgtctggtgaagttagggaagtgggcacaagcagcatgggtagggtgggcagcagggtgggcagtagaagcctgggcatccactgggcaatccacgatccactagtgtgtgtagtggagggagtgattgtctggtgaagtgagggaagtgggcaccagcagcatgggcagcaggttgggcagtagaaatgggcagcaacgtgtgcgatttcgagcctcgcacggccttcgtggtggagctcatatccgacgtgttggcgagtgccccggatcggcgtgtgctggtgttgtccgatcgaaagtctcagcttcagcatgtgcacgacctgctggttgcaaaggggattgcggttggtttctactggggtggcatgaagaattctgaattgaaggcgtccgcgtcttgcgggtgatttgcgccacgttcccctatgccgcagagggcatggacatccctgaactggacacgcttgtccttgcatccccaaagacggatgttgttcaaagttgcggtcgcatcactcgtttccgacctgatgctgctactactactaataatccgcttgtgatagacgtcgtggacacttttgcgggtatttttgtggctcagtcgcgtaagcggcaacgtttctacgcttctatgggtttcgcatttgattgattcatttggtggtcgagctggatacacttggctgtatgaatacagtcaacattattagtgtgcatattgtaatgatgattactacgattgggaggactggaatagttgataacattacggagtgcctaacctactcatttttgatatttttaaactatatcgacatttttttgatttgcatttgtatgtctcccaatcagctctggaagtttctgtaaaccaaataatgttcaagataaatctgtttgcttttatcatcgctttctcctttggaataggctactgttacatgatgtccccccctcccaaggttgtcgttaggtttccttcacccgctaatgccgggtctatcgtttaccaagacaacgccaaaaattgctttacgttcgatgctaaggagactgcgtgcagtaaggatgccattgctcagcctattaatgtagaggacttcaagggggaaatgtctggtaggaggaaatcgactcaatatcgtggcaacttacgataatattcttcgtcattgttcgcattcatgcagttaggaacatttgataccagcttacaataactgctgaaatacgatatgaatggcacaaaatgtaatcgcctatctactcgattattcaacattattcaacattagagacatccctgatgagagaagggttggctttaaacgcctccgataccaaaaatggttcgcagccaacagcaatgatgagaatggcttgattccctttacatccgccttacacaagcaggatcagattcgttctatagcacagtttagaatgggttcctattggctgaacacagaaagaatgagggtggtggatagagcacacatccctcgctcaatgagacactgtcaaatgtgtgggttccaaaaaactgaggatgaaatgcatatgtttgagtgccctttttataatgatattcgcctccgctaccagaatctgtttacagatatttataggcatgtccatgaggataccgacttaaccgtatggaatgtggaattctgcgattccacattcagaacctttatgaatggaaatggcactaagtctttttggagcaacctagccgactatctttctacttgtagaagagcaagacaggaagccctggactgcttagtggcaccgtaatttattatcccttttttttcttcttgagacttctcatttgttagcttcttacctccgccactgtaagtggttgagatctgggtcctgctctaaggggtttaatacctacgccaccaaaacggtggttgggagtttggtttgtttgtccttgacacacccctgatgtaatggggttttttgctttgtgggtgctttttctttttgtttaaagcacagagtctcatacaccctcgcggtgtcaagtagactttaacatgtaatgtaatgtaatgtaatgtaacggtcacatgtcccacaatttgtgtctccgactgtagtatcgtcatgctcgtcttcttcttgaacggctttgtgtattgccgctataaccgtgaggtcaaatatttgtcgctttgacgcagttcgacttcttgtgtttttgcggcttctcgtgggtactgtgttgcgtgcgaacttgactgcctcttcccagtctctgggtcgtcgaatcatttcattttgttgttgagtagaacagacagatggaacagctgtgtctgtgtgcgtgttatcgggcatgcaaatgatgcagtgttcttcgttggcgtggaagagttttttgaatgcggttgcgaagttgagattcccttcttgtgctcgtgtgtttggtggtaggttcttgaacgtcagcacaaatctgcaaaatatgttggagttattcgcggcaatgttctgtagcgtggtcacgaacttgtgtccgatgcgtgttgagtactgaagcaggaggctatcgacaaacctcactcggtatgcgcacgatttctttgttttgggagatgtcttggtataattctcggagtgcatcattttgtgcactggttgggtgctcgggacaagtagtattactcctttattgtctatgtttggcgactgcgcgtttacacaatctggatcccattccacgatgtctacttcgggttgggtgtttttccagtccatgacagcgtattcttgtactagtaggattcctgtgtcagacattgttccgtggccgttgcgcatgggtggcaagccttgaggactgcgttgatgaagtctgcgttagtgagtgtaaaggggacttccattttaacaaaaggattactataccttatgtaccgtatttgaagatttgcgtctgcacgatgatgcgtttttgcgatgcctgtgacaacatgatgttcatttgctcgtcgtcgcagtcttcatctggtcagaacgatgagcagcgtttgtactttgaatgtcgcaactgccagagcgtcgctcccgtcaaggacgcctgcatcttcgagagcaaccactcagacgaccggaattcttatgagcagttcatgtcgaagaacatcccgtacgacgtgacgctgcctcgggcacacaacatcccttgccccacgtgcagtcgcaacaacgatgatgacgatgggggatcttcctctgttctcttcatcaatctccttctattctgaacaacacacttatctcaaatgaccatgcttgtgagaaatggcatagaggtatacttaaacaaatgttgggtgtttgccaatctactacatctaatattatcatggaagagctgggtagaaccccgttgtgttttgcttggcttaaacaagctttgcgcttctggaacaagaccatacataaagaacctgaggatctcattagaatggctcttgaggaatcttttgactccaacactggctgggttcatgacttgcgttgtgctctccacaagctaggatccagtaaaaacatcaacattttggaggctgtcgatgtcgaaggtattatgtctgaagtttttgagtcatggaggtttaagtacccaagtgacaccaatgcagttagagatatccctgatgagagaagggttggctttaaacgcctccgataccaaaaatggttcgcagccaacagcaatgatgagaatggcttgattccctttacatccgccttacataagcaggatcagattcgttctatagcacagcttagaatgggttcccattggctgaacacagaaagaatgagggtggtggatagagcacacatccctcgctcaatgagacactgtcaaatgtgtgggttccaaaaaactgaggatgaaatgcatatgtttgagtgccctttttataatgatattcgcctccgctaccagaatctgtttacagatatttataggcatgtccatgaggataccgacttaaccgtatggaatgtggaattctgcgattccacattcagaacctttatgaatggaaatggcactaagtctttttggagcaacctagccgactatctttctacttgtagaagagcaagacaggaagccctggactgcttagtggcaccgtaatttattatccctttttcttcttcttgagacttctcatttgttagcttcttacctccgccactgtaagtggttgagatctgggtcctgctctaaggggtttaatacctacgccaccaaaacggtggttgggagtttggtttgtttgtccttgacacacccctgatgtaatggggttttttgctttgtgggtgctttttctttttgtttaaagcacagagtctcatacaccctcgcggtgtcaagtagactttaacatgtaatgtaatgtaatcaagtacgacggtgacctgaagttcttgtacttttgcgaacggtgcgacacgttctggaaagcaggtggaggtcgctcagctgccgcggattctcctaaggatgctgccgcagattctcctaaggatattgtcgcggattcttctaaggatgctgtcgaggattcttctaaggatgctgccgcggattcttctaaggatgctgctgcggattcacctaaggatgctgccacggattctcctaaggatgttgttgccgcggattctcctaaggatgctgccacggatgctgtctcggattctcctaaggatgttgttactggcattgatgatgtcgtgggagagatgaagtctgtcagtttcaggtcggtgtctcgcaatcggaaagctgtccccgcacggaaaaaagttgtaaagaaaacagttgtataaaggcaaaaaactatcgacacagagagaaattacctttactgcttatttgatgtcttctttcgtcactctgtcttcttccctgactacttacgagcgcgccaaggtaatcggtatgcgcgccaaacaaattgctaggggtgctcccgcattgatcgacgtcccccgcatgatgggttctcgtcgttttgacgcttgcaaggttgcaagcgcagagcttgacgctggattgctgcctcttgtggtcgctaggactttatcagacggcaagacggagctcgtgcgcatttttaagtcgtcctcgacttcatgattttttggcgggcaatcaatcaatttcgtcttgagaagatgacaaccaatgtagcgaggagtgcgatcatctctattgcagcatatacgtgcgcacgtttctcccacgagtgtcggaccatgtctcctgcaatcctcgcgacgggtgccggtagatcatcgtccacctcaagcgctgcatcgaggatggcgactgcttctctgtgccatcgtgatacgcacatgccgtacgtggcgctgaagacgatgattgccgcaactagggaagctatgacgagacgggttgctccttgtgccttggtcgcaaataggaatgcggctagcgcaaacccaatactggacaagaggaacatgttgcgtgctccgctgtgatatgcgctttgaatctgtgtacagcttttcaatgcagctcgcatagccttaccgaccattgctggataatttgcatttgtttgtggtggaacaacgccgcctgtattcgttaggggtgttgcttgcatcattgtacacacaatgtttgcatttggaggacaaaaaaatatgtaaacctggtttcagatcccccacccagagcgtcccaatgtggctgacattcgcaggttcaaaaaataaaatgaaaacaactgtattgtgtctacatcatcaagaccgcatgccgagtaatgctggatttccgattcgcatgattcaccctacgatcgtcttggtcatgtggttcctttactttttcgtcatggcgtatgccgtctggttccaattttgggcttggaacattgcggaaaagtgtgagaagatgggttgtccgatgggtcaggataaattccttctcatgtttcttcgcgtcgcgcctgctttgcttacgctgtacgtgatatcccagcttgcaggtgtggtagggttttggttggacatatcggtatttgtcttgttgatgagtttcctcgtttcggccaaggtgttcttacataagaatgcgaagaggggggatgcgtgcagggactgtgttagtaatgggtacacgaacgacgtcgcggacatgttgttctacatattttcatgttttctagttatcttcacgattggttgtatcgtctggatactcaaggggaaggggagtatttaagaattagaaagtgctaatgaggaaaaaatgatataatgcaaacgcaatgaagatgctgatgcgtgtccatttgatagtcggtgtaaaaaatttatatacaaactctctgataatgaagattatccatatcagggagacgacgaaccacgttaatgcgcgtgcgctcatggacatggatcccgacacgccgaatgagtcgacattaggtgacatgaaggtgctcgagctttgttccatgtccgggaacttatgaacttctgtcattgaatcaatcggtctgatgttgttgccgtgttaaactcgtcgaaggtaaaaaaaaacagttgttctcaaataattacttatttgcgacccttgcaatccttgagcaatgacacgatcctggggattgtgaggaggaggcgcttttggcgctggatctttttgtgctcgatgtacttgcggtacgtgctctggatcttgcgcgccgagcaaccactgggacgctatgttctgtacaaagtcccattcctgattggcgagtccatcacatgacatccaatcgatcatctcgtcatccacctcaatgaacaggctgcttacaatcttgcgtgtgagggtaacgtaatctacggaacaccaagaagtgtacgggaagacggcaaccaaaccaagaagcatgccttggaagcggggatcgcatatgtattcgtccggcgagactgtcatcagattgtcgataaacagcttggcgtggtttccgtcggtgaagtcgttggcagtcattcctccgtggcggacagacacctgttgtatttcgttgtcccacgattgaacggcgagctttgcaagtacctcccaaacgcgcgccatgggcggaatgagttctcttgcgcgatcgcacaatggatccaacggaacgccccaagtgacattggcaacatcgttgtataattcagtaaagtttgccattgtgtttgtgggtatttgtgggtatttgtgggtgtttgtggttatcggtttcttttatgacaattcaattttttttcactgtcagtattttacatgacagcctatattgatgcgcacgatgttagccatcagtttgacttttcagggtactttgaacatgtaaattcagtgtctttagatgccttgaattttttgtgtcaatcacctgaagacagtatctgtattgacaagatcggttacaaatctggaattggtcaacttttcagaatccccaaaatagaaggtgtcccaatatcaaatgtccctacagtcggtggaacagtaaaatgaaacatatatcagatggaaataaatgtacgacatcgccgttagaaaattggcgttaagaatggtcgatgacttgggtgtgttaaaaacttctgtgtttacgaacatcagtcgttttactctgtggatgtggaaacgcttttgtgtaaatcgaaaacgacgtgaatttgtaagcaaactttttgagacaaacaaagatttgttgaaattgtttttattgtcaactcaatgcacaaccgcaagaggtgttgttgcatttttcaaaagtactcacaatttacgattatcaactaaaacagtgtatcgtttcataaaactcattggttttacaagaaaaaggagcaaactccgtggacagtgtaaaggggacttagttccacttgacactggattttgtagtagatacaaggatacaatcaatgctgggaaaattttagtatcagttgacgaatgtgggtttagtgagcgtctcaagccacattatgggtattcccctgtaggaaaacctgttatcgttaaaactactggtgggtgggtacaccatagtttgttgatggcagttttttcagatagtaggaaggagttcgttgtgaagaaaggatctgtgaagaagacggacttcgctgcatttattgactcattgagtttgtgcaataattcagtagtaataatggacaacgctagtatccataagaacttggtcctcagaagccccgtaaatagttgttacactccttcttacagtccagaattcaatgctattgagctgtgcttcgctaaggtgaagaaggactttcgtcgattgaactatataccaaacgatacaaagatgcacgtgtctgatatgatttccttagcattcagcaacctcactgataaaatcattatgggttgttttgaccacgtatggaacacgtatgtaatgtttgtataaagagttctgtgatgtacaaattatgtaagataacaacgaaacctccgacagtcgcaaaattgaaggagctactaaaattggccgaagcagcatactcctcaaaggacaagaaggacgatattgtccgtttatgcgaagacaatggtctcatcgccagaccccctccagagtacaagacggtggaaaagatgtgcgtcgtgaaatgcgccctgaagaaggcaatgagccttgacgatgaagaattcggtaagttcagggggcatgtggatcagctcgtcaatgtggtgagccgcatgttacggcgttccagtctggcgctgactttccatgtcacgaggctcatggagggcgacctgccgattcctaatatgtacgatatgaaggatacctactggaaggattggctaaggattggagttgacggcgtctttccagatgaagagagtagaatatcatacgaagccgtgaaagacgtaatcggaaaggtgcttggtagcgatgaccctgactacatcaactcctaccctatctatttcgaccaggttttgaactatgcaggtcacacattgagcactgtcgtgttgaacaacgcatgggttcctttggtacctcgtctgacccgcctcactaaggctactttgaatgcactgggagctccgaagaccatctgtgtgtacgacgtgatgagggtcatccaacaggaaatacaggagatggaatcttggccagagtctgttaaggagtacgtccgtgaagttcgagtcaggctgaaagttccagatggaagtcgactttatgatgactatggcaaagacatggacttcccgaccatggtctggttcaattattggatgcagacacggttggaggctattggtgcacgtcgtatccggttgatgcccatctttaatgtccaacgggcgcatgtccgccttgacatgaagactctcgtgaacctgttcaggcacgtgttccccaaagacccaaacatcgtcgagctttcaaagtgggcaaatgtaaaggatcccgaccgcttcatgttgcctctgaagcctgcagttaagaagaaaaaatcatgtggtcctggtgaatgggaggcatacaagttggcccaacagaaatacgatgctgacgttaaggatattaatgctactgacgagtacagacatgcaaagggtaggtatgacacgctcgtgaacgcccgaaaaatagtcgcaggttccttcttcaagaaaccacctgtcaagacggggtgggtgttcgattgtagcatttgtactgacggagtttcattgagcatgcagtacagcaagacagtacaggttcgtgtatccgatctgaagaagacaagtaagaggtctcgtgacgaggaaggcatgatcgtctcagaacagtatgaccataaactcaaaacgacattgcctgatatgggtatcgttgttctgggtgtggatcctggtaggagcaacatcgctacagtcacgtatctggcagacgacaaaagcaagacatggaagcttacacgcggagctttttaccacaagtctggtatcaagaaacagaaaaaacagcaagaaaacgtttctcagacataattcctagatgggagtctctgcgtgaaaatggagcagcgttgagtacatccaggaaggatgatatctcggcttacttgaaaaattacgctacgttttccgacgagtggtggaggatggcactccctcgcagagaatcccgagacaactttcagaggtacattggcaagcgcaaggctatggactcattttgggcagggatcaagcgcaacatgaagttggatcatcctgacctgagggttcgcgtagcatatggttctgcaatcacgaagctgaaggctaccggaccaggagaggtagctgtgcctacgggatctatgttcgcttcctgcaagcgcctcttcaaagaggaggttcatgtgacagatgagttcaagacgactctcatgtcttgggaaaccggtgccaagaaggaatgtgtttacaagattccaagtgtccaaataaccgcggaaggtcagattcgtctaggttacgagttgttgggtcacaccccattgaaggagactccaaaggtctcttatcgcgaccagttggcggtgagggtgtactgcacacataaaaaaaaatccaagaaaaccacaggaggggtggcttagccccctctcttgtcgacaacaaatcgatcaagcggtaccctgaggtacgaggactgcgattctctccagaaaccagcacttactcggaccgggaccgctcctctactctcacaatcgcaaggctgcactgcatggaactgttgggtcaagggagaccgcttccattttgcagggatgcgtgttgttgatgggctacaaaaaaacatgatggtgttccactgcaatgtgggttgctacaccataaggttacaccataaggtgtaccgtacactccagaaagcggtttcattttagtattccgtcgtgtgtagctgtatgcagacatatgtttcttcaacttgctgcacccccctacgtttcccaaaagcaacgatctgcagtctggatgattataaggtgtcccactttatttgagaactactttatatagtgtcagtcaggtattattcatgtatgaatcccctaagaatttcatcgtatccaatacggtgaaaagtgatattgttttggtaagcggaacaactatttccatcgccgatgtggagtgcaatcctaagtcgacagggggattccgagtttgctttcttaacgtgagtcgctgggagatccccacgtctcctaccccccttgacaacgaaggggctatgattttacgttgcctccctgacagagttataaatctgttgtcgaagctggagcccgacgttgccttgttccaagacttcggtccccttccggagtccatcgtcgagctgacgcgtgcgtacatcggtgcgtctcgtggcaatgttagcacgactcgcagggcaggaagggttggtcgtgtgcgcgttgggtattcggagatagacgacatgttgagtaagttggcattgttgccaactgatgataaggaggcgtgtgtagatggtttgagtgtgtattcggcacgcgacattaagttgttgtcagctagttcctcaaaatcctccgagcgttttcgaaaggttctggtacagaccggtaggcccaatgatggaggcggcctcgtgatttacaatgttgggcttggtgaccgctacgagtccggacgtgcacaccccaaacagaaaggtgctatcatacagagtttgtgcgacgacatcatagatgagcggagcaaaaagggtgcgagaatgatcatggtcatcggtgatttcgggaagaatagtaccgctttgtctgacaatctccgcacatgtggaatgattatgctgaacgatgacacccccacgaccctagacggaggtgtttctgacctttgttgggtaagcatagagttgtaccgtgcaagttacatccggcctgtgcacaatcgggggcaaatagttattccccttattgacgtgtgtccccaccacttccctgtgtgcttggacattgtctggcactctgagaatgatgatgacgcattagccatgctttctgtatcgcgttcgttgctagagagttgtctgttacacacgccgggtgtagatcgcatcggcggaatccatgtccgtgagaacttttcttttgatggaagaagttcgcggaaaggcaattcctacaagaagaagaattttggaaagtcatcatcattcgtaatgttcacgaactttgtacatacccaacgtgtgagaaccctttcgataggcgacactgctggtgcggggttgttcccggccttggtggaaggcgtgctgtcatcatacggtgtgtttgtggaggctgtaaatggatggtgggtcctcaacgttacggggcgcaaacacgtttgggggtacatgatcaacgtccctgaaaaggtgtgtgacaacatggcgccgctttatgtccactattgtaaagagtacattccgatcgattacatcgagtactcacgttggcttgcattgggtcctgcgcattctaaaaatagtacaagtagtgtaatattattgcctaaggttccttcgtaccgtcattttgtgaataacacgagcgacgccttgtgtgacttaatccgcgttccttcgcgtgggggtggggggttagtgcttcggtttgatgtgaacgcctcgaacgatcgttacgtcggaactatggagggtatttactcatctgcgaccgcctctaagaccctagactgtttgaagaagacgccgcgagtgtggacgcgcttcactgagttgaacatcgcgcttgctgtcggtcgctttagtagggagactgtggcgttttcggactttcctttgttgtgggagccaatttttacatactacaatgaagtcctcacagttgcgcgaaaaaacataaagcgtctgaaaaacgatgctgaggatgatgacgtgttgcctccactcatcatgttccgttcccaaaacccctcttaagggtttttgacgaccaaatcattcggggatcttgtggagggtgatgtcgttgagacaaatacatttacattcaccacttactcatcgcatactcagtcgatcgtcctgtccaagtcgtacgacatggaggtggtttacgtcgtccccacatcccttatccctgagcttttcatattgtccagggcatcgcagagcatggggaagattaacaaccttccgtgtctatttctccgtgaggagatcatgttcccgccttttgccttgcacagggtactccgtgtgtgtaacgggtatgtcgagactccgaaggggacttcgacgaacatggtccacagcgggaccggaggcgccgtgtttgaaaagatccggatgtactggtcggacaaaaccaccgccgaggagtcttctcgtttcctgcgttgcttcgtcgtcgtggagatgctagggttttcaaagaatcgtatttcggagttcgaccgtgtctacgggacggacttcattactctttacaaatcccgcacgctcatttgaaatgttgcaacaggttaaaaaaagattgcgagagaagcaaagcaatcaaacatggagggcgctcaacaactcgatatatccgacgacgcttggagtgcgtctttggtccctcatacttcctacacgcgcttggcatgcccccttctctccagcccatcgctcgctcttttgccaatggtgacacccgaggacggtctctcgtcccggcgcacggtcgccgcagggagacgtaacaacgaatatgatgaggatatgtgcgagtttctgagaattcgcttcactcctgaggacgttcccgacgaggcgggattcctgatgcgccacgacgtgaacaggatttccttcgatttgcgtcatgcatctctttcggtatccgagacggctctggacacgtcggacggtgtagtgtgctctgtaactaggacggtgcgcgtgttgcagacgcttccttgtgttgcaatgcagactctagatgtgacccgcgccgtatcagacaaagcgttgttcatagaccatttcgtctgtgcaccgatgtcatatggtaatagtgctgcagcgtggaccttcgacggctccctttacaacacctttgcggcgcagaacttcgtactaagcgccgcttcctcggactgcgttagtggtggtggaatgctcgctgcttcttacatggggttgggtgaggtgacttgcgaggggttcaatgtcattccaggcgagggtgcaggaagcgaggcgcgtgttcgttttcgtgtacctcctgaaacggagtctttcacgttgcacattctgtgttgttgttcaggaggaaagaaagcgcgtgagtccatgcttgcgttgcttcgcgcaggtacgtccgcaagcagtctcgtttcgcgtcacgacatggcatgggaagctctgtggcagtcaagggttgacatagtgtccaaggctgcagggatgttgcaggaggaaacttccgcattcatgcgtgaccttttcactctgcgcatggcaatgtaccagcttcacgcctcttgtggaggcttgatggacctttcgggaacctctgcgttgggggcgtcgtgtgtgcatgtggcgattgcttcgagtctgcttttgcctacttatcgtggtcaggatgttcctttatctcgtctgcatgaagatggtgttcctgagctgggactgacgggtttgtacctggacatggtcccatggtcagatattgggcgttggtccgacctgcgacgggcgctccgaggtttttgttgccaatgcgcgatggtttgcgcccctttgctggttgtatgcacgctgtgtccctttgggatacctaccatcatcgggggacactggttggcttgcgcgtgtggcattccccgtgttgtccaacgtggctgatatggtttgcattatggctcaggtgggggaggctcaatcgacgtatccgtactttataagataccaccttccatcggggttgttgcaagggttcgggggggagttatctggtgaggaccatgtgttgagcgttgcttcagctgtgactgctttgcgggctgcttcacaagcttgtcttattgtagcaccttcggacattcgtcgctatcgatggaccgatgtttgcgacggtctcttcttgccttttttagacggcgcgcctcctcaggttctcgcagttgacaattcttcttctgatattatcgatttgcgtaccttgggggatgtgttgcttcctctgtgccatccttcgttgcgtgtcgctgtcagttctgtaggatctcaggtggacgctgttctttctgatacattcgggtattggtttcctcgtttgtcatgggataacgtcggggaattgtctcgtttgcctccttcagaggcgcgctctaggcgaaggcggcgtgcttgcaacttgttgtggtgtttgcatgcgcgtgcgcgtattgcgcaacaaagaccttctaatattgacggttttgtttctgctcttcgggagtttttctccgagttccgtgacgcttgggggtgcatatctatcgacgaggggttcggggctgacctagacttgtcttcttcgcttctccttgtcattgtggcgggtcttctgggggcgtccatcaacggcgaggttgcggacaacctatattattcggaaggaggagagggaggcgtagggggggggggggggtgtctgtgtctacgagcgcggtcatgccatctacttggcagtttgtgtctctgttgggtgccggtggacggttaaataaggactcgcatgtccctaaccgtgtgttgttgccaagttcggcgttggtatcctctggggtcgcgtacgaatcatggacggtagagtcatcgacgacgatgcttacgcgtccttgatacatttttacaggcaccagttgacacaataaggtgtaccgtaccgtacactccagaaagcggttttattttagtattccgtcgagtgtaccaccacaacaccaagcgcagtttttagaaaatttggactgtccaactgacacagtaattatacttgacaacgtggcgtttcaccactccaagaaggtcaaaacacttgcagcttcaaggggggtgggagctcctatacactcctccttactcaccttggttcaacccaatagaaggggtgttctccatcgtcaaacgcgatttctataaaagccaagatgtgtataaggctttgagttctgttaaagagaaacacgtagaggctttttttcgaaagtcattgaatacaatttctggaccttgatacaaggaaatagcgacattggctactaaaaggagacgatagtcaataaagagcccccggacaagcgtacgcgaccggaccgggcggccaaatttaaggacaggaaaaacggcgaggagagcgtggtaaagtgtacactgagtcggatcatagcggataaggacaacaaggacgttattatgaaggtgattaaggagcgggtcgacagcgtatccaagaggacttatcttgccggtgttgcggtgaaccggatattaaaagaagtcttcgaaggggtaccagatgcgcaactgcacactgtaagtgtccctagcgtcgaccagaacttcattcggcagcttatggtggggtcgagacaggcgcacatggagacgagggacgccacagtcgaaaggttcttccacaacaactattggtttagggagaagattgaggggcgcgaggtaattgtgaaaaagaagaaacaatacgtgggtgccatcgctcgctacgatggcgatcgaaacctgtacagccacgcgtcgaagaagtacctgaccaacttcaataaccactacagagtccatctctccacatggatcaagaagctcgtttactcgaaggaaaacaggatcttggccaaggagatcaaagatgagcacggcattgacgagaccgtattccaccgatacctcctctacgatatccactcttggggagtaaaggaagacctcatagagatacattcgctcctaccggagcgaacaaagatgttgcttaagattcagcactcgatccgggacgagatcaaccgacagtggctcaagagcgtttccaacagcgccaagatgatccggtacaacgtctttatcaatcgatacctcgaggccacagaggacgagggctacgccaagctggtcaacatcgctcccatcccaacagtcaagcacgccttcatcacgatagacaccgacggcctactgggcgtcctcaaggacgtgggtctcatcgagcgtctcgaaaagacgctgacgaacaaggagcactgggagtcggtcttcgatgtggaaaacatccgttctactgggaaaggtgtgtttacatgcaccatagacactgacggcgtaatggcttgtacccactttcttagggccgagaagaaaaagatttcaatcaaggacgacggaacagcgattaagaagcagaccaagacgctccgcgagttctccgagtccgaacccaatgtggtggtcgttgcaaacgaccctggccgctgcaacattgcctttttgacttggaagaaaaataaggtcgaagaaaaagataaggggggtaggaagaggaagaggcactgcgagttcgggagcaagagactcacgcgggagcggtactacgttgagagcggggtcttcaaatcgagagggccgaccaagaagtggttgtccaacatccaggactgccttgacgacctgaaggacaacagtcccaagcgcacatctctagtgtcgtttgacgcttacgtgactgtaatggtcaaccattggggttctcgatggggggagatgtccaagtcgcagtggggcgcgcagcgcctgcggctctacggtggcaagaaacgtgtattagcacgcttcttcaacgaggtccaggaggatgtcggtgagaggaaaacaattgtcgtcgcatacggttctgctaagtttgcccctggtggcaagggtgaactttctgtccctacaacgagcgcgttcaatgcgtttagcgaccgtttcaaaaggcgagttgccgtcattgacgaattccgtaccacaaagatctggcacaaggacagcaccaccgtcctccagagtgtgcagtccgaaaaagaagggcgcacggttcgaggcttgctatggtgcagttccaccatggagaacagcaagttgtttgtaaaccgtgacctaaatgcagccattaacatccacaattgctttacaatgtacccaatccgccccggaattcttgcgaggccgaggaaatattgcaaactggaagttgtggtaggacgcaaaattgattacaagctgacaggttctttacagaacgcagtgtcgagcgaagtgtagaagataaacacatacaagaggactttggaaggacttgggatattatgtaacataattcccttgtccgagtgtatccacagtcatcgaatggatcgacaatacgtatggtatcgatactcctctcatcgcgtcgggcgccaagtgcttaacccgcggtgtcagcatgcgatcagagaaacgcgtgctgactcacatgattgtcactccgaccgagggcaccaacgtctgcgacgtccaccagacggtcatgcgctgcggagggcatactatcgacgtgcgcaaggagaacggtttcgaatacgaggtcaagacgctgttacaggagagcgaccaccacatcatcgtccacctgttcgatctggaggtccagtggctcgagagcaagatcgtgcctggcgcgcaggaggagtggctcaagaaccgggcaaccaacgtgatgctgatgaaaatgatcgaaagccgtcctctcgcatcttggggatccgggaagcagctcgcgcacgacatcgagcaacagagctcccaggcgaggcgtggctccgtgccgaacaagacgtacacagcgaagcgtgctcgccaggatgcaaacaataaagcaagggataacaagctcgacgagcgcatcgaacaggagcgcgctgaccgtgcctcgtacgaggagaacaaggacaaggccctcagcaccatcgatcccggcgagctgatgagcctgccgatggcggttcgccacacggaattgttcaagcaccagggttacgtgcagacccccggcgtcatgatgaccgatgtccccaagaacgacgcatcctctgccgcagccgcaaccaaacatgtcatctccatggtcgaggacgagctcaagaaaaacaatcccgacttcaagttcaagctcgccggcaagaatcaggagtcgaaattcttgatgtcttacaagggcaacacgcgcctcgcgggcaagactctgaacgactggaacaacttctacaccgcgtacatcctgcgaccagtacagagcaaccccaacgctgcaaccggcagtgtcacgcccacagccgagtgggagttcgtgatcaaagacggccgcgtcatggccaagtacaaagagacgcacgtggaaccgcctgtcatcgcatccccccgtgagacgccagagggtggtggtacaccaccaactacattcgatgtatggatggacatgatacgcaaatacgatggccacaaggagctgcagcgatatttcacacctgggagcaatggcaacttgtacgtgtcgcttctggctctgtcagtgtaccacgccgacactgactggtcgctgggcatgatgaggaaatatggctatgattccatatcaggccaccagcattgtttgaaatgcaatgcggaagggccaaaccgcttgctcaaacctgtgcagtgcgttggacgtgtgcattcgggaacgtaccatgccgttgatattcggaagctgcagcagtcatgtatcgagtactgcatcaagatcattcgtcgcaaccagatcatgtgatgatgtcatgacttggtccagtttttgggaaagcccatgagggcttctgtccacgtcgggttcacggtgtgtgtcccacgcaacgatatgatatcgtccccatacttctccagtgtgagccgatcgtgg

SEQ ID NO: 177 - DNA, 19696 bp, unidentified
  misc_feature 1..19696: note = Fanzor polypeptide
  source 1..19696: mol_type = other DNA
aattattacagtcgacggaatactaaaatgaaaccgcctcgtgtacggcacaccttacggtgtaacctaatggtgtagcaacccacggggcagtggaacaccaatacgattttgaatcaacaaattgcaggatgttaacgagaatatcgtggttcttttttagatcacggctctccatcctgcagactccgtatcgttcttttgtcggtactttcgagagtgtccattgaaggaccagccgcacttaagcgatcgcctcttccccagtaccgtggcccaaaagaacacggggtctttgttgatgtgcaatgcgtcatgtaaggaggtttctttgctggacgggtcattttataggaccatccactcatacaatatatgattgtcaccaccttataccgttttttggatgtttcattttactgttccgccgattgtagcacatggctgtgcgacaaagtatgtgtagccagttgttctgtgtgtgcatgcttgattggctgaatgtgtttgtgtttgcaagtggttgtcttgtgcatggtttgccagatgtgtgtgtatgtgcgtgcaccgtgctgtgtggcaatgcatggatagacagatgtgtgtgtaagtacttacgcagtgctgagtgggtgtgcatgtatagccacatgtgtgtgcatgtgcatgcacagtgctgtgttgcggtgcatggatagccagatgtgtgtgtttgtgcacacaccctgacacacactgcattccccatgaaaccccattgcacagggatgtccgtgaagtccatcctgaagtcctctcgaagaggagagttgttgatgtgcataatgaccatctcgattctcatgggagcagccttcattgaggttaacaccaaaggaatcctgcacgctacattcaacccaaaagcagatttcttcacgcaacccctagtgagtttgttttttgtgaagtactttccttgtcaaattcataggttgtgccttgtcaaattcataggttgttcttgattgtaatgttactgtaatgtcaagcacttgtgtatggtcatactgaatcaattaatggatgatgccttggcataaacttatgtgtgaattgacgaattcattggcaattgtcagccctacttgtaggatgactggtgcagtgagatgtgtcttcaaacagggttgtgccttgtcaaattcataggttgttcttgattgtaatgttactgtaatgtcaagcacttgtgtatggtcatactgaatcaattaatggatgatgccttggcataaaattatgtttaaattgacgaattcattggcaattttcagccctacttataggatgactggtgcagtgagatatgtgtcttcaaacagggttgtgccttgtcaaactcataggttgttcttgattgtaatgttattgtaatgtcaagcacttgtgtatggtcatactgaatcaattaatggatgatgccttggcataaacttatgtttgaattgacgaattcattggcaattgtcagccctacttgtaggatgactggtgcagtgagatgtgtcttcaaaaagggttgtgccttgtcaaattcataggttgtgccttgtcaaattcataggttgttcttgattgtaatgttactgtaatgtcaagcacttgtgtatggtcatactgaatcaattaatggatgatgccttggcataaacttatgtttgaattgacgaattcattggcaattgtcagccctacttgtaggatgactggtgcagtgagatatgtgtcttcaaacagggttgtgccttgtcaaattcataggttgttcttgattgtaatgttactgtaatgtcaagcacttgtgtatggtcatactgaatcaattaatggatgatgccttggcataaacttatgtttgaattgacgaattcattggcaattgtcagccctacttgtaggatgactggtgcagtgagatgtgtcttcaaacagggttgtgccttgtcaaattcataggttgttcttgattgtaatgttactgttatgtcaagcacttgcattgtcaaacttaatatactctcattcgtcttatcttatttaatgtatcctttttttttgtagactgacatccgagacgctcgcgtgaaggcgtccaatcccgattcaagtgcgggctgtatgtattacagaattaaaaccgaaattctgacgtacgccaatgagaaccatcttgtgtgcccattatgttgggatatgagagtgttgggtcctcacatgactatatttttggataaggacatctctgctgtagctagaaaggtgttggagttagtttctgatgcgtcaattacgattgatatgcacagatacactcccactattgtctccacatcgtgggagatattacccacagaatccgagctgttcagaatcattcaggactccttcgattctgaagagaagtttaacatgctttccgagaaaataagaaataatatccctcatgtcactaaattgaatgtcaaaaatactgagtatttcatcacacgtgtgtacttccaaaccacattatatttattgcacaacaatgatctagatagtattgcgaaggctctatttatggacgctgctgcagtaaatatccgccctgaccagaacatacttatgaaaacgatgttgtttctgtcaactcaaggaggagatggaactggtttacattgggatattacccggggacttaatgtagctttctcattgacccctggtgtgactggtccattagcattttggatttttgtcctcccttagggatttgaagaatttattgcttttgtgcagtctagcaattgtgtggaggtcgtcagagaaaagtttgaggaagctattagactaaaaactgacttccccttgttgtcagcggatgaaatgtttcaattacatcgccaagtccccaacttggtccgaattgtttcccaaagccatggacaggtagttggctccaggatgggttcacagtgttaacgttttaccaaattggaagctagcttttgatttcgagagattggaagagttccctttatatgcatattacagaaaaatatttggatctggtttttttgaagacaggtgtccagaagattacgtcacactggatgcagttatcaaagacaatgttgatatgatgacgaagggtcatgtacccgactcgttgacacaagtaacctaaaatatttgatcagagtgggttgggtatttgctcttgtagttacatttttgtcccactttatttgagaaaaactgtgcccaatatttacacaccgacacatgtagctcttgaacgcaatttcgtaaaaaatcttaaattgactacaagcttccaagcaccagtatcacacttctatcgttcagtcgacagagtggcccagatttccctggcctcatcctcaagatttgccagttcctgctctgacaactctggcacacaatccgatggcaccgtcttgactgtgacaacatcacagaactgagaatcgaacccgtccatctgcactttctcctccatcaaaccacgttgtttcaccgattcctggctcagcggtcccggtatgacctctccatgggattgcatctccgtaagaatgatcgtcagcatcactgcagctgctgcaatcgcttcatccaatggctccccaccaccaatgacggatgacaatccgggcacccacacctcgtggaattcgaaaccgtcccttgagcacttgttgtggacaccaaagaattcgtacgaatcatcttactcaaaaattctggtaatcatggcgatcgtcgtcctgcaaggagtaacctatgtttacgctgtagaataagtgggagctttatggcgccggtgaaataccactacttttaacgacaccttgtattttggggattctgaaacccagcttcagacaaggccctttggtaaaagagaaccagaacaagttcagtaaattggcgtgtttttgtgtttccgtgttttgcatgagccgccgcatcttacgcaaccgctttcactgtggtaatggggtcatccaaagaaaccgaacaatcccaagcagactctattgggtttcttaaggggggctgtaaatgcggttgcgtgacatgacaaaagcggctttaatcaaaggcgacacttagtgttccgtgtacgcctcgaaaaacgagtatctgaccaagcgatgatgttccaaatgtccaccaagtctttgggagagagcgacctctcgcgtttcgccgagacgctccgagaagaagctcctcgaaaaccccaccgacacctgatactgatttggggacacagacggttgaacggtttaccaaagaggcgactcggaatatattttcaagaacctcttcaacttgctgcacccccctacgttgcccaaaagcaacgatctgcagtctggattattataaggtgtgtcccactttatttgagaacaactgtaccatccgatctagcagatgtaagtgcattcactacctccatcatgctcacgtctggacatgagctaggcatcacacccacgcatctcttcaatacggatcctgtcgagtcacgtcacacagcgaccactctcatcaatgcggatcctgtagagtctcgtcacacagcgaccactcccactgtggtagggtcctccaaagaagcaaaagttcctgcacagggcacccagatcccgtgtaaacacggagaggggatcactcgggaagaacaaaaacggtcccatcattgtcacgggaaaaaaacagaggcatatcaaaaatatacaaaatgagacaaaaaaagaggttttactaactgagtaactaaagcggctggaagacgagggacatggagcgaagctcaattgcaagctcgttgagcgtagcttgcttggtggcgaggtacgcctcacgctgtgagggagtctgtttcatgcacgcgaggtgcgcgcacgtgcccagggtgaaggggggggcaccaggggtgcaaacggtaacctgacggcggctgcaagggttgcctttagtggtgacagcagtgcagcccagggtgggggaataccccactatggtaaatgcacctatattggcaccaacctgcagctcgttcttcagcggggccccgcgttcaacccgaccggaggccaaggaggaggagggggagcccgtggagaacgcgccagcagacgtggcggtaccactagagagggcaggagcaggaacagtagtagaatcagtagaagcagtagaagcagtagcagccggagcggggttagtagcaaccgtggcgcgggggcgcttaccgctaccgccggaccccatgccaacgtcctcggtggtttcgtcgtcctctgggagggcgatagcaatggcatcgattaagtataagcagcagggtgaagtagaagcagcagcatcttgggcagccgcagtagcgactgcaactggtagcaacatggcctggagaggccccttctcccctttcggggaatcttggataaactttctgtgcgcaatcttcattgtgccgacagagtcggcgaggcacttaggcacgctggtcaaggaaatgataacgttgcaaatgcccttcaaatgatggacggtgacggtttgggatatcttctttcggtccttcttctggacgaagtagaagatatttgttgtatcgacgaacgcagtgatctgggcagacatggtagacatgacaaaaaatttggggaaacgagggggagagaggagatatttgggtttataagttgttgttgttgttgttgttgttgtgttttcaaaatgcgtcaatttttttttatcatggaacaactgttgcaaccctttaataattgaaagggtcacggcgacttctcgtccactcgtcatcgaatgaagtgtaaacaaccattcattcttcagtgacagaaacgaatcaatttaattttccatgagttcctttgacgaaatcaatggagatgtattggagatcattctatccaatgcgatttcgaacgaatgccacctcaaacaagtggttctcgtttgcaaacagtggagatgcgtcgcactccggtgtgtcacaaggatccacataagacattataaaagtttggactacgtctcacgcatttgcaggctccaagagttgaaaatctgtatcaatcgggggaaagacgtaccctacgaaaaaaggtcggagatcgaagacgtgctcgacatatcacctctgtccggactcactacgttggttcacctggacatatcgttcacctacgtgaccgacctatcacctctgtccggcctcgcttcgttggttcacctgaacatgtcgtcgtccacacgtgtggacgacatatcaccactgtccggactcactgcgttgcttcacctcgacatttcgtacacctacgtgaccgacatatcaccgctgtccagcctcacttcattggttcacctgaacatgtcgtccacacgtgtggacgacatatcaccactgtcctgcctcacttcattgattcacctgaacatggagtacacccacatggtggacgacatatcacagctgtccggcctcacttcgttggttcacctgaacatgtcgtccacacgtgtggacgacatatcactactgtcctgcctcacttcgttggttcatttggatatatcgtacaacgacgtgggcgacgtatcaccgctgtccggcctcacttcattgattcacctgaacatggagtacacccacatggtggacgacatatcaccgctgtccggactcacttcgttggttcatctggatatattgtacaacgacgtgggcggcatatcaccgctgtccggcctcactccattgattcacctgaacatggagtacacccacatggtggacggcatatcacagctgtccggactcacttcgttggttcacctggacatatcgtacacctacgtgaccgacctatcacctctgtccggcctcgcttcgttggttcacctgaacatgtcgtcgtccacacgtgtggacgacatatcaccactgtccggactcactgcgttgcttcacctcgacatttcgaacacacttgtggacgacatatcaccgctgtcaggcctcacttcgttatgcgtctgcacgcaaggaggatgcggtggcacgcaaggaggatgcggtttcgtgaacctccttacatgacgcattgcacatcaacaaagaccccgtgttcttttgggccacggtactggggaagaggcgatcgcttaagtgcggctggtccttcaatggacaatctcgaaagtaacgacaaaagaacgatacggagtctgcatgattgagagccgtgatctaaaaaagaaccacgatattctcgttaacatcttgcaatttgttgattcaaaatcgtattggtgttccattgccccgtggatttctacaccattaggttacaccgtaaggtgtgccgtacacgaggcggtttcattttagtattccgttgactgtatacagttgttatcaaataattttgggacactcagtataatttgggaatgtacagaaggacgcaagcggattcacaagattctccgctgcaaaagcagtcaaagcggagcgccacgccaacagagcggtggtaggctccactgtgggaagacttgggaccgcgatgtgaacgcttccaggaacatcctgatgcttacactccaccaagtctttgggagagagcgacctctcgcgtttcgccgagacgcgccgaggagttcctcgaaaaccccaccaccccctgatactgatatggggacacagacggttgaacggtttaccaaagaggctactcggaatatcttcgaaaacctcttaaacctgctgcaccccccaacgttgcccaaaagcaacgatctgcagtctggatgattataaggtgtgtcccactttatttgagaactactgtatacacctgcttattgtgatgggccaacgctacattgtagtgcttcagttcaaagacatactcgcgcccgcaagaaaccatggcattctccacaagattgaatgtgcggccactagtatgtggttgagatcctgaagaaggcgaatatgcaattactgtcaagtaggccttggttgaattagactctaggtgcgcggtcatcccatggccaagggcagacctgtgcacctttcctgcgttagttgcttcatcatatgacacttcatctccgcccctgactcctgcacctccaacagatacattgaagtttgcatctattctccgccttgccagcacgcgttgattgttcaggggtgacaactggatttccagcaactggcctgtctgattcgtcacatgaattgcccctgaaataataaccctccatgggcaccgcactgtagcgaatccctcgatgcctcgcaagttatcatacatctccttgcacatgtacatgtaaccagatacaggtccgtggttcactacaaatattttttgaggagtctgaggaaggtttgtaatatatacaacgtgtccaagagctcactacatagatgggtcaatgctgatcaggtgggtaaatataagcgtttaaaacgaaaaaggaaagaattgtccattcttttacgttccacgatatccaataatattgcagagaactcactcatcgtaagaagcaagacggtactggttgggaatgtacagatggacgcaagcggattcacaagattctccactgcaaaagcagtcaaagcggagcgccacgccaacagagcggtggtaggctccactgtgggaagacttgggaccgcgatgtgaacgcttccaggaacatcctgatgcttacactccaccaagtctttgggagagagcgacctctcgcgtttcgccgagacgcgccgagaagttcctcgaaaaccccaccaccccctgatactgatatggggacacagacggttgaacggtttaccaaagaggctactcggaatatcttcgagaaccttttcaaccttctgcaccccccaacgttgcccaaacgcaacgatctgcagtctggatgattataaggtgtgtcccactttatttgagaactacagtcggcggaacagtaaaatgaaacatatatcagatggaaataaatgtacgacatcgccgttagaaaattggcgttaagaatggtcgctgacttgggtgtgttaaaaacttctgtgtttacgaacattagtcattctactctgtggaggtggaaacgctttggtgtaaatcgaaaacgacgtgaatttgtaagcaaactttttgagacgaacaaagatttgttgaaattgtttttattgtcaactcaatgcacaaccgcaagaggtgttgttgcatttttcaaaagtactcacaatttacgattatcaactaaaacagtgtatcatttcataaaactcattggttttacaagaaaaaggagcaaactccgtggacagtgtaaaggggacttagttccacttgtcactgaattttgtagtagatacaaggatacaatcaatgctgggaaaattttagtatcagttgacgaatgtgggtttagtgagcgtctcaagccacattatgggtattcccctgtaggaaaacctgttatcgttaaaactactggtgggtgggtacaccatagtttgttgatggcagttttttcagatggtaggaaggagttcgttgtgaagaaaggatctgtgaagaagacggacttcgctgcatttattgactcgttgagtttgtgcaataattcagtagtaataatggacaacgccagtatccataagaagttggtcctcagaagccccgtaaatatttgttacactcctccttgcagtccagaattcaatgctattgagctgtgcttctctaaggtgaagaaggactttcgtcgattgaactatataccaaacgatacaaagacgcacgtgtctgatatgatttccttagcattcagcaacctcactgataaaatcattatgggttgttttgaccacgtatggaacacgtatgtgatgtttgtataaagagttctgtgatgtacaaattatgtaagatggcaacgaaacctccgacagtcgcaaaattgaaggagctactaaaattggccgaagtagcatactcctcaaaggacaagaaggacgatattgtccgtttatgcgaagacaatggtttcatcgccagaccccctccagagtacaagacggtggaaaagatgtgcgtcgtgaaatgcgccctgaagaaggcaatgagtcttgacgatgaagaattcggtaagttcagggggcatgtggatcagctcgtcaatgtggtgagccgcatgttacggcgttccagtctggtgctgactttccatgtcacgaggctcatggaaggcgacctgccgattcttaatatgtacgatatgaaggatacctactggaaggattggctaaggatcggagttgacggcgtctttccagatgaagagagtagaatatcatacgaagccgtgaaagacgtaatcagaaaggtgcttggtagctatgaacctgactacatcaactcctaccctatctatttcgaccaggttttgaactatgccggtcacacattgagcactgtcgtgtcgaacaacgcatgggttcctttggtacctcgtctgacccgcctcactaaggatactttgaaggcactgggagctccgaagaccatccgtgtgtacgtcgtgatgagggtcatccaacaagaaatacaggagatggaatcttggccagagtctgttcaggagtacgtccgtgaagttcgagtcaggctgaaagttccagatggaagtcgactttatgatgactatggccaagacatggacttcccgaccatggtccagttcaattattggatgcagacacggttggaggctattggtgcacgtcgtatccggttgatgcccatctttaatgtccaacgggcgcatgtccaccttgacatgaagaccctcgtgaacctgttcaggcacgtgttccccaaagacccaaacatcgtcgagctttcaaagtgggaaaatgtaaaggatcccgaccgcttcatgttgcctctgaagccttcagttaagaagaaaaaatcatgtggtcctggtgaatgggaggcatacaagttggcccaacagaagtacgatgctgacgttaaggatatcaaggctactgacgagtacagacatgcaaagggtaggtatgacacgctcgtgaacgcccaaaaaacagtcgcaggttccttcttcaagaaaccacctgtcaagacggggtgggtgttcgattgtagcatctgtactgacggagtctcattgagcatgcagtacagcaagacagtacaggttcgtgtatccgatctgaagaagacaagtaagaggtctcgtgacgaggaaggtatgagcgtctcagaacagtatgaccataaactcaaaacgacattgcccgatatgggtatcgtcgttctgtgtgtggatcctggtaggagcaacatcgctacagtcatgtatctggcagacaacaaaagcaagacatggaagcttacatgcggagctttttaccacaagtctggtatcaagaaacagaaaaaacagcaagaaaaacgtttctcagacatgattcctagatgggagtctctgcgtgaaaatggagcagcgttgagtacatccaggaaggatgatatctcggctcacttgaaaaattacgctacgttttccgacgagtggtggaggatggcactccgtcgcagagaatcccgagactactttcagaggtacattggcaagcgcaaggctatggactcattttgggcagggatcaagcgcaacatgaagttggatcatcctgacctgagggttcgcgtagcatatggttctgcaatcacgaagctgaaggctaccggaccaggagaggtagctgtgcctacgggatctatgttcgcttcctgcaagggcctcttcaaagaggaggttcatgtgacagatgagttcaagacgactctcatgtcttgggaaaccggtgccaagaaggaatgtgtttacaagattccaagtgtccaaataaccacggaaggtcagattcgtctaggttacgagttgttgggtcacaccccattgaaggagactccaaaggtctcttatcgcgaccagttggcggtgagggtgtactgcacacgtaaaaaaatccaagaaaaacacaggaggggtggcttagccccctctcttgtcgacaacaactcgatcaagcggtaccctgaggtacgaggattgcgattctctccagaaaccagcacttactcggaccgggaccgctcctctgctctcacaatcgcaaggctgcactgcatggaactgttgggtcaagggagaccgcttccattttgcagggatgcgtgttgttgggctacaaaaaaacatgatggtgttccactgcaatgtgggttgctacaccataaggttacaccataaggtgtaccgtacactccagaaagcggtttcattttagtattccgtcgagtgtactgtaagtagtgttgtacagggatccgcacagtaaaattgctactgaacatcttcaatgaatctgcatccgtgtgacaaggcaaatagcaaacacgcagcctgacgctgttgcgtgacagcatcaagacgctgcgcgaagcaacggatgtactgaagatacacaaattgaacaatgtaatacaacaacaactcccgcccgcctccctgaatgatagatgaaaaaatcactcacacactttcctgtatgtaaggaggtttctttactggacgaacaagctcatcatacattatattataacgagtgtcaaagcctcatgcggaacattctcacacgcacaagcgagaggtcgcggggcccgcagagcggggcagagagattcagttgcagaaacctgtcaagtcatcatacacgtacacacgcaaacggaggaacacggtcagaaacttcggccattcttaacgccaattttctaacggcgatgtcgtacatttactgttcagccgactgtagcgggcggcgacttctcgtccactcgtcatcgaatgatgtgtaaacaaccattaattcttcagtaacacaaacgaatgagttcttttgacgaaatcaatgaagatgtattggagatcattctagccaatgcgatttcgagcgaatgccacctcaaacaagtggctctcgttagcaaacggtggagatgcgtcgcaccccggtgtgtcacaaggatccacctgagacattataaaagtttggactatgtctcacgcatttgcaggctcgaagagttgaaaatcggtatcaatcgggggaaagacgtaccctacaaaaaaatgtcggagatcgaagacaatatcgaagacatatcaccgttgtccggcctcactgcgttggttcacctcgacatttcgcacacagacgtgttcgacatatcacctctgtccggactcactgcgttggttcatctggatatgtcgtacacctcagcaggcgaagacctaccacctctgtccggactcacttcgttgcttcacctggacatggcgtacaacgaagtggaagacatatcacctctgtccggactcacttcgttgacgcacctgaacatggcgcacacctacgtgtttgacatatcaccactgtccggcctcacttcgttgattcgcctgaacatcccgtacacacgtgtggaatacatatcaccgctttccggcctcgcctcgttggttcatttggatatgtcgtacacctccgcgggcgaatacctatcacctctgtccggactcacttcgttgcttcacctggatatgtcgtacaacgaagtggacgacatatcaccactatccgccctcacttcgttgacgcacctgaacatggcgcacatctacgttgccgacctatcaccgctgtccggcatcacttcgttgattcacctggatatggataacacgcttctggacaccatatcacctctgtccggcctcactttgttgacgcacctgaacatgtcgtacacacgtgtggacaacatatcaccgctgtcaggactcacttcgttgcttcacctctacattccgaacatcgaagacaggatcgaagacctattaccgctgtctggcctcactgcgttggttcacctcgacatttcgcacctccacatggccgacctatcaccgctttccggcctcacttcgttaattcacttggacatttcgaacaccgacgtggacgacatatcaccgctttccggcctcacttcgttgattcacctgaacatgaaggacaccgacgtggacgacatctcaccgctttccgccctcacttcgttgattcatctgaaaatgacgggaaaacggtaaagtagtcacatatctatatatcgacagattgtatcaagcagactcctgcacgacaatattgggattaataggaaggggtctcgaaggtcccgcggagcgggaagagggattcagttgcagaaacctacagtaaacggcagaaaactgtcgcatccatctgtccgtccattcattacacacgatgcggtggcggaatattgtattgatgtgtaaacacaactgttgcaatattgtattgatgtgtaaacacaactgttaatgggcgttcctgcttccgaacggatttccaatcttacaatcactttttgggggtcttttgatgcttttcaaatgcaatcttacgataaaaaacgtaagattgtagtcaattttgacaaaatatgcttgaaatgagcttgaaagacggagaaacgtacagattgcgaatgttacaacgttgaaatgccatattttgtaacaaaaggtgttaacatcaattcgtgtcttacaattataattgtaagaaataaagggaaagcggacggttataaggcggcaggcagaattcagcttttacatcttacaataaaaattgtaagtataattaatttaatttttctaacttagtaaaaaacggctatgtgtcaaacatcttactcctcctcctcccccccctcctcgtcctcctcttcctcctccttctcctcctccatgtccccatccccatcttcctcctcctccatctcctcctcctcagcaatgtctgcattgtctccatccgattgcacagcctctgccctggtgtccttctcaatggattgacaagctaggagcatgcttgtgtggtactttctctggatcttcatacccttggtgggttcgcagctaaattgaaatgcgtcaatgggaatatcgcccgtccatgttgcttttctcctaacccccactgtaataggcacaagcttgtggtccatccaatcttctggccaagttgggtattgtgtttcagtgtacaccaacttctgagccccagagtacaagggatttaaatacacacattccacttctccattcactggtagtgatttgacctccaccacgtcccatcctctcaatccgctagagtcatccatttgtaccttgaccacagcgacatgaccaacaaccaaatcagtagtgggctcgtaggctattcttctatccggcttcgtcccttgtgaagaatataagtacaacacatcctcctcctctggcctttccatattagtctccaaagtgtgtgcaaccttcatagtcttggcaatctcgttacttgcaggtaaaaggtctgacacatccatggacaagtcatccaatgctgctatcaagcgcttggccattgatttctcagactgtgtcagaacacgactggttgctgacaactccgatgggaagtcgacaaaatgttggtctttcgggtactccccagttacagcatcatctggttgagtgctccaataactcttctcaactttgaagaaatcagtccaccacttattgctggcttcccaagtttcacgaagcatctcggcaatatgtttgaaggactgggcatgggatgggccatcggctgctggttcatccatcggctgctggtcatcggctgctggttctagaaccagaaggtcctccgctgcgtgtcgtacacggacatcagttacgggtcctgcacggtcgtcaccggcggtttgtacaggaccatcggccatgtgcctgcaaggacgtcacctccgggcttctcgttatgaatagtcttccagacagccgcccagtttgcctcgatattctcgagctcttcaatcttgatcttgggggcttccttaaatactgttatggtgtccaccagtggcagccttggaggacgtaaataggttcagcgtcattgtcccactgtcctctccaagatcctgactcgtcatactccttgtaatagacccctgcaattgttggtgtgcaaacatgtattgtatattagtgaatcatttaggacacccatattcctcccgactatactcgggagcatcccttggataatacatcctaggtcctaggtacaacttcctttgtatcatttagtttctattgaagactgtacatgtaaatcaatgaggacatggcacacccatattcctccccgagcataatcgggagcattgtgcagacagtacatacacgcacggtagcatttaatttgtaaatatcagtatatcaagtattcttaccgactctcccgttgggacctttcgttatcttgaatgcgtgtaaacggcgattaactcctttgacggtgctagtgccatgtccgaacaacttgtaaacgttgtctaggaggacagcggagaagtcccctatagaggtcacgacgtcttgccttgtgtaagggcccattctcttgaataagttaccaacaatgcccatcagatggtccagggtgtacacttccatgttctttaacccttgcgagatcacagagtacttttggtcaagattgctatgtgtgtgtccgggagggaggaaatggacgtacacctcctcaaaccagttcatctcaaccagcaaggacaagtatgcgaacatgaaagcgttcttgttgtcctttgccgcgttgtccatttgcaagaagcaatacggtggaagctgcccctcttcttcaaggacccggttgaagaaatgttggaagcatgatatagtcagattgatggactgcgagtagaatggcaaagcccaataaccaatgaagcctcttccctgggagaataatcctgagttaacatagaaggaaacatgaagtcagaatattagcattattttgttaagtaatcatttcaagttttaaatactgtgtatgctcccgattatgatcgggaggacatgtcctacgtgcgctgtatttgtactcacacatgatgcgtgtctttagaagatcacctcctgcagtcttctttgtatgtgagaagtggcgtgactgaggaagattagtcttcttgttgtccattgcatcagcggatacgtgcaagaagagcttcggatactgttcagacagttttttcacagatgtcatacctacgccttgactggtttttaggattgctttccccctacttttcttctccacgggaatatttgtctggcttactccttatgacttgtgttgtggaatcccaggaattctgggtaccagaataccagggattggggggaatgttatgatacagacctatagctgtatcagtaacggtggcggggcataggtccgacacccactctagcagctggtgaccaggcatctgcctggcagctaggcagtgtagtaggtgacttcaagcgaatagggtcgttgggtttgacaatgctcccgattaggatcagagactgtgggtagtctgagttctggtttttctcaatcattcgttcgttgggttgacatgctcccggttatgatagggaggactatgggtatgccgagtacaaaaaaaaaaaaaaaaaaaaatgctgagtacatgtttctgaatcatttgctgctccttgggttgtcagtgctctccgatttatgatcgggaggacggtgtgtattcccgaatttggttttctcaatcattcgccgttgggttgacaatgctccgattctggatcgggtttgacaatgctcccgattatgatcgggaggactctgtgtattccaaattggttttcttaatcattagctccttggggtttgtcactgctcccgattatgatcgggaggaatgtgtgtatttccgatttggttctcaatcattcgctcggttgggtttgcaatgctcccgattatgatcgggaggactgtgtgtattccaaatttggttttctcatcattcgctcgtgtgggtttgtcaatgtctcccgattatgatcgggaggactatgggtattctgagtttggtttttctctatatctgaatctgatgtttgaatctgaatctgaatctcaatcatttgctttaccaacctatgtgtctttcgcagggtctacaatgacagtaccgtgggaagtaaaactcaatcggacgggaaggatttgggatgcagcgtcatggacgaatgaccaaggagcgccagtgccaatgaacatcgaagtcgttggtggtggaccagactttcatgttacggctacgcacgctcactggttgaggtttcgcggcgaatgcaggcatatgtgcggagcagattgcattctggtcgacactcaccccttgcggaagtcaagacagcccagttgcttgaagtcactagcattcgggaggcccatgttaggagccctatcatggataccagttcacattcaggctcttgggttggtagttgacaatgcgcagcaagcctgtcagggtcggcgagggcgaatttatcgccgacaaagagcttgaggaaactagagcgtgggttgagacatgcgaaggaaagctcatgagcgatttcgaggagtttggtcctagcgacaggaggacgtcacctcgatgtacaccaaaagggccttgacctgacgccggtaagagagcaatcgaacggactgtactgctgcactgtggctcaggttaaattttcaaatctgacaggtacatttcgaatgttacgtacgcggtgggatgtacaccgttcgaaacaaccattgtgtgctgacggcaacttgccgctttcaatttcgataggatattgcgtaacttctgcactctttacatttcctacagcctccgcgaagaagtcaggaaaggcgcgacgaggtcagcttcctacaatcaacgaagaggacagatcgccgacaactttgtaaggtcatcgtattcaaattggtatctccttatagcccagctcctgacatgggcctccgaatgctagtgacttcaagcaactgggctgtcttgacttccgcaagggtgagtgtcgaccagaatgctccgcacaatatgccgcattcgccgtgaaacctcaaccagtgagcggtgcgtagccgtaacatagaagtctggtccaccaacaacgacttcgatgttcattggcacttggcgctccttggtccattcgtccatgacgccgcatcccaaatccttcccgtccgattggagtttaacttccactgtactgtcattgtcgaccctgcggaagacaaatcggttggtaaagcaaatgattgagatccgattcaattcgattccaaatcatttccgatatagagaaaaaccactcgagtactccatagtcctcgccctgatcataagcgggagcattgtcaaccccacgagcaaaccttgatgaa

SEQ ID NO: 178 - DNA, 22403 bp, unidentified
  misc_feature 1..22403: note = Fanzor polypeptide
  source 1..22403: mol_type = other DNA
ggctgttacagtacccgctcgcttgaagtgccatcaatgccatctttgtcaccgtcttcgtcatcggtgtcgtccgaaacatgtatgtatgagggcaacaccgcttccaagagcggccgcatgccagcccacactccgcccgcattggagatggcgcatgtctctgtgtcatagccgcacaaagccttgtacaccagccggcttctccaagagtcatacaataatgtatttagaggagagtccctagctccgatgtcatgaaggagcaaatagcacatcagggcctcattgggcgatgtgctgctgctccctgagtgggcatgaagcgcttcgcacaccaaacgcatggaattgctcgatgggggacaagttttaaggggaaactggttcaaccatccgccaccttcgtcgccgttgtttgcgttgttacctcccccctgatcttcaagtgtcgcaagctcgtacattggacaccttaagtgtctcaactcttcaaccttggcattcagcgccttgatttccatgcgttgagttggatacagtgaaaaatgaagcccgtgcacatgtttcttccccttcctattgtttgacatagattggaaacaattcgggtaaaggggatggtctggtagctcaggcataaagaccaacatcgtgtcctgatgaaagtccactccatccggaagaaacttgtttcggtccacattgtagcactcagaatccggggccctgcgttgatagtacgcatgtgctgccgtgcccaacaaatcaattggggcaaagaagctcacgccaaccatgctctccccctcgatagtaggcagtggcggctgaaccacgaaatctatgtcatcatctgccaacatgtagtcatgagatttgaggggggcacagaagcggtgatagggcaagcgttcgcttccggcctgcagtttggtgcactccaacgacgtaaaggatctaccacaacctttctcgcatacatgaatgatttggacttcataaccaataattttaagaactttccatttccagcaaaaccatgtcacagttaagtcattggtgatggcatctaataggctcaggcttcggacgggtttcgtgtttttttccatcaacacacgtaattctcgttcatattcttcttgtaacatttcgacctttcaatatcaaggaagattcctttatattccaactcatgtctcatgtctccaccaagaccatcacgaatgagtcgcagttcgatagagagagattataattcgaacactgtaaactgtacagattttcaattgtttacactcgtttttcgaggcgcatgtggaacacgtgtcgtctcaagctggcttctgcttgacaactctatcgggattgtgaagggggaaaccgcggtccccacggagtggggcaacggaattgagctgctgactcactcccacgcatactaaggggggtctgaagaccacgtgtcgtctcaagcaggctccagcttgacaacacggtgggaatccgcaaagggggatcgcgggtccgcggagcgggacagtggaattcagctgatgactgtctgatcacatgcatggggcgaaatacgatgaggaggccgcagagaagctatgggagacggtgggaagacccgactatgacgggccgaagatgacaatgaagtcggtggtcaagtgggcttgcgaggacgacccgcgcgggtacgctgtgtacagagcatcttcgattccaaaaataatacgggacagttgggacaagggagaccgcggcctggggcagattgtgcactttctgctacaagagactgtgaagaagactggtcacagggactactacatattcgatgaggacacgtgcaggtgggccaaggtggaggatgggtgggtgaataacgtggcgagcaaggtattggaaggggtactcagggacgtcgacttatggatatcgacacaggccgcacagctgtgtatcggagtggtggaaggagaagaagactccaggagtaaagcagatctggatgcgaagaagaagaaagtggccacgctgatcaattacgcgatgtcttaccgcggagttacgaacgcaatggccttcgcgggcccactgctcattgacgagacgttcgagcaacgcctggatagcaataggcacttgatcgggatcaagggggggagcgtcgtggacctcaggacagggaagaagagacagagggtggcagaagacatggtgcacaacgaactggacgtcgagtatgaagaccaggcgacgaagaccacgaatgctgctgagtggatgcacatggtcgtagagaagatcatgggaggggacgaggccatggcatcttttcttcaaagatgccatggcctcgtcaccaaacgcatggaattgctcgatggggggcaagtttgaaggggaatctggttcaaccctcggccaccttcgtcgccgttgtttgcgttgctacctcccccctgatcttcaggtgtcgcaagctcgtacattgcgtatctaataccaatctgatgtagatctaacacaaatctaattcgaatctatccgaaactgtctgtacgagggcgaagtctagtttgttcggcgcattgaatgagtcagttcgacagatagagattcgcatttgtatggctgtaatctgtacggattttgagttgtttacactcgtttttcgaggcgcacaaggaacacttgtcgtcgattgattaaagccgcattgtgtcttacgcaaacgcattcacggtcgtccggtcctgtgcggcttctgccctgttggttttatgaagggggacgcgcgggaattcctgtcccgaatgacttctgcgacgaagacctcgctggcttgcttcgacttacacgaaacttggaaaatgtgaatgttgtgcacatcacccatctcccggcctttttcattaaggacgacttttgcaaagtcccgagttctgaacccggtgctttggcattcaaaaatgtagtaaaaattctttaatggcccgttgcaaggttttgaagacatgattctgggtatagtattcacagagaaaatattcgtttgcgtcaggttctttcggcgcattgaatgagtcgcagttcgacagagagagattcgcgtttgtatggctgtaatctgtacggattttgagttgtttacactcgtttttcgaggcgcactcgtaacacttgtcgtcgattaattaatataaattatttttattaattaatcgatttttttttgtcgtcgattaattaatataaattatttttattaatttttcgattttcggagcccctttcacctccccacagcggagaggatccagtggcacacgtcggacatccatcctcgaccgcatgccgcagtggacttcgcacacgcattttaaccctaaacccgtgtgtgggtttagaatacccaaacggagtataaattctgggacaaatccatttccttacatattttctcaatcatcatcacgaaatatccacttgataagcaggtcacgtcggaggacgatgaggaggagattgtgatgcacactcggaccggtatggacgcgcttcagatggacctcgtggttttgatcatgcgccgagcaggcagttggcaaaaggacgggtgctggatgcacgcgggattcatcagtcgagccatgcatactgctttcgcggatgacgctgcatgtgaagcacaggcgctagtggacagatgtgatcatctcaatcagaaccccatgaggatagcgtgtaaggccgggcgagccgacgtcgtccgcatattgctaaaagatcacaacgacatccgggcattggagtacgccgctgatggaggccatgtggatctgtgcaagcttcttatggatctggagtttgcaggcgaggagcactgcgccaaggcagatgccaataatggccaggcactgagtgtcgctgctaagggaggtcatgtggatgtctgcaaggttctgatgaatcctgagttcgctggcgagaagcaccgtgccaaagcttatacatactacagctacgcactgagtgccgccgctattggaggccatctcgatgtctgcaaggttctgatgaatcctgagttcacaggcgaggagtaccgtgccaaggcagatgccagtgaaagccagtcactgaggttagccgctcggggaggctatctggatgtctgcaagattctgatgaatcctgagttcgcgggcgaggagcaccgggtcaaggcaaatgccattgacagtctagcactgatgatcgccgctagtggaggccatctcgatgtctgcaagattctgatgaatccggaattcgcgggcgaggagcaccgagccaaggcagatgaaaacaacagtgatgcactaagtgccgcctctgcgagaggccatctcgatgtctgcaaggttctgatggatcctgagttcgcaggcgaggagcaccgagccaaagctgattcattatacagcaaggcactaagtgccgccgctcgtggaggccatctggatgtctgcaaggttctgatgaatcctgagttcgcgggcgaggagcaccgggccaaggcagatgaaaaacaacagtgatgcactaagtgccgcctctgcgagaggccatctcgatgtctgcaaggttctgatggatcctgagttcgcaggcgaggagcaccgagccaaagctgattcattatacagcaaggcactaagtgccgccgctcgtggaggccatctcgatgtctgcaagattctgatgaatcccgagttcgcgggcgaggagcaccgggccaaggcagatgactacaacagtgatgcactaagtgccgccgctctgcgaggctatatcgatatctgcaaggttctgatggatcctttgttagcgggcgagaagcaccgagccaaggcagatgacgacaacagtcaggcactgagtgccggcgctcagggaggtcatgtggatgtctgcaagattctgatggatcctttgttcgcgggcgaggagcatcgagccaaggcagatgacgacaacagagaggcactgtgtgtctccgctaagggaggctatctggatgtctgcaaggttctgatggattctttgttacactcgacgggcggaggaccaccgtgccaaagcagatgacattaatagccatgtttgtttgtgaaagattctctacatttcgatagttattttacgtgtcctcatgtgcagacacatgtttcagagtctgttgtttgttaaagattctctacatttcgacagttattttacgtgtccggagggggagcccacacttaacatcaagcattagacacacacactaatgcgtaacaactgtcaagtcttcttacacaatgatgatgtgtacgttgtttgtaaaagattcactgtaacacttgggcttattatcactgtaacgcttgagctaaaccgacctcaagcattacatgacggcggaaactgtcgactagagttgagttgagtcgtgtcgtgtcgagttacatggcgacctctcattacatgacggcggaaactgtcgactagagttgagttgagtcgtgtcgtgtcgagtcacatggcgacctctcattacctgacggcggaaactgtgtcgagtcgagtcgagtcacatggcgacctctcattacatgacggcggaaactgtgtcgagtcgagtcacatcacatggcgacctctcattacatgacggcggaaactgtcacactcgcatcaggcggaacctgtgtcgacacacactcacactcatcaaggacgcacacacggctacggggggatgggggcggagcgggacggcagaaacatgtcctcgtctccaaaagacaccacggcggcacctgtcgtgctctcgcatcaggcggcggcacatgtcgagtcgagtcacagagtcacattgcggcgacctttcgcatcaggcggcggcacatgtcgagtcgagtcactgagacacattgcggcaacctttcgcatcaggcggcggcacatgtcgagtcgagtcgagtcacatcacagagcgacctctcgcattatggcggcacctgtcgtgtcgagtcacagagcgagcgacctctcgcatcacggcggcaccagaagtgtaaacaaccattcttcagtataaacaaccatcagcacagcacacttcacaaacgatcgcaggtcttttaaagaatagctctgctatattccaaagaatgcttggaagcagtgctctgcgggagttggcaatggtcggcaatggatggactgctgaattgctggagcaagcggatatacaatctctgtcggatgtgtgggccctagatctggatgatgacagtttgattcataggctgatctcttcagcacgaacccttgcatctgatacaaccaggattgtacattgggacaatgtactgatgcgggcatacaaccgtatagttctcatccacgcagtagatcgtgttgaattttatgtcccgttcaagttccgatgttccatatcgcaccagtggccagatcagccatccgtctcaccagcaggtcatctgtatgaccgttgttggatagaaagatgggtgcgtgcaagtgccaccgatccattcactcgcgatccattagatgtgagtcagctctgtccagtatcaccggagttcgcgttagaaattgcagaagaaagacgcaatcatgccatcggcattgttcccaccagggtttgtggaatcgatgaggagcggattgattgattgattgatccgctcctcctacagtcggaagacggaacgaactcttaaatgaggaatgccacgatgagatgacgcacacggcggcccctcgtccagactcatcacgcacacggtggcggcttctcgcatcatggcggcacctgtcgagtcacatcacatggcgaccgacctctcgcattacatgacggcggaacctgtgtagagtcgaggcaaagataacaaacaacacttggatgagaaccgtctcacattaacatataacaagcggtgaagcccctttcacctccccagtggcacacgtcggacatccatcgcatgccgcagtggacttcgcacacgcattttaaccctaaacccttgtgtgggtttagaatacccaaacggagtataaattctgggacaaatccatttccttacatattttctcaatcatcatcacgaaatatacacttgataagcaggtcacgtcggatgacgagggggaggagattgtgatgcacactcggaccggtatggaagcgcttcagatggacctcgtggttttgatcatgcgccgagcaggcagttggaagaaggacgggtgctggatgcacgcaggattcatcagtcgagccatgcatactgctttcgcggatgacgctgcatgtgaagcacaggcgctagtggacagatgtgatcatctcaatcagaaccccatgaggatagcgtgtaaggccgggcgagccgacgtcgtccgcatattgctaaaagatcacaacgacatccgggcattggagtacgccgctaatggaggtcatgtggatctgtgcaagcttcttatggatccggagtttgcaggcgaggagcactgcgccaaggcagatgccaaaaatggccaggcactgagtgtcgctgctaagggaggtcatgtggatgtctgcaaggttctgatgaatcctgagttcgctggcgagaagcaccgtgccaaagcttatacatactacagctacgcactgagtgccgccgctattggaggccatctcgatgtctgcaaggttctgatgaatcctgagttcacaggcgaggagtaccgtgccaaggcagatgccagtgaaagccagtcactgaggttagccgctcggggaggccatctcgatgtctgcaagattctgatgaatcctgagttcgcgggcgaggagcaccgggtcaaggcaaatgccattgacagtatagcactgatgatcgccgctcgtggaggccatctcgatgtctgcaagattctgatgaatcctgagttcgcgggcgaggagcaccgggccaaggcagatggaaacaacagtgatgcactaagtgccgcctctgcgagaggccatctcgatgtctgcaaggttctgatggatcctgagttcgcaggcgaggagcaccgagccaaagctgattcattatacagcaaggcactaagtgccgccgctcgtggaggccatctcgatgtctgcaagattctgatgaatcctgagttcgcgggcgaggagcaccgggccaaggcagatgactacaacagtgatgcactaagtgccgccgctctgcgaggctatatagatatctgcaaggttctgatggatcctttgttcgcgggcgaggagcaccgagccaaggcagatgacgacaacagtcaggcactgagttccggcgctaagggaggtcatgtggatatctgcaaggttctgatggatcctttgttcgcgggcgaggagcaccgagccaaggcagatgacgacaacagtcaggcactgagtgtcggcgctaagggaggtcatgtggatgtctgcaagattctgatggatcctttgttcgcgggagaggagcaccgggccaaggcagatggaaacaacagtgatgcactaagtgccgcctctgcgagaggccatctcgatgtctgcatggttctgatggattctttgttacactcgacaggcggaggaccaccgtgccaaagcagatgacattaatagccatgtttgtttgtgaaagattctctacatttcgatagttattttacgtgtcctcatgtgcagacacatgtttcagagtctgttgtttgttaaagattctctacatttcgacagttattttacgtgtccggagggggagcccacacttaacattagacacacacactacagtcggcggaacagtaaaatgaaacatatatcagatggaaataaatgtacgacatcgccgttagaaaattggcgttaagaatggtcgctgacttgggtgtgttaaaaacttctgtgtttacgaacatcagtcgttctactctgtggagttggaaacgctttggtgtaaatcgaaaacgacgtgaatttgtaagcaaacttttttgagacgaacaaagagttgttgaaattgtttttattgtcaactcaatgcacaaccgcaagaggtgttgttgcatttttcaaaagtactcacaatttacgattatcaactaaaacagtgtatcgtttcataaaactcattggttttacaagaaaaaggagcaaactccgtggacagtgtaaaggggacttagttccacttgtcactgaattttgtagtagataccaggatacaatcaatgctgggaaaattttagtatcagttgacgaatgtgggcttagtgaacgtctcaagccacattatgggtattcccctgtaggaaaacctgttatcgttaaaattactggtgggtgggtacaccatagtttgttgatggcagttttttcagatggtaggaaggagttcgttgtgaagaaaggatctgtgaagaagacggacttcgctgcatttattgactcattgagtttgtgcaataattcagtagtaataatggacaacgccagtatccataagaacttggtcctcagaagccccgtaaatatttgttacactcctccttacagtccagaattcaatgctattgagctgtgcttcgctaagaatgggcgttcctaccacccggccgattttgactggttgcgaaacatggtaaggagcagaattgtgattccatggtgcttatgtctcaagctagctagtctttccggaggctctaaatcctgattagaaatttaaaaaaatcggccgggagacaggaacgcccatttaaggtgaagaaggactttcgtcgattgaactatataccaaacgatacaaagacgcacgtgtctgttatgatttccttagcattcagcaacctcactgataaaatcattatgggttgttttgaccacgtatggaacacgtatgtgatgttggtataaagagttctgtgatgtataaattatgtaagatggcaacgaaacctccgacagtcgcgaaattgaaggagctactaaaattggccgaagtagcatactcatcaaaggacaagaaggacgatattgtccgtttatgcgaagacaatggtctcatcgccaaaccccctccagaatacaagacggtggaaaagatgtgtgtcgtgaaatgcgccctgaagaaggcaatgagtcttgacgatgaagaattcggtaagtttagggaacatgtggatcaactcgtcaatgtagtgagccgcatgttgcggcgttccagtctggtgctgactttccatgtcacgaggctcatggagggcgacctgccgattcctaatatgtacgatatgaaggatacctactggaaggattggctaaggatcggagttgacggtgtcttcccagatgaagagagtagaatatcatacgaagccgtgaaagacgtaatcggaaaggtgcttggtagcgatgaccctgactacatcaactcctaccctatctatttcgaccaggttttgaactatgccggtcacacattgagcactgtcgtgtcgaacaacgcatgggttcctttggtacctcgtctgacacgcctcactaaggctactttgaatgcactgaaagctccgaagaccatccgtgtgtacgacgtgatgagggttatccaacaagaaatacaggagatggaatcttggccagagtctgttcaggagtatgtccgtgaagttcgagtcaggctgaaagttccagatggaagtcgactttatgatgactatggcaaagacatggacttcccgaccatggtccggttcaattattggatgcagacacggttggaggctattggtgcacgtcgtatccggttgatgcccatctttaatgtccaacgggcgcatgtccgccttgacatgaagaccctcgtgaacctattcaggcacgtgttccccaaagacccaaacatcgtcgagctttcaaagtggaaagatgtaaaggatcccgaccgcttcatgttgcctctgaagcctgcatttaagaagaaaaaatcatgtggtcctggtgaatgggaggcatgcaagttggcccaacagaagtacgatgctgacgttaatgatatcaaggatactgacgagtacagacatgcaaagggtaggtatgacacgctcgtgaacgcccgaaaaacagtcgcaggttccttcttcaagaaaccacctgtcaagacggggtgggtgttcgattgtagcatctgtactgacggagtctcattgagcatgcagtacagcaagacagtacaggttcgtgtatccgatctgaagaagacaagtaagaggtctcgtgacgatgaaggtatgagcgtctcagaacagtatgaccataaactcaaaacgacattgcccgatatgggtatcgtcgttctgggtgtggatcctggtaggagcaacatcgctacagtcacgtatctggcagacgacaaaagcaagacatggaagcttacacgcggagctttttaccacaagtctggtatcaagaaacagaaaaaacagcaagaaaaacgtttctcagacatgattcctagatgggagtctcttcgtgaaaatggagcagcgttgagtacatccaggacagatgatatctcggcttacttgaaaaattacgatacgttttccgacgagtggtggaggatggcactccttcgcagagaatcccgagacaactttcagaggtacattggaaagcgcaaggctatggactcattttgggcagggatcaagcgcaacatgaagttggatcatcctgacctgagggttcgcgtagcatatggttctgcaatcacgactttgaaggctaccggaccaggagaggtagctgtgcctacgggatctatgttcgcttcctgcaagcgcctcttcaaagaggaggttcatgtgacagatgagttcaagacgactctcatgtcttgggaaaccggtgccaagaaggaatgtgtttacaaaattccaagtgtccaaataaccacggaagggcagattcgtctaggttacgagttgttgggtcacaccccattgaaggagactccaaaggtctcttatcgcgaccagttggcggtgagggtgtactgcacacgtaaacaaatccaagaaaaacacaggaggggtggcttatccccctctcttgtcgacaacaactcgatcaagcggtaccctgaggtacgaggactgcgattctctccagaaaccagcacttactcggaccgggaccgctcctctgctctcacaatcgcaaggctgcactgcatggaactgttgggtcaagggagaccgcttccattttgcagggatgcgtgatggttgatgggctacaaaaaaacatgatggtgttccactgccccgtgggtcgctacaccataaggttacaccataaggtgtaccgtacactccaggaggcggtttcattttagtattccgtcgagtgtactgcgtaacaactgtcaagtcttcttacacaatgatgatgtgtacgttgtttgtaaaagattcactgtaacacttgggcttattatcactgtaacgcttgagctaaaccgacctcaagcattacatgacggcggaaactgtgtcgagtcgagtcgagtcacatggcgacctctcattacatgacggcggaaactgtcacactcgcatcaggcggaacctgtgtcgacacacactcacactcaccaaggaggctttctcaagcagaccccagtccgttgactaactgtcttcaggagattgatacaatctaaaaagtacacgtccatcctccattcatcctcacacatactgtaccaaggcggcgtatcaacaaccgcatgtactcaaacgaaagccgtgtatatcaagcaggcttggaaatggaaaaacgttgagatcacctacgtgcgaggagatttagcttcgtaatagcatggatcgatacagaatacacaactgcacgaaaaacataacagcaagcagctccagaatgcccttttcctgagcggaagatacccgaatagtcttacgtaatcgtccatgtattcccatgtgtttgccgtgtacgtattttctatctctacaatcttcttcaatcgagcagcattctgggcgtactcaattttggcaccagataataggtggattgtcgttccgtcaaacgtgaacatagtcttattcatcacgttcgatgcttgcatgtagtagaatgtctctttgtacaggtcgagtatttctaaacatttcttggcgtcattctcattatcgaataccaccgttccatgtaaaataaaatgtttgccattccacctactgcctgaaactgtgaaacacgcatacatgctggtatccaatttcttgaagttatccattgtttctgttttacacagaagatatagggtgcgcaaagcaatatactatacatagtcttgatttcttatacttcatgggcgttcctgactcccggtcgattttgactagttgcgaaacatggtatggagcggatttgtgattccttcgatcatgtaacttcaaaaaaaacgaccgggagacaagaacgcccattatggttaaaacttgagatcgagatgaaatcggaagcaataaagtgttacactcaatacatgtatgttaaagtatattgtgacagtctcggggacctggctctggctcgacttgtacttcaaggaggggcgaccacgtgtgacgacacctcctcgacttttacaggcgctttcaaggtgactttcgaagctcagcacttatcctcgatcgcttcaacacgacgatagttttcagcgaccaatatgattgcataatgttttatactcaataatgcaaattgcaagcagtagtagtagcaggcgaatcccaaaaactaaataaatatattgccgatttttttaaatttctaatcaggatttagagactcctgaacgactctctttgtaaccgatcttgtcaatacagatattgtcttcaggagtttgattaacacaaaacattcaaatcttcaaagtagcctgaaaagtccaagtgcacatcaataattcgcctctggatccatcagcagcaagcagacatagggcgtgaccttcctttgcagcctcccacaaggcctagctgtcgttagagttcgccagggccctgaactcaagtccatccactgctggatccatcagcagcttgcagacatctgcgtgaccgtccttcgcagcctcccacaaggccctgctgttgacagagttcgccagggccctgaactcaagtccagccacctctggatccatcagcagcttgcagacatctgcgtgaccttccttggcagctgcccacaaggccctgctgttgacagagttcgccagggccctgaactcaagtccagccaccgctggatccatgagcagcttgcagacatctgcgtgacctgcattggcacccacaaacaaggtccagctgtcgctagagttcgcccgggccctgtacttgagtccagctacatctggatccatcagcagcttgcagacatctgcgtggccttctttggcagccgcccacaatgctctgctgtcgctagagttcgccagggccctgaactcaagtccagccaccactggatccattagcaacttgcagacatcggcgtgaccttcattggcagccgcccacaaggccctgctgtctctagagttcgccagggccctgaactcaattccagccacctctggatccatcagcagcttgcagacatctgcgtgacctgcattggcagccgcacacaatgcccagctgtcgtcggagtttgcccgggccctgaactcaactccagccacctctggatccatcagcagcttgcagacatctgcgtgacctgcattggcagcactccacaatgccctgctgtcgattgagtttgcccgggccctgaactcaagtccagccacctctggatccatcaacatcttgcagacatctgcgtgaccttccttggcagacgcccacaatgcccagctgtcgattgagttagcctgggccctgaactcaagtccagccacctctggatccatcagcagcttgcagacatctgcgtgacctgcattggcagccgcccataaggcccagctgtctctagagttcgccagggccatgtactcaagtccagccacctctggatccatcagcatcttgcagacatctgcgtggccttctttggcagccgcccacaatgctctgctgtcgctagagttcgccagggccctgaactcaagtccagccaccactggatccattagcaacttgcagacatcggcgtgaccttcattggcagccgcccacaaggccctgctgtctctagagttcgccagggccctgaactcaattccagccacctctggatccatcagcaatttgcagacatctacttgaccttcattggcacacacaaacaaggccctgctgtctctagagttcgccagggccctgaactcaagtccagccacctctggatccatgagcagcttgcagacatctgcgtgacctgcattggcacccaccaacaatgcccagctgtcgctagagttcgcctgggccctgaactcgagtccagccgccactggatccatcagcagcttgcagacatcggcgtgaccttccttggcggcctcccacaaggccctgctgtcgctagagttcgccttggccctgaactcaagtccagccaccgctggatccatcagcagcttacagacatctgcgtgaccggccttggcacccacatagagaagattgttttcattttggttcgccctaaattgtagggtcccctgaacctgtacaagaggattggacaccaagcatactgctagaaggtcggcgcgcccccctttcgccatcatctctccaacgagctgtggtggtttgatcagtccggcaaggggcaatcctgaaaatcttttgtgcagagttttgcacactaatacaatctgggggttggaagagaatagggcaatacgatcaagaatgtcacagggaaccgacgttaggaatggaaacgatgatcgagtgtgagattgcatttcgatgaacatgtgtatattcatgcaagcgcacaggatggtataaataaataatgagttgggataaaccctataaaccctataaacccttggttgcacttgcttgcggtagctgttgcggtagctgtagcggtacactcgacggaatactaaaatgaaaccgcctcctggagtgtacggtacaccttatggtgtaaccttatggtgtagcgacccacggggcagtggaacaccatcatgtttttttgtagcccatcaaccatcacgcatccctgcaaaatggaagcggtctcccttgacccaacagttccatgcagtgcagccttgcgattgtgagagcagaggagcggtcccggtccgagtaagtgctggtttctggagagaatcgcagtcctcgtacctcagggtaccgcttgatcgagttgttgtcgacaagagagggggctaagccacccctcctgtgtttttcttggatttgtttacgtgtgcagtacaccctcaccgccaactggtcgcgataagagacatttggagtctccttcaatggggtgtgacccaacaactcgtaacctagacgaatctgcccttccgtggttatttggacacttggaattttgtaaacacattccttcttggcaccggtttcccaagacatgagagtcgtcttgaactcatctgtcacatgaacctcctctttgaagaggcgcttgcaggaagcgaacatagatcccgtaggcacagctacctctcctggtccggtagccttcaaagtcgtgattgcagaaccatatgctacgcgaaccctcaggtcaggatgatccaacttcatgttgcgcttgatccctgcccaaaatgagtccatagccttgcgcttgccaatgtacctctgaaagttgtctcgggattctctgcgaaggagtgccatcctccaccaatcgtcggaaaacgtatcgtaatttttcaagtaagccgagatatcatctgtcctggatgtactcaacgctgctccattttcacgaagagactcccatctaggaatcatgtctgagaaacgtttttcttgctgttttttctgtttcttgataccagacttgtggtaaaaagctccgcgtgtaagcttccatgtcttgcttttgtcgtctgccagatacgtgactgtagcgatgttgctcctaccaggatccacacccagaacgacgatacccatatcgggcaatgtcgttttgagtttatggtcatactgttctgagacgctcataccttcatcgtcacgagacctcttacttgtcttcttcagatcggatacacgaacctgtactgtcttgctgtactgcatgctcaatgagactccgtcagtacagatgctacaatcgaacacccaccccgtcttgacaggtggtttcttgaagaaggaacctgcgactgtttttcgggcgttcacgagcgtgtcatacctaccctttgcatgtctgtactcgtcagtatccttgatatcattaacgtcagcatcgtacttctgttgggccaacttgtatgcctcccattcaccaggaccacatgattttttcttcttaaatgcaggcttcagaggcaacatgaagcggtcgggatcctttacatctttccactttgaaagctcgacgatgtttgggtctttggggaacacgtgcctgaataggttcacgagggtcttcatgtcaaggcggacatgcgcccgttggacattaaagatgggcatcaaccggattcgacgtgcatccatatcctccaaccgtgtctgcatccaataattgaaccggaccatggtcgggaagtccatgtctttgccatagtcatcataaagtcgacttccatctggaactttaagcctgactcgaacttcacggacatactcctgaacagactctggccaagattccatctcctgtatttcttgttggataaccctcatcacgtcgtacacacggatggtcttcggagctttcagtgcattcaaagtagccttagtgaggcgtgtcagacgaggtaccaaaggaacccatgcgttgttcgacacgacagtgctcaatgtgtgaccggcatagttcaaaacctggtcgaaatagatagggtaggagttgatgtagtcagggtcatcgctaccaagcacctttccgattacgtctttcacggcttcgtatgatattctactctcttcatctgggaagacaccgtcaactccgatccttagccaatccttccagtaggtatccttcatatcgtacatattaggaatcggcaggtcgccctccatgagcctcgtgacatggaaagtcagcaccagactggaacgccgcaacatgcggctcaccacattgacgagctgatccacatgctccctaaacttaccgaattcttcatcgtcaagactcattgccttcttcagggcgcatttcacgacacacatcttttccaccgtcttgtattctggagggggtctggcgatgagaccattgtcttcgcataaacggacaatatcgtccttcttgtcctttgatgagtatgctacttcggccaattttagtagctccttcaatttcgcgactgtcggaggtttcgttgccatcttacataatttatacatcacagaactctttatacaaacatcacatacgtgttccatacgtggtcaaaacaacccataatgattttatcagtgaggttgctgaatgctaaggaaatcatatcagacacgtgcgtctttgtatcgtttggtatatagttcaatcgacgaaagtccttcttcaccttagcgaagcacagctcaatagcattgaattctggactgtaaggaggagtgtaacaaatatttacggggcttctgaggaccaagttcttatggatactggcgttgtccattattactactgaattattgcacaaactcaatgagtcaataaatgcagcgaagtccgtcttcttcacagatcctttcttcacaacgaactccttcctaccatctgaaaaaactgccatcaacaaactatggtgtacccacccaccagtagttttaacgataacaggttttcctacaggggaatacccataatgtggcttgagacgctcactaaacccacattcgtcaactgatactaaaattttcccagcattgattgtttccttgtacctactacaaaattcattgacaagtggaactaagtcccctttgcactgtccacggagtttgctcctttttcttgtaaaaccaatgagttttatgaaacgatacactgttttagttgataatcgtacattgtgagtacttttgaaaaaagcaacaacgcctcttgcggttgtgcattgagttgacaataaaaacgattttaacaaatccttattcgtctcaaaaaggttgcttacaaattcacgtcgttttcgatttacaccaaagcgtttccacctccacagagtagaacgactgatgttcgtaaacacagaagtttaacacacccaagtcagcgaccattcttaacgccaattttctaacggcgatgtcgtacatttatttatctgatatatgtttcattttactgttccgccgactgtagcactacacacgatgcacaagtcgacgccagaaactgaggacgttttgtaaccgatcttgtcaatacagatattgtcttcataaaacattcaaggactgtaaaagttacatcttcaaagtagccttaaaagcaaagtgctggctcacatcgtgcgcatcaataatcatttcaattggtgcccgcgaagcgcacggcctgtacacagtgccctcctgccgaccattctcggaccagctcccgtgcgagagagtcgtactcgtgtcgaaacaccacccacttgctcgaggcgcccacgtggctgaacctcctcacggactggagttccccgtcgttccacacgtacacgttgagttccaggtcgtccggcaacgctccgagggcggcgttcagtgcgtgcgtcttgccggtgcccccggcgcccaccacgaccaggcacgacttggcttcgctaaggaggaagtcgaggatgatccgtgtcttctccacggacgtctcgcatgtctcgcgcatctctgtgtctgacattggtgattcggacatcgcgattaaagtagattgtcacacacgacgtcactttatactacaaaatggcccgtccagcaaagaaacctccttacatgacgcaatgcacatcaacaaagaccccgtgttcttttggaccacggtaccggggaagaggcgatcgcttaagtgcggctggtccttcaatggacactctcgaaagtacacccaagtcagcgaccattcttaacgccaattttctaacggcgatgtcgtacatttatttccatctgatatatgtttcattttactgttccgccgactgtagtgggtgtgtcccactttatttgagaacaactgtacattacaaattatggtgtaaatggaataatagatcattcaatgagaacaacagttgttacagttattgtaacaacatgcgagaacacgttcgcccattttcatttgagcgtgtagcattcagcgatacaggaaagataccatcctatatacgcatcagtaaatccaaaatacccggagcagggaggggcctctttgctatccgttcgctacccactggaacaccactcacagagtacccaggacctgtcatcaacgaatcgaatgtgtcctcgcgtacacgatcgggaaagcgaaaaagtaaacgtgtacatgcgtacgcatttgagatcgcgtgcaccccaaacgttctcacgctccaaccagacccattcgatctgagcaagggagtggcacatatcgcaaacgatgccatccatccagaagtgacgggattctcaaacaactgcgaattcatacagaagaagaagggggagacggaagaagtgtacctatgcacatcgaggaaagtgaagcggggagaagaattgttcgtggactacttgatgccatactggattaacggaaagcatccgcactctgcaatgtccaaatggctgaaaaaggcccgcagaattcaacacacaatgaaagccatgggtgtgcgtctcgagcaatacatgggaggcgatgaatacgaaatagtagaccctgacctacgcgtattctgtggagaatgcgaacctacaaataaaagagtgatcaaatgctgtccttcagaatccatgtacacatgctcagaatgcaagaattgcatcatttacatgtaaaaatgagctttggcggctgcttccaggcatgtagcccgcttccaagcatctgcgttggccatgatcatgcgtggaataatgacagaagccaacgtgtttaagatccattcgcggatccgcgatctgggctggtactgacagggatgggcgccatgagatattcctactctgccccattgaccagtatgtttttacttaaaacggaatgcaactttaatacagttgttctcaaataattttgggacactcagtataatttgaatgatatcccctgaaaccaggtacaggtccgtggttcactacaaatattttttgaggagtctcaggaaggtttgtaatatatacaacgtgtccaagagctcactacatagatgggtcaatgctgatcaggtgggtaaaagtaagcgtttaaaacgaaaaaggaaagaattgtccatgcttttacgttccacgatatccaataatattgcagagaaccccttcataacatgcaaggatttggtcggtataatttgcaagagttgtaatgtgagattatcgatcagtactgcatcgagacacataaaacaatgtggattttctaggaagaaggcgtttcccacagttctctacggacattcaaaagaaaatgtagaaatgttttgtgacaagtacatagaaagctctaacgttgtttgtatcgacgaagcaggattttacgctggagaacacaacaaatatggatacagcaagatcggttctcgattaactacgaagacaatgagtaacctccgtcgtgtgaagttcactttattactcgctatttcatctcagggaataatagattatcagttattggagcacaattgtaaaaaagaagatttcattaaattctttaaaactttggtcatcccaaagaaaaccacgatcgtcatggataatattcggtttcaccattcttcagaaatcaaggatatatccgaatgcaaagggtggaagcttttgtacacccctcctta

SEQ ID NO: 179 - DNA, 22403 bp, unidentified
  misc_feature 1..22403: note = Fanzor polypeptide
  variation 18184..18367: note = n is any nucleotide
  source 1..22403: mol_type = other DNA
gaacatcgctctgatcacaacggctttcccctgcagaaagtttggcaattggcggggcctgtgctggttgcacacgcatcaatcgaagaggaactggtgggcaagtcaccggaggcaaaggacgccgtccggtcgaggacatggtggaaagttctggagacaaccaggcaccttctagctcacccttctatcacagacacggatgaccttctgaagattgtgttggtgaacctgcgtgctttgttgtatgctgcccgagtggacatcaccacccaccgaaagtggaagttcctcgactatgagacaaccgtgagcttcaaagagcccggaggcaccggagagaagaagaatatctgggttgacaagatcatcacggtcctcctgtcatccctcaacaactgcactgttagcgagttgcgcaacgactttgacaacacgactggtgaacatcaggcacttttgaagagatgccgactgatatttggccatgtggcttttcggctgaaggctagggatgatgatgcatggaaggttgctgcaagcgagttcaaagtattgtaggacgtacagtcagagacagaatttgtgggacacccttaccggtgacccttgaacccaattgatgcgcgcgatggacacgtggcttctcaagcagacttcagcgatctgacctgcttacacgcgtgatttgggagagaggaacacgcgtagaatctgaacggattacgcatgcatatcgaagcatggagtggggcaggggaagtcagctcatgactcactgtatctttatcgataagacacttctccaccctcagtctcctctatttcttgagacggaccgttgaatttaagctacccgtatatcctcgaacctatgaatttcttactaaacatccgggggcccgggggacatgtagtaagaaagacaacgaattctccataggggtatcataggggtcaactccccaggggatgctgtcctttacgaacagggattttctgttcgaacagccttcaggaagatgccagctgcccccacaatgtctctgtcgcaggtgaattgacagttcttgcaggtgtatgtctctccacacttgttcaagaaaccgcacatagggcatgtctgacttgtgtaatgctcaagcacatgcaagaacactgtcccgtactcttcacacttctccttcagccgattgaacagcacagagtggctcaaagtcagcatctgacgggcaaccttggttgtcagctcccgttcagcactgattgtcatcttcgccgtctccaattgaggtaccaacaacacatcgtagcgagcggccaagaaatttgttgtctggtccctaaattctttcttgaggtaaaaaattgtcttccgaatgcgaatcatcagcttctttatcttcatcctctcttttgatcgtaaggttttctcagtatccaaccttgactgcagcttgtcatgaaccagcaggagtttgacaaggtcggatgcctgtccctgaccaagcatgaaggattcctcattctcaggtgagtacgtgaccattgtctttcggacgcctgggtcgatggaggcagttgcaaccttgtctggattgacaggcttccgctctgcccttctgtccctagcagcgacagacaatacgaggaaatattcgccgaagcgggatttttggaccttcggatcgtgggtcgggttttcctcaggcatcaacttatggagttgtttgctaccgaagtagcgcatgttgcccaatatttctttgaagatgaagagtttgtcgccatccttggaaacgttcttctgatccatctcaatgacccaacccctctcaagctctgtcttcttccgtctgaacggagctgaaaactgcttgatgttacctgctttcagattcgaaaagcaagccttgatgtttgccaatgcagacttgattgcgctttggcgtacgcttttggggcattgaagcaaccattggcgattcttgaagtacgggtttggcatcttcccctcccccctcactttgttcgtcacatacctgtctcgaattcggaagacagacttgtgagtgctcccgacgcccaaccgtgctgccaccgccttgttgtacatgaaccggctgcaccccgcaaactctgccagcatcgatttctgagccttggttgggttcagcttcagctttaaggtcctcaacttgggtttggcatttgactttgtagcgtcttcgaccgttccatcggtaactatatacttgaacgatggacatgaggtcttttccaagctcgtcttcaggggctctgtcttggtgatcgagaacgatgatcgagtaggagtgctgtgagcaaatccattaaatgagctcgaaaccaaaccttgcgtgcctgtctttggaagccacaacaattgacgatacatgtcctgccgtgacgagtcccaatactcgtaaaagtccagggcgcttgaagttgagccctgatccgacgtccttgacttgctcgcatccggaatgtttgtcagaaatatgggtttgcaagaacaattgctgtctgagcaggtcgtgttattgtttgtgtgaggacacacgtgcgtagagaatgacttgacgactgctggtttttttttcctgctcgatgaggtagccttggatgctgcttgggtcaaagagacgttggttgcctggagtccggatcgttctgatcgtgccattatctgcccatcgacggaggacggtcctggagacaccaagggcatcggaggccttgccaattttacagaagctttggttgccatacatggcattctgatatttagtacatgcaaattccttatacactgttagatttacttattttcggaaagcaaacgagtcaactgttgcaaccttctcctcatatatacgggcattctcctcctgctcgatgcgaaacttctccacggaagcgacgtaggtagcatgggtcgcgttgagaatcttgaactcggtatcgaatatcacgctcgcgccgggccactcacagatattatcccacatcacagaaacggtatccacacgcgcagacagtccactccccgcatcttcgaggttggctctcagggatgccagggactctgtgtcgcgagtgcgctggaagatctggacgaacacattctcgatattattgaggacatggacaggaattcgaggctggcgagcacgccacgctttcctgatatcggaaacgatacacgctgccttcagataaaagacataaaatcgcaggcttttaggtatgtcaggatcgtcaagatcgtgtgtatcagcccactgcgtcatggcttcccacttggcattcgattcgaatcgaatcgacgagcattgatgtgatgtcgtcatacgaagcgaatcgaatcgaaacgaatcgaatagaatcgatctgatgtcgatgacgctgtcgatgtcatcacgcttcaattctctacgatcgacgtaaagatcatagagaattgaagcgtactcagtgtgattgtgaaagaatttcatctcaagcatcgatacggagatgtcatcgggatctccttcgtttttgtcaacaaaacccttgcacaaacgagagtcactgcgaagttcacatccgcgagactcgagagccctctccaaaatgtgaaggcgagtatttgtagcaatgatgtctgcagcgactttcacaatacacccccctcttccaaaattaacgtacaaatctcgggccctgcatgcggagtccgaaaatgagaatatccttgaatccaacggcatgtcaccaagcttattggaaagcaacgccgcacgagaggtacgtcgctcattcttctcgagcgcaacacgagccacgtcgcggataagataagataaacgatgcacagaattttgtttgagttcgcaactcagcgtcgtgagatcactctcggtcaagcgatactcagacttggcattcgacacaccgatgcgtgcgtcgcgcatagccctcatttcggaacggaatttggcagacaggatgcacgctcgaggggtgcgagcgacaacttccgcctccatcagcctcctccacaatacggatttggaaccgtaaaccatcaggccacgatcgcgacacgccttcttgagaacatccgctttgcttgcctctgaaagaccctcgggaatacgcatcctctcgaactctgcatcgttcacaaggtgtccatcaggctccagcttctcttgcacagcaagaccaagctcggagaaaaaaaacgtttcccaccaacatgaggttcgcggcgtcctctgagacgtcgcataatcgatggtatttatcatcactggttgataaatgaaacgcgatgatgtggagtgggactgcagaaagaagttccatgatttgttacaatatgctacacttaaacattatgctactgatacacttaaacattatgcttcagagacacttctttgttcgctgttccgttgactgtacataatgcaggttcgccccatgcttaccaccaacaccctgctagaccaaaccatgcaccacttccctggtgcggtccgcccagagacgtggccgtttactgcaaggatggggtgcaatatgtagagagatcagccaagaagggcgcgagcttcctctgcatacaggatgcggacgcagatcaggctgtgcatgcgagcttccgaggccagtgcttccttacggtgcccgggcttgagctcaagagcggctttatgagaatggcaatgcaccgctcatccaggaagcggatgacattcttgtggcgagttaagttggggaaccgaagggcacgacggggaagcaggccgtagaaaatgtgctggatgggttggatgcccagatccttgagcgatgataccgctttatttctgttgcattggcctcgataaaggcgtgcaccgaatcgtagcgctcgatgttagcctggacgacgttgtcaaaaatcacagtcaccacatgtgagacatacgcctcgcgatccatacgctcctggtccgtctcctcgtattcaacgggcgtctcatcctctgcgctatcctcctcacgagcaatatcccgcgaggcgttgtggtcgcgtgaaatgccactgcctacgcccaaggcgtacctccagatgacccctgtcataccactgaaaacggattcttcaggacacacagagaagttactcggagcctacgtctttcctgggatagattcgggaatcggaaccaatgcgcatgtaactgagcccccgtcttctgtatgtcttctcctcttcttcttttatgctaaaaaaaaattgacgcctttttccttcctttgaaacaacaacaataacaacaacaacaacaacaacaacaataacaacaacaactacttgatatcatgtctaccaacaacatgtctaccgatttcacatcattcgtgaatgattccggtatatttacagttgtccaagtgaaggaccaaacgaagatcaacaatcaactcaaagtctctcaattgaaggacatgtgcaacaagataatttcatttcccctcgttcctgcgtgcctcgcagaccctgtctgcgcaatgaaaaatgcgtacgctaagttgctcgaagagaaacccaaagcgaagaaagatcctttacaggcaatgcttctccctattgccttagctgccaccgctgctaagtctgctgctgctcctgctcctgctccttccgccttgcttgccctcgccagtgcccttgccctcccagaggacgaatgcatgtcggagagttccagcaatggcggtaaaaggcgccgcgccaatggttcaccatctgtggctcctactcctgctgcttctacttctgctgctgctgctccgggtgttgcttttacgtttactgctactgctcctgctcctgctgctgctgctcctgctgctgctgctcctgctgctactgctcctgctcctgctcctgctggctcgttctcaacgtgctccctgtcctcctccttggcctccggtcgtgttggtcgcgggtccgttctaaagaacgagcttcctgttggatccaatatagatgcatttaccatcgtggggtattcccccaccctggtctgcactgctgtcaccattcacggcaacccgtgtggtagaaaacaggcgatcttaagcaaccccaatggtgggaccttcacaactggcaagtgctcgcacctatcgtgcatgaaacagactcccgccaagcgtgaggcgtacctcgccaccaagcgacctacgcttgacgagctctcacttgagattagctccctgaccctttagtcagtcagtaagttagttagtcagtcagtaagttagttatttagatactcttttttttgatacatttttttagttatttagatactaaatatcacaatgagaagaagaagtagtgtcagacaaaggagaaggggctaaaacgtttgagaagcagaagatggtggtaaataacgtcaaggtccactaagtactgcactgtaacaacagtgtcaaaagcgcatccaatgtggctatagtgcaacctggaacctagacgtgaactctgctgaaccttcttctgcttctgataacgtggagcgaccggatgtgttccctcgcccccccccctaaaaccccagcttccggagaggcaaatgtgggcgctcaaccaaccgacccacatgggtcagttagcagcttacaattgttatcctctgggccagcttaaatgctgaaatacgggatgaagggacacgaaggattgggaccttgatacaaaacctttagctgacctacccaatcaattgggttcaagggtcaccggtaagggtgtcccacaaattctgtctctgactgtaattgtattcacattgtctgtgaaggtgcgcgttcccttgatccattcattcattcattatcgtgcccagggtcggctgagtcagcttcctctgcaaccacctccagctgacgcgtcccgtcgcccggcttgcgttcgaagacgtgcagcgtcgtcccgtgatccgtggattcgttctggcaggcacagatcaccgccatgaccgcctggtagtcgacgcagtgggggtcgactcccacgaatgacagggtatccaagccgtcggtgaagatgcggctcgtgttgccgcaggacttgccacaggacttgccggggaacgcgtcgtcgatgccctcgtaccgcatgaccctgtcccagagcagcgggtggtggaggacctcgggcgagaagccggacatcaggttcgggtggatacggatgcggtagcgacggcccgggacgaggaccacagacgtctccatgagaaaatccgaatatacatactggtacgacagggtctctttacacgaaatgggtagaggacacgaaaagcatggacaattcatttttacatgtaaatgatgcaattcttgcattctgagcatgtgtacatggattctgaaggacagcatttgatcactcttatctttgtaggttcgcattctccacagaatacgcgtaggtcagggtctactatttcgtattcatcgcctcccatgtattgctcgagacgcacacccatggctttcaatgtgtattgaattctgcgggcctttttcagccatttggacattgcagagtgcggatgctttccgttaatccagtatggcatcaagtagtccacgaacaattcttctccccgcttcactttccttgaggtgcataggtatacttcttccgtctcccccttcttcttctgtatgaattcgcagttgtttgagaatcccgtcacttctggatggatggcatcgtttgcgatatgtgccactcccttgctcagatcgaatgggtctggttggagcgtgagaacgtttggggtgcacgcgatctcaaatgcgtacgcatgtacacgtttactttttcgctttcccgatcgtgtacgcgaggacacattcgattcgttgatgacaggtcctgggtactctgtgagtggtgttccagtgggtagcgaacggatagcaaagaggcccctccctgctccgggtattttggatttactgatgcgtatataggatggtatctttcctgtatcgctgaatgctacgcgctcaaatgaaaatgggcgaacgtgttctcgcatgttgttacagttgttctcactgaaagatctattattccatttacaccataaaattgtaatgttgttacagttgttctcaaataaagtgggacacacccactaccgcatcaaggcggcacctgtcgagtcgagtcacagagagaccgacctctcgcgtttcgccgataagttcatcgaaaaccccaccaccccctgatactgatatgagtgaacacggccgaatagttcgtataagaagatctttcttacaaacaggtatggaggattttaaacggagagtacgtgtgtggcacgaaaacattcggatattcgaggatcatgtccctcctcgtgcttctttgaaagtttcgtacgatccttccttcgagtttgatcgcacgaaatatacgatgcggaccgatatccgtgtcatagacatggacacattagatgcgaccctagaccttataaagcaaggtatgcacccgctcgtcttgaacatggcggacatacataatcctggggggtgcgtgtcttgtggaggtgggatgcaggaagagtcgttgttccggaggacgaactaccatcgtcatctctcgaggtcgttttacccgatcggagaaagggaagccgttgtatcgttcgacgtcgacatcatcagggagtgcgagagagacggattcgagttcctgaagttttctaaatcggcatccttcttggcatgtccgtgcatttccatgccacagctggtggacaacaggttctcagagaaagacagtcaattgtttcgcgaaaaggtgagactcgtattgagtgtagctcacaagtacggacatgacagcatcgtattaggagcttggggatgcggggcgttcgggtgtccacctaaacacgttgccgagatcatgtttgccgagatcgaacaggtagaagggtgcttcaagaagatcgttttcgcgattctacagtcggcggaacagtaaaatgaaacatatatcagatggaaataaatgtacgacatcgccgttagaaaattggcgttaagaatggtcgctgacttgggtgtgttaaaaacttctgtgtttacgaacatcagtcgttctactctgtggaggtggaaacgctttggtgtaaatcgaaaacgacgtgaatttgtaagcaaactttttgagacgaacaaagagttgttgaaattgtttttattgtcaactcaatgcacaaccgcaagaggtgttgttgcatttttcaaaagtactcacaatgtacgattatcaactaaaacagtgtatcgtttcataaaactcattggttttacaagaaaaaggagcaaactccgtggacagtgcaaaggggacttagttccacttgtcaatgaattttgtagtaggtacaaggaaacaatcaatgctgggaaaattttagtatcagttgacgaatgtgggtttagtgagcgtctcaagccacattatgggtattcccctgtaggaaaacctgttatcgttaaaactactggtgggtgggtacaccatagtttgttgatggcagttttttcagatggtaggaaggagttcgttgtgaagaaaggatctgtgaagaagacggacttcgctgcatttattgactcattgagtttgtgcaataattcagtagtaataatggacaacgccagtatccataagaaattggtcctcagaagccccgtaaatatttgttacactcctccttacagtccagaattcaattctattgagctgtgcttcgctaaggtgaagaaggactttcgtcgattgaactatataccaaacgatacaaagacgcacgtgtctgatatgatttccttagcattcagcaacctcactgataaaatcattatgggttgttttgaccacgtatggaacacgtatgtgatgttggtataaagagttctgtgatgtataaattatgtaagatggcaacgaaacctccgacagtcgcgaaattgaaggagctactaaaattggccgaagtagcatactcatcaaaggacaagaaggacgatattgtccgtttatgcgaagacaatggtctcatcgccagaccccctccagaatacaagacggtggaaaagatgtgtgtcgtgaaatgcgccctgaagaaggcaatgagtcttgacgatgaagaattcggtaagtttagggagcatgtggatcagctcgtcaatgtggtgagccgcatgttgcggcgttccagtctggtgctgactttccatgtcacgaggctcatggagggcgacctgccgattcctaatatgtacgatatgaaggatacctactggaaggattggctaaggatcggagttgacggtgtcttcccagatgaagagagtagaatatcatatgaagccgtgaaagacgtaatcggaaaggtgcttggtagcgatgaccctgactacatcaactcctaccctatctatttcgaccaggttttgaactatgccggtcacacattgagcactgtcgtgtcgaacaacgcatgggttcctttggtacctcgtctgacacgcctcactaaggctactttgaatgcactgaaagctccgaagaccatccgtgtgtacgacgtgatgagggttatccaacaagaaatacaggagatggaatcttggccagagtctgttcaggagtatgtccgtgaagttcgagtcaggctgaaagttccagatggaagtcgactttatgatgactatggcaaagacatggacttcccgaccatggtccggttcaattattggatgcagacacggttggagtctattggtgcacgtcgtatccggttgatgcccatctttaatgtccaacgggcgcatgtccgccttgacatgaagaccctcgtgaacctattcaggcacgtgttccccaaagacccaaacatcgtcgagctttcaaagtggaaagatgtaaaggatcccgaccgcttcatgttgcctctgaagcctgcagttaagaagaaaaaatcatgtggtcctggtgaatgggaggcatacaagttggcccaacagaagtacgatgctgacgttaatgatatcaaggatactgacgagtacagacatgcaaagggtaggtatgacacgctcgtgaacgcccgaaaaacagtcgcaggttccttcttcaagaaaccacctgtcaagacggggtgggtgttcgattgtagcatctgtactgacggagtctcattgagcatgcagtacagcaagacagtacaggttcgtgtatccgatctgaagaagacaagtaagaggtctcgtgacgatgaaggtatgagcgtctcagaacagtatgaccataaactcaaaacgacattgcccgatatgggtatcgtcgttctgggtgtggatcctggtaggagcaacatcgctacagtcacgtatctggcagacgacaaaagcaagacatggaagcttacacgcggagctttttaccacaagtctggtatcaagaaacagaaaaaacagcaagaaaaacgtttctcagacatgattcctagatgggagtctcttcgtgaaaatggagcagcgttgagtacatccaggacagatgatatctcggcttacttgaaaaattacgatacgttttccgacgagtggtggaggatggcactccttcgcagagaatcccgagacaactttcagaggtacattggaaagcgcaaggctatggactcattttgggcagggatcaagcgcaacatgaagttggatcatcctgacctgagggttcgcgtagcatatggttctgcaatcacgactttgaaggctaccggaccaggagaggtagctgtgcctacgggatctatgttcgcttcctgcaagcgcctcttcaaagaggaggttcatgtgacagatgagttcaagacgactctcatgtcttgggaaaccggtgccaagaaggaatgtgtttacaaaattccaagtgtccaaataaccacggaagggcagattcgtctaggttacgagttgttgggtcacaccccattgaaggagactccaaatgtctcttatcgcgaccagttggcggtgagggtgtactgcacacgtaaacaaatccaagaaaaacacaggaggggtggcttagccccctctcttgtcgacaacaaatcgatcaagcggtaccctgaggtacgaggactgcgattctctccagaaaccagcacttactcggaccgggaccgctcctctgctctcacaatcgcaaggctgcactgcatggaactgttgggtcaagggagaccgcttccattttgcagggatgcgtgattgttgatgggctacaaaaaaacatgatggtgttccactgccccgtgggtcgctacaccataaggttacaccataaggtgtaccgtacactccaggaggcggtttcattttagtattccgtcgagtgtaggtaaaaacatctatttctttcatctcgcagaaaatgaaaaaaaaagtaggaaactttcggagggtacatcaccaaagtagcacagatgtcgtgatagcatacacgtcaacagtttatccacatttttcccccatttttgctttatccattcaatgatattaatcttttgctgtttatgctaaggaaatcatatcagacacgtgcgtctttgtttcattcggtatgtagttcaaaacgacgaaagtctctcttcaccttagcgaagcatagctcaatagcattgaattctggactgtaaggatgtgtgtaacaaatattgacggggtgactgaggaccaatttcttatggatactggcattgtccattattgctactgaattattgaacaaactcaatgattcaataaatgcaacgaagtccttcttcttcacagatcctttcttcacaacgaattgtacaggagcagctctacagagatcatggcgcacaagttggtcgtgtacgcgttggttgagaacaagttcattcagaaaaatgagatcgtcgtcaaggttggctggacgtcgaagccctttggtaagcgactttctcagtacccgaagaactcaaagatgatcttcgaaatccacgtacttaatccgcttgcttgtgtggagtctgagactgtcctgatccggtaccttcgaggagaccctagagtcaagccccgtcgcgacgttgggtacgagtactaccaacttgacgcaggtgattcaggtgccgtctttcaggagatggccgatgtcgtattacagtacgtggggacaggtggcgtcgacatgtctatcaagtctgtctcagaatacgacagccttgattgcggcaccgaggacgtgcctccagaccccccccagctttgccgttgttgagcgagagaaggaacgcgagaatgagcgagagaaggaatatctattatgtgccctgagctgcttcttccccattcgacactacgaccatcatcccaaatctgatgacggtgttcgacgaaaagctcaagggaacacagatgttctgcggctacaacatgatgtgaacaacaccgctaggctgttcagccatgcatcgtgcggcgttcgcgacgggtgggacctgcgaaaggtgtccaaggctgtgaagatgatcctgaacgccgtgggtctggatatggtgagcgtgaacaagcgggtgcaggtcaagggaaagagaacttaggaggagaggaactacctcctgtgccctgagagtgtctgccgtatgctcgagctcgtgaaacttcgtcttctgagcactgacctcacgccgcagctgccctttcgtgacaagagatgtccatgtacagctctccggatgctggagctcttgaaaacttcgtcttctgcgcacggacctcacaccgccgcagcgctgccctttcgggtcacgatatgtccatgtacagacagtccatcggcaaacaacggattgtattattcaacaagcggcggagcccctttcacctcttcccccagcggacccccctcaaaggagtgtaaaaacaacgcagaagaccatttaactaaccttattatcctcttcacaaccagaaagacacaaactatacttaaacaatagaagagaactgttggaactgagtttattataacttttccaatttcttagctttattaaaagtcatggtcacacaaatgatcctcgcgtgcaacgggagtcataacgagatcgcgcgcatcgcgaaacgaatacttggaaaccgcatcgctgccgccaagagcacgaacggaaagctattatggtacgtattcgacgggcgatggaagacggacgtcgacgcgatccacgtcaagcacgagctgtccaccgttgttctagagcacttcattatcgctatgaacagggagagagcgtcccaaagcgattacgacatgcagagaaacgatgagagcacaaaggacgactccgccgacctagcgcacatcaccgcgcgcctccaggacgcgaccttcaagaacaacgtcctgaaagagatgctagagtacttttacgaaccggaagttattaagaaactcgacgccgaccggctagcgcacataaccgcgcgactccaggacgcgaccttcaagaataacgtactgcaagagatgctcgagtacttttacgacccggacttcatgaagaaactcgacgccgacccaaacctcttagggttcaacaacggcgtgtgggacctcaaaaacggcgtcttccgtcaagggcatccggaggacatggtctccatgtccgtgggattcgattacaatggcgcagtgtgcgcggaatcagcagaccgcgtgaggaaatactgggacacgatgcacccagatatataccaacgagaatacctcatccacacatttgctagacagctgtacggagacagcggacaagagctctttcacatacacgccggcgccaacgcgtccgcctctaacgggaataccaagttcttcgaagtcatggagatcgcattgggcgactacatccgaaaaattcggcgtggaaatgctgacaagcaagcaacgcaacgatccaggtcgcccgatgccagaggttgcgacgtggaagggggtcccgcattatgtattgcacagagccaaaccacgacgaagtcttaaattccggagtcctcaaggatatgacgaccggtggggaagccatcaccaccggtgttcactccagcgacatcgtaagcttcatccgctcgcaacacaagaccggtggggaaggcatcacccaccgcctcttgcactccagcgacatcgtacgcttccgcccgcaacacaagatacacatcatgtgcaacgccccgccgatggtcgacggttctgacaagggagtccaacgacggatacgaaaactcgactacatcagtaggtttgtggacgcggatgaggcggacgccgcaaaattcctcttcccacgagacgcagggcttgtagaggcattcaaggcagacgacggagcgatgcgcatggagttcctacgcacccttctacacgcgtttgtatacgagtacaagttcgatatgcccgattcgttaaagaagaccagtgcgatgtacttgaacgcgaacgacgacgccttggctatgttcgtcgaagagcacgtctctgcggccatcccggccatggttatggacctggaacgtcacctaagagaagagacggacacggacctggtccttctcctacagcaagagacggacctggaacgtcacctgattaaacgaaaaactttgagagggatggtgtaatcgataggggggatctctgccctcgcggagtgggtcaggagaatttagttgcagaaaacctgtcaagtcatcatacagctacagtcaacggaagaattacaaaaattgaaaagcttcgtggtcgcgaatgtgtaaactacgtcggcggaacagttagtaaaatgaaacatcccagtgggttggctacaccatttggttacccgttaaggtgtgccgtcactcaggaaaacggtttcatttagattccggtcaagggtagggacatttgattgtggggacaccttttagttgaaagttgattattggtataaggaaatgttgagggcaataaaaaacccacaggtcaggtagcagctacaatgttatccctgggcagcttaaatgctgaaatacgggatgaaggacacgaaggagtgggacctgttatacaaaacctgagtgacctacccaacaattagttcaaggccgcgtcagcttagctactggttgtaccgaggttgagacctagggtgacgacaatgtcggcactttgtcttattcacacaaggaaaagagacatttattttaacatcaggccagggtcttttaacacgcatacttttgttgagtagttagaaaatttggactgtccaactgacacagtaattatacttgacaacgttgcttttcacactccaagaaggtcacaacacttgccagcttcaagggggtgggtgggagctcctattacactcctccctactcaccttggttcccacccacccaatagaagggggttctcaatcgtcaaacgcgatttactgaaataaaagccaagatgtgttataaggctttgagtctgtaaagagaaaacgtagaggctttttttgagagtcatgatacaatttcttgaccttgatacaaggaaggaaatgataatgtatactaaatgggagacgatagtcaataaagcgcacggcaagcgtacgcgaccaggaccgggcggcccacaataaggacaggaaaaacggcggcgaggaggaacgtggttaaagtgtacacgagtcgaatcatagcggataaggacaaaaaggacgttcaccaaggtgattaaggagagggtccgacagcgtattccaagaggattatttgacggtggcggtgaaacggatcttaaaagaagtcttcgaaggggtaccagatgcgcaacttcacacttgtaagtgtccctagcgtcgaccagaacttcattcggcagctgatggatgggttcgagacaggcgctaatggagacgaggggacgccacagtcgaaaggttctgtcacaacaactattggtttagggagaagatgaggtggcgcgaaggtaattgtgaaaaaagaagaagcaacaattacgttgggtgcatcgctcgctacggatggacgatgaaacctgtttacagcacgcgtcgaagaagtacctgacaattcaataaccactacagagtacattatctcaacatggatcacgcaagtcgtttactcgaagggaaaacaggatcttggccagagttcaaagctgagcacggcattgagagacgtattccaccgattactcctacgatatccactcttggggagtaaaggaagacctcatagcgatacattctctccttacgacggcgtaaggcgaacaaagagatttgttgctgaagagggttcagcactcgatcctatcggacaggacgagattcaacgacagtgttaagagcgttccaacaagcgccaagatgatcggttaaacgtcttatcaatcgtacctcgggccacagaggcgagggctacgccacagctggttcaacatcgctcccatccaaacagtcaagcactccttaatcacgatagacaacgacggcctaggggagtcatcaaggaccgtgggtctcgtcgagagtctcgaaaagacgctgacgaacaaggagcactgggagtcggtcttcgatgtggaaaacatccgttctactgggaaaggtgtgtttacatgcaccatagacactgacggcgtaatggcttgtacccactttcttagggccgagaagaaaaagatttcaatcaaggacgacggaacggcgattaagaagcagaccaagggactatatgagagttttccgagtcgaacccaatgtggtggtcgttgcaaacgaccctggccgctgcaacattgcctttttgacttggaagaaaaataaggtcaaagaaaaagataaggggggtaggaagaggaagaggcactgcgagttcgggagcaagagactcacgcgggagagcggtaagacgttggagaggcggtcttcaaagtagaggtcacgaccaaagaagnnnnnnnnnnnnnnnnnnnnnnnnnnnnnnnnnnnnnnnnnnnnnnnnnnnnnnnnnnnnnnnnnnnnnnnnnnnnnnnnnnnnnnnnnnnnnnnnnnnnnnnnnnnnnnnnnnnnnnnnnnnnnnnnnnnnnnnnnnnnnnnnnnnnnnnnnnnnnnnnnnnnnnnnnnnnnnnnnnnnnnnnacgtcttctcaagtccgaaccatcttctttgagcgtccaatagtccgggcatgtcgatacgctcatgagtcgccgtgtgtcgaacgcggtttgccctcattttctttattctcgcctcgtagttccagacggccagtagtgaaactattgacaatgcgaaaagaccaaagaggaccgttgacaagaataacttgtactcggtaaccttttcgatatactttttgcttttgaacaaggccacaacaacaaccgcgaataggaggcagcatgtggcgaaaatcaatgtgttcatgtacaagttctttggctttttgtcatcattctcgtaaaccatagttgacctcctgcctcttttttgtatacacttgttctaaaaaaaaattgggacaccctgtactgtaatgtgaatgatatcccttgaacgaatgccaaagcatctaaaaagcagaccagtgtacccaaatgtgcagccccttgggttagccctgtgggttaactgaaggtgagaggggttgtgggcttgcttgtcacgcttttcagggagttcatgcagcagcaagaagggctggggggggtgtcatgaatttgtatgagggttaaatgcataaggtgtcccaatatcaaatgtccctagctgtatgtttcattttactgttccgccgactgtagggatgaatactgacaagcagtctgcagttgatgcggctgtgaaggcagtccagcaacaggccgaggctgaaaagcaggctgcagtttatgcggctgtgaaggcagcccagcagcaggccgaggatggcaagcaggctgcagttgatgcggccgtgaaggcagtccagcaacaggccgaggctgaaaagcaggctgcagtttatgcggctgtgaaggcagcccagcagcaggccgaggatggcaagcaggctgcagttgatgcggccgtgaaggcagcccagcagcaggccgaggatggcaagcaggctgcagttgatgcggccgtgaaggcagcccagcagcaggccgaggatggcaagcaggctgcagttgatgcggccgtgaaggcagcccagcagcaggccgaggatggcaagcaggctgcagttgatgcggtcgtgaaggcagcccagcagcaggccgatgctgctaagaagttgtggggcatgatgcgcttgcgtgaggagaataaggatgctcagttccagcaggagcttactgagatgttcaacaaacttgaacgcaaagagtgcatcattcggaaacatgaagcaagcatcaatgccatcaggtgtgtgctgagaaaacgaatgcacgttgctgtttccagacgtgcggcaatgcgttttgcatgtggtgagcaatttcatcatcaaatttcattttgccccccgtagggagcgcgcacttggatgtgacgaagttgtgtgtgcgggaagaagggcttactcatgcgcagacaaacgggggcagattcgtcaagcaggcggacacgaagcggtttcattttagtattcagttgactgtaggcaactgttgcacctttttccacgaaacgcggaagcgttcaggggcgaagatgacgagccccgtaccggaccagtgacctgacgagctgatgttgtacttggtctgcttgatgtcgtcccaaaaacgctgcatgtgttcgttcaagtgaatgtcgtccactatgaggagtccgtcgaacttcgcctcctccaggaccttgaagatatcgcgttccgatttgcccaggtggtcaatgtcgagaatgacgaggtctgaggttcgcaggtggtcagggagatcgcgcatgtagttcgggccgatctcaagacgtacgttggggatgtggatcgcggtgggaactgacgggtctgaaggtagggaagatataaggtcgaagctgcgcaccgtcttctcggtcgctaaggatagcgcagcggctgacaaaccttgaaagtgcccgatatcgatgatagtgggacgtcggacggaacgcgcaacatgtgcgagtaatctgtagtgctcctctccggcagaaaggtcaaagaacctgaaattggatgaccaccgacatactgagttcacactagaaaggtcgatcgcgttcaaatccgtgggatcgaggacgatatcgatgatctctgatgccattatttatcgtgaccgctttaaaaccttacagtaaagtgggacacacctttttatactctaaaaaactgcagatcgttgcttttgggcaatgttggaggagtgctggacactgtcagatttcgtgcagcgtagcatcgactttgtcgagctcaccttgattcggacgtgcattccacttgcgactgttgacaagtggattgatgtgtaaagcgtctcgtgtgaaaaacggggctgttcactgttttttggagatcgataaatgattgtgtgattatatctcgctggtactgtgtgaaatacgtagcatcaattgaaattttgatattatgtaaggccgatacagtagttctcaaataaagtggaacacaccttataatcgtccagactgcagatcgttgctttggggcaacgttggggggtgcagcaggttgaagaggttctcgaagatattccgagtagcctctttggtaaaccgttcaaccgtctgtgtccccatatcagtatcagggggtggtggggttttcgaggaacttctcggcgcgtctcggcgaaacgcgagaggtcgctctctcccaaagacttggtggagtgtaagcatcaggatgttcctggaagcgttcacatcgcggtcccaagtcttcccgcagtggagcctaccaccgctctggtggcgtggcgctccgctttgactgcttttgcagtggagaatcttgtgaatccgcttgcgtccttctgtacatagtgacgattgcgatgtgactgtgtgtaaattaccattttccgaataaccgcaaatcagttatatttgccaacgatacatttgttttgattgtcagtctgatcctatcatacagcacattatttccgggagaattcacaacatattggaaataattttgtaccttggtatatgtacctagtagttcaagcgtcgtttgccctggtcgaataccatggataacgaatgtggtaggtgtcctgttgaatatggtattcgttgctgcgtttatgccaatagacttcaagtatattccgaaaggaagttgcagctgtaaccagtcatttagagtagagctggtcgggacgtctgttacctgccataaagaggagaacacattgtaatcaaaggcctgccatgaccgcctcgttgctacctgcctcgacgaggtcactgtgtatgtcccgttaccataagcgtatccggacagagtagtagtgtaccctgtgagtttgttcaccgggaactcctgtatactctgagacatagggactgttacctttacatctggagattcattcatcgtcaaatagctccagaatgtgactgtactagtcaatgtggaccaaaaagctgcatacacggtgtctgttcctgattggtatgcaagccaggcattcttatacgggaattccatatctgtctgctgcgttcctacctttggtatttccacgctgcaatacaatgtgtttgtctgacccccgtcgctcgtaaacatcttgaaagaatacgacgcatcgttattcatgatagttggtttcatggagacaactcctgccgttgtaacgtgcaggtagtgctttgtcgtcgtttcttgcaacgcgtagcacgcaacctgtccgctcccgtcaaaaatactatcccctttcacgatctcgaactgcatttcggtaccagtgttcagccgcaacttcgatgtcgcagagtcgtatttcacatacactccattcatctgtaacttgaactgccaggggggggctgctttacgcgctcccctaaaatccgaaaatgctatcccgttcgataatgaatcaggcaccttggagttccctgtaatgttttgtacaaccgggcctcctcgaaccaaagagccaatattggtttttcctgtga

SEQ ID NO: 180 - DNA, 22397 bp, unidentified
  misc_feature 1..22397: note = Fanzor polypeptide
  source 1..22397: mol_type = other DNA
aacacccctacgccggcaggtgctgcgactggaaagaaggtgccactgctgtgccccgttggctcttcccacagcccacgcatgagctttatgcatgtgtacttcccgctgctctgctcaagcagcacctcgttgtcactagctgcaccacggatcagcaccttgcctgttatgtggtccaccggaaaagtgcgcttgtaggttccagtgcctttgatgacaatcggcttttcagcagcagcctgcttcagcatgtcccagttgccctccatgttgctgcccatgttgttgatatatctgtagtgagtgggaacgcggacgaagcggtttcatttaagtattctgtaaacgtcctaattacgttttttatctcagaaatgtcggtgagaggcgttggtcagacagagaatccatgattctcaggatatgccagacacattgtaactcgatgtcttaagtcgctgactcacacgcatgatgatgcatgcatgggcggcttgtgtgctcttgcgcgtgcggggaaaacacatacacgcggacttttggggactcatcatgtaacggtcaacagattgaaacatccgggtattagcccagaaaacaacagaacgtcagtggacatcgtgagaggaagtgactctcgcgcggttggtcaacttttcaaaagcctcaaaagacaggggtatattctaaaccctggctacagttgttctcaaataaagtgggacactttataatcatccagactgcagacaagacatcggatttctttaagattagcgatgggtgcgtagaaagaacaggctttgcgttgttgcaatagattcaaatctttgataaatcacatggcaacttttgacaagaaaaatggttacaccgcaaggtgtgccgtacacgaagcggtttcatttaagtattccgttgactgtaggggtccagatacagagggaagggaagggaaggggcccacttgcgagtacctgatggaatgcaaccattccaattcgtatccacaacggaaccaatgacccatgatgttttttagccaagcctttgctccgtcatacagtttgtgtttgtctttgtcagaaggttcttgcatgttgtttaatgtcttgtgtaattcacgaaccatctgaaacgagggcccaattcctattgaagatgcaacggcgggagtcgtttcctcgtcagtgcaagtaagttgaagtatggtattttcaaacatgtaagcacctcggcgaatttgatccacccatattatagccaagattatcctgccatcaaatgtttgtactgattgtatatttgcacactccataataatggaatgctttattattttgtctctagccatgacgcaccgatataaatcccccaaagtctgcatgtatgatgtgttttttctgcttctccttttatcttagtctggttttcgaataaaaaaaattgctgcgcatacattcattcacattcacgacgaattcgaggaccagcgcgcaccaatctgaatggaggagcgcggtgcatactgattactgaataccacgagtagactcctgcttgacaactcagttggatttatgaacgggaggagcgcgggcaccgtgtagcggtgcatatggattcagctgatgactcgctaggattaaagcaattcacaatgaagatcttctacagtcggcggaacagtaaaatgaaacatatatcagatggaaataaatgtacgacatcgccgttagaaaattggcgttaagaatggtcgctgacttgggtgtgttaaaacttctgtgtttacgaacatcagtcgttctactctgtggaggtggaaacgctttggtgtaaatcgaaaacgacgtgaatttgtaagcaaactttttgagacgaacaaagagttgttgaatttttttttattgtcaactcaatgcacaaccgcaagatggaattgatgggtctaggacgacctcttccatttgcccacagcagctctgttgttgttgatgaataaaaactcgtattgttgtagacaccactcggtccccctccggtggtcgcgacaacattaggttacaccgcaaggtgtaccgtacagaaagcggtttcattttagtattccgtcgagtgtaagcgtacgccgaacaagataagtaaacgtgaacccttggttgagcttgagcccttcatgtcagcgccaaaagtatacctcgatttatatgaattttggggtgtatacaacacttgtttccgacctgaggatggatattcatgccacgaagtgttcgtgcctgatgttgactgtgcgattggtgcgggcggtacaatggaggaggcttttgcagctgccaaagaaaagctgactgacatggtcagtgatttcatgtatcgcggcgaggccatcccgccgccatcactcccctccgacatcatcaaccgcagacagcaggacaacgagcaatttgccggcttcgtggtcaccttcgtcggagtcgtcattgtttccaccctgccaagtttatgtgacaaggcaggccaaccacgtgaactgctgccgtgccatgacgtgtgaacaccatcaatgacatagttcgatccgccatcgatcccgacaaatatgccgtgatgccccaccgtctcatcccaaaccgcaatgtgatcccccggctcggccttttgtgccagcgtatcgcagtcgcatttgtcacaagtggcaaaataactagcagacaattcgttcaatgtccatctgcactgctatgccaccatttagatgtatacgccaatgtcaagctgatggcttattaaaaaccgcatgcgaccatacacaacaccgagacgcgacattggaaatgcagtgtaaacacaatcagatacacattttacacacttacacatttaccaacatgaatcctgcagcctccggcaccatgtccatgagctacttgaaacgccatgtgtacgagttgaggacgtccatggatccgaacatcgttgtcaagctccagagcctcgatcatgacatggcacgcatatgggttgagaatgcggagggcgtttgtgtggacacacacgaggtcagtgtgcatgaggcaactggtgaggagcttacaatcaccaatgaggctgttcgcgtggagaggtcttatatcatcaagattaataagtcatatgtggtgttgttcatgggaagcaggatcctcaagattcacaaacagcagcagcatgcactgttcacagcgaatggtgctgatctgaagcgcatttgagtgggtagaaaattttgcctaaaggggccacagcaacctggggcatcgccgcgtcgagtcacagagcgaccgacctctcgcatcatgacggaacctgtgtcgagtcgagacccctggcaaaaacataggggtgatatgtattcctaaatcgtttttttagaacccacaacgaaacacagtttagcgaggacaccgatgaatacatcgacagccaaggcgacccatgcatgtctttgccagcgggagagcgcaaggattgcaaacaataggtataacgtgccgtgaacagggcgaagtttcgaccaccagatcttcccgccatctggcgccacctctatccccgttttccgaaggcctccaaagtatatgacaaagaaccctattgctggcacaagggccaagacgcccatgtaccttagatacataggtgtcgcgagaaaggcaagaatcacgaaagctgtcctgattcctatgcacccgatccagaaagctatttgtcttgaaatgttgttggccatcgtgttataatttaagttttgttttttgaggaagatttcaggttgccttgttccacatgtacctcgaggaaagtggggacagtaaagtggtaattccaccggcagtagtagggcacatcaacaaatatcccgtagatcccgtgttcttttgtgccacgggatctttgccgcccgttcctcaaaaaacgatataaatgaaatatgctgtgttcggaaaagcgtactccactctggtaaaagacgtcaaccatgtggaccactgatcgacacttgtacacttatccattctgccccaaatggcacggtttatttcgatttaagcaggaggaagggtgcaatgacgatgactttccattcgaatacgtcctggcgcttacggagcgagttcctgaaatcgaaacattgagcatggttgcgtacagcgaacctcagatcgtgagagtccctcgggtcatggtcgacacgctatgcgaacgacaactgcacgacaatgtagagatgcattgtcttcacgaaatcgtcgatgcgttgactgtcgcactcgaacgtttcaacggcgactctgatacgcactccaagtttcaaacgatcaagcaagacttggagacagcgatatcgaacacacaggcgtcgtgttcgaaaatgcgcatccttcttcggaacaagatgatgaagaaagagctcgtcgaagtcgcgtgggctcctgaacgacatattccctggtgcctcgacgaagaagaaaaaaatgggttgtaacacgattcacgtaaataagatgtacagtatcatgaaaagtcaaagtgctcacgatgtgagcattaataatattttcaaagcgttcctgtaatcaaataaacaccccccctgattgtgcgccatacgtttgaatcatcatgaatttattgctgtgatattgcagagcaatggatcccccgactcgcgagcaagtcgctaagctgcaaaactgttattgggacgtcctggaggagaacgcagagttaaagacctccgtactggaaaaggatgagctcattgctcgcttgcgccggcaactgaacactgctaaccacaaggtggctaagctccaacaactggtcgacccggagaccttgcctctacagtcggcagaacagtaaaatgaaacatatatcagatggaaataaatgtacgacatcgccgttagcaaattggcgtgaagaatggtcgctgacttgggtgtgttaaaaacttctgagtttacgaacatcagtcgttctactgtgaaggtggaaacgctttgggtaaatcgaaaacgacgtgaatttgtaagcaacatttttgagacgaataaggatttgttaaaatcgttttattgtcaactcaatgcataacctcaagaggcgttgttgtttttttcaaaagtactcacaatttaagattatcaactaaaacagtgtatcgtttcataaaactcattggttttacaagaaaaaggagcaaactccgtggacagtgtctgtcgctgctagggacagaagggcagagcggaagcctgtcaatccagacaaggttgcaactgcctccatcgacccaggcgtccgaaagacaatggtcacgtactcacctgagaatgaggaatccttcatgcttggtcagggacaggcatccgaccttgtcaaactcctgctggttcatgacaagctgcagtcaaggttggatactgagaaaaccttacgatcaaaagagaggatgaagataaagaagctgatgattcgcattcggaagacaattttttacctcaagaaagaatttagggaccagacaacaaatttcttggccgctcgctacgatgtgttgttggtacctcaattggagacggcgaagatgacaatcagtgctgaacgggagctgacaaccaaggttgcccgtcagatgctgactttgagccactctgtgctgttcaatcggctgaaggagaagtgtgaagagtacgggacagtgttcttgcatgtgcttgagcattacacaagtcagacatgccctatgtgcggtttcttgaacaagtgtggagagacatacacctgcaagaactgtcaattcacctgcgacagagacattgtgggggcagctggcatcttcctgaaggctgttcgaacagaaaatccctgttcgtaaaggacagcatcccctggggagttgacccctatgatacccctatggagaattcgttgtctttcttactacatgtcccccgggcccccggatgtttagtaagaaattcataggttcgaggatatacgggtagcttaaattcaacggaagtgtagttcatctgatctggatgtagtccaaagatgtcaacatatatgagggctgtttcgatgtcacatggaaatgtgtgactcatgttacaaattgcctgcaagaaatgactttccttatttaccaacaatctccctggttctccagttgttcgcatgtgaggcagatcaatttctatgtctttgaagtcttcacagatctcattgctcagactcacaggtatattatagcattcttcacgtgaaacaactctatccacatcagcaacacgttgagtggatgcttgaattaccatgagacatttgtccatatttgatttttcatacaaaacgttctgacgttatccgtgggacaccctttatacaatttggcgagacgtcggagtcatctgattaagatcacccagatgtctgagtttttgtaacattcataccaatctggatggtgcccctcaagcgtaagccacccctccgtacgaacgaacacccgcaaacggaggaacactgacgacgacgatcgaaaaacatctgactccacatgcaaacggcggaaacatgtcatcgtctccaaaagacaccaccgcggattaatgtgtgtcgcgtctttcgcaacctcattcactatggtccggtcatccaaagaaaccgtattgtatcaagaaggctcctgcttaagaaactatgggaattcttaaggggggatagcgggtcccgcggaggggggacagtggaattgagctgctgactcactgacttatcccatgtggcaccatcaagcaaggaacccagctgcggcttggatgttccgtatacaaattcaaaaagacccatcttaagaacagaaaagaggtagtataattcaaatataaaaaaaaggtttgttgaaattttattgtcaactcaatgcacaaccgcaagaggtgttgttgcatttttcaaaagtactgggcgttcctgcctcccggccgattttgactgatacggttctcatccaagtgttggcaacatatatcacttgacaagcatgatgttgattgcttgaattttttcatgtcatagcacgcattgttctttctcatcagcacaccatacatcggaaatcccttgtgaatgtaagcctcgtacactattcccacgatacttgttgtcttatccaagtcgttgtacgttgttgggttgtctacggttacaatggaccctacagtgtacgtgggattctggtaaggtaagcaatccatgtctgaagatcgtgttttgaaatatacaatataaaccctaaacaattatcagcatggaaagcgcgctacgactcgatagatgacattgactgcagccgggtaccattggacgcatacatgaagaacagaaaccagtgatgcgagagcaagtgtggtgtaccatccaggttggcatgtatgttatgaaaggggaatctcgcccccctgtagtggggcagtggaattcacgaggagcatcttcactccaggttcacgatgatcttgttcatggttgtcatcttgatgggacaaggatgcaccgccatggaagaccttgcccctcaggtgaacttcaaacatttcaagggaccgtttaaagttggcttctggttggaatgcggtggggttcaacctttgaatgtgcttgatcgcatctgtcatcgtaatgcatctttcccacatcagataagcagcaacaactgttgcagaccgttgtcttcccaacctacaatgtacaagcacgacattgttttgacttaacactccatgcatcacctcaacaatatatggtagataggatatgagtttcgtgacctctttttgcctgcagttgtcttcaacagcaaccttaatgtatgttgtgtttgggttccttggttttatgtacggtgtgtggtttgtgcagttcacaacaagcttgaattgcaacgttttacaaagttggtggttgagagctgcttcttggtctgataggtaaagattgtcgcacactttgaacaagttatcgatatgcatcttattgagatcagccatattcttgttaatttcttatgttagccggtcctgttaatttcgttccgactactgacaaagtaacaatgccacaatcagcaacaacactcgaatgagtactgccagctacaccagcttatcacgctttcagccaattcccgagatggagagtcttttcagaggtcttcgggggtgcccatttttgtactgtctgtatgaagttattcaatatcagctcggtatgagcgcagattgactccggatggaaaagggttccccatatccgtcgtctcttatgtcggaacgctacaacacgttggtcatggacctcatcgaggcaaatcgggcgcatgcacggagctagatcagaaattgagtatgcagcatagaagtcagcctccaatttcattggaaccccctcaacgagcccagtacgtgccccaataattttgatgccccgtgtatggtgtacggcggcacctgtgtattcgagatgaccaccaaagtataagttgataaactgggcaccaaagcatattccaagaaccggagcaccatgtctgagggcaaaggtgttcatcgcatatctgtcacgacctatgtcatgcacgtgcaattgcgatcccgtgaggatgaacccagaaacttgctttgtccggcaaatctctacaacctctgaaagagtacgtgcgatcgcatgaccatgcctttggcgcctaagaaaagataggaggtactgcctgaaaataggcttgggaccgattgtattgtcaatgacaacgagcattttacaatagaatatataatacactccagaaagcggtttaattggtgaatagatacttgttcaaatgcattcgtgtggcggaacatgtgttgagtcacagatcgactttcgcatcaggagctgatcctgggcgtcgtcctggtcgtcctcgggggcgtcaccatcgccaagacgctcctcggctacaccactgttcaccctacagtcggcggaacagtaaaatgaaacatatatcagatggaaataaatgtacgacatcgccgttagaaaattggcgttaagaatggtcgctgacttgggtgtgttaaaaacttctgtgtttacgaacatcagtcgttctactctgtggaggtggaaacgctttggtgtaaatcgaaaacgacgtgaatttgtaagcaaactttttgagacgaacaaagagttgttgaaattgtttttattgtcaactcattgcacaaccgcaagaggtgttgttgcatttttcaaaagtactcacaatttacgattatcaactaaaacagtgtatcgtttcataaaactcattggttttacaaggaaaaggagcaaactccgtggacagtgtaaaggggacttagttccacttgtcactgaattttgtagtagatacaaggatacaatcaatgctgggaaaattttagtatcagttgacgaatgtgggtttagtgaacgtctcaagccacattatgggtattcccctgtaggaaaacctgttatcgttaaaactactggtgggtgggtacaccatagtttgttgatggcagttttttcagatggtaggaaggagttcgttgtgaagaaaggatctgtgaagaagacggacttcgctgcatttattgactcattgagtttgtgcaataattcagtagtaataatggacaacgccagtatccataagaaattggtcctcagaagccccgtaaatatttgttacactcctccttacagtccagaattcaatgctattgagctgtgcttcgctaaggtgaagaaggactttcgtcgattgaactatataccaaacgatacaaagacgcacgtgtctgatatgatttccttagcattcagcaacctcactgataaaatcattatgggttgttttgaccacgtatggaacacgtatgtgatgtttgtataaagaattctgtgatgtataaattatgtaagatggcaacgaaacctccgacagtcgcgaaattgaaggagctactaaaattggccgaagtagcatactcatcaaaggacaagaaggacgatattgtccgtttatgcgaagacaatggtctcatcgccagaccccctccagaatacaagacggtggaaaagatgtgtgtcgtgaaatgcgccctgaagaaggcaatgagtcttgacgatgaagaattcggtaagtttagggagcatgtggatcaactcgtcaatgtagtgagccgcatgttgcggcgttccagtctggtgctgactttccatgtcacgaggctcatggagggcgacctgccgattcctaatatgtacgatatgaaggatacctactggaaggattggctaaggatcggagttgacggtgtcttcccagatgaagagagtagaatatcatacgaagccgtgaaagacgtaatcggaaaggtgcttggtagcgatgaccctgactacatcaactcctaccctatctatttcgaccaggttttgaactatgccggtcacacattgagcactgtcgtgtcgaacaacgcatgggttcctttggtacctcgtctgacacgcctcactaaggctactttgaatgcactgaaagctccgaagaccatccgtgtgtacgacgtgatgagggttatccaacaagaaatacaggagatggaatcttggccagagtctgttcaggagtatgtccgtgaagttcgagtcaggctgaaagttccagatggaagtcgactttatgatgactatggcaaagaaatggacttcccgaccatggtccggttcaattattggatgcagacacggttggagtctattggtgcacgtcgtatccggttgatgcccatctttaatgtccaacgggcgcatgtccgccttgacatgaagaccctcgtgaacctattcaggcacgtgttccccaaagacccaaacatcgtcgagctttcaaagtggaaagatgtaaaggatcccttcatgttgcctctgaagcctgcgtttaagaagaaaaaatcatgtggtcctggtgaatgggaggcatacaagttggcccaacagaagtacgatgctgacgttaatgatatcaaggatactgacgagtacagacatgcaaagggtaggtatgacacgctcgtgaacgcccgaaaaacagtcgcaggttccttcttcaagaaaccacctgtcaagacggggtgggtgttcgattgtagcatctgtactgacggagtctcattgagcatgcagtacagcaagacagtacaggttcgtgtatccgatctgaagaagacaagtaagaggtctcgtgacaatgaaggtatgagcgtctcagaacagtatgaccataaactcaaaacgacattgcccgatatgggtatcgtcgttctgggtgtggatcctggtaggagcaacatcgctacagtcacgtatctggcagacgacaaaagcaagacatggaagcttacacgcggagctttttaccacaagtctggtatcaagaaacagaaaaaacagcaagaaaaacgtttctcagacatgattcctagatgggagtctcttcgtgaaaatggagcagcgttgagtacatccaggacagatgatatctcggcttacttgaaaaattacgatacgttttccgacgagtggtggaggatggcactccttcgcagagaatcccgagacaactttcagaggtacattggcaaacgcaaggctatggactcattttgggcagggatcaagcgcaacatgaagttggatcatcctgacctgagggttcgcgtagcatatggttctgcaatcacgactttgaaggctaccggaccaggagaggtagctgtgcctacgggatctatgttcgcttcctgcaagcgcctcttcaaagaggaggttcatgtgacagatgagttcaagacgactctcatgtcttgggaaaccggtgccaagaaggaatgtgtttacaaaattccaagtgtccaaataaccacggaagggcagattcgtctaggttacgagttgttgggtcacaccccattgaaggagactccaaatgtctcttatcgcgaccagttggcggtgagggtgtactgcacacgtaaacaaatccaagaaaaacacaggaggggtggcttagccccctctcttgtcgacaacaactcgatcaagcggtaccctgaggtacgaggactgcgattctctccagaaaccagcacttactcggaccgggaccgctcctctgctctcacaatcgcaaggctgcactgcatggaactgttgggtcaagggagaccgcttccattttgcagggatgcgtgatggttgatgggctacaaaaaaacatgatggtgttccactgccccgtgggtcgctacaccataaggttacaccataaggtgtaccgtacactccaggaggcggtttcattttagtattccgtcgagtgtaaacggaacagctaatgtacgaattcactacgcatccgtctcgtttctaaaaaaatgtatcaaaaaaaagagtatctaaataactaacttactgactgactaaagctggctgagggtcagggagctaatctcaattgagagctcgtcaagcgtagctcgcttggtggcgaggtacgcctcacgcttggcgggagtctgtttcatgcacgctatgtgcgcgcacttgccagtggtgaaggtcccaccattggggttgcttaagagcatctgttttctaccacacgggttgccgttaatggtgacagcagtgcagcccagggtgggggaataccccacgatggtaaatgcacctatattggatccaacaggaagctcgttctttagaacggaccccccgcaacgaccaacacgaccggaggccaaggaggaggacagggagcacgttgagaacgagccagcaggagcaggagcagcagcaggagcaggagcagcagcaggagcaggagcaggagcagcagcaggagcagcagcaggagcagcagcaggagcagtagcagtaaacgtaaaagcagcagtagaagcagcagcagcagcaggagtaggagccacagagggtgaaccattggcgcggcgccttttaccgccactgctggaactctccgacatgcattcgtcctctgggagggcaagggcactggcgagggcaagcaaggtggaaggagcaggagcagcagcagacttagcagcggtggcagctaaggcaatagggagaagcattgcctgtaaaggatctttctccgctttgggtttctcttcgagcaacttagcgtacgcatttttcattgcgcagacagggtctgcgaggcacgcaggaacgaggggaaatgaaattatcttgttgcacatgtccttcaattgagagactttgagttgattgttgatcttcgtttggtccctcacttggacaactgtaaatataccggaatcattcacgaatgatgtgaaatcggtagacatgttgttggtagacatgatatcaagttgttgttgttgttgttattgttgttgttgttgttgttgttgttgttgttattgttgttgtttcaaaggaaggaaaaaggcgtcaatttttttttagcatggaaaacaatataaaagaagaagaggagaagacataaagaagacaaaacaagatgaaaaatacgataaatacaaagacattgaccgtatctttacctattgggtttcacaggggactcgaagaatggatagattcgcaaacacgacacagggacgaggcaatatacgccctgctcgcacacggtctacacgcagtgcggacgataccaacaacatcgaatgattatgagggtcgtcgttcaggcagatcgtcggatactggtatggtatggtatgttatggtatgttacacattgctgcaaagtttgaggagagtggctatacttgcgaatgtaagccacatgacagtctcgaggtggatctcaaaccccactaaaaaacaaccggaataaacctacaaaatcggatgtggtcatacactcgacggaatactaaaatgaaaccgctttcttgagtgtacggtacaccttgcggtgtaacctaatgttgtcgcgaccaccggagggggaccgagtggtgtctacaacaatacgaatttttattcatcaacaacaacagagctgctgtgggaaaatggaagaggtcgtcctagacccatcaattccatgcagtgcagccttgcgattgtgagagcagaagagcgatcccggtccgagtaaatgcatgtttctggagagaatcgcagtcctcgtacctctgggtaccgctcgatcgatttttgagaatcgacaagggaagtggcgaagccacccctcctgtgcttctcttgtgcgcctttacgtttattgtacaaccttacccctaagtggtcgcaatcagcgacctttggcatcgttttcgatttcgtgtgaccaaaacgttcaccacccaacctaagattcacgtctgctgaacaaacacttgggatcttgtaaacacgttctttttctttacccgtctcccacgacataagagtcgttttgaactcatctgtcacagaaacgtcctctttgaaaattcttttacacgatgcgaacatggccccagtgggaactgcaacttctcccggtccagtaggcttcagtttcttacagatacaggggcatttaattcaagtgggacccctataaaaatgagtgtaaacaacgcaaatccatacatggcggctttcgcatcctcctcgatgtccacacatgccaaggcggcggctccatgtacacgcaaacggcggaaaactgtcgcatttcgaaaaaatataattatacgcaggaaaccctaaaccctaaaaggcggttcccctagggaagctcattgtttagcaagtaaatgatttcatacatctcgcatgggatcacgtggtgcacctcgttaagggctccattcaggttttgggacagtttgtccatccacctgtgatcgtcatctgtcatgcgcgcatcgcgcaaggagttggccttgtcgggatgcagactcagtatcatcattttttgttcgtgcctagtccaaacgccagtcatccaggtgtcaacggctttgtttgacaaccagtacgtccaccagctggtggacatggtcgcctgggtaggcccgcctgcgaggaacgtttctaatatcccggtcctcgccatcatgccggctaagtcttcaaacgcgtgggccggctgataggcaggctcgggctcgtcgtctgacattggctcgggttcgggctcgtcgtctgacattggctcgggttcgggctcgtcgtcgtcggacaagggctcgagctcgggctcgtcgtcggacaagggctcgggttcgggctcgtagtcagactctgacataagctcgggttgggtcgcgtcgtcggactcatcatcagataccaaggatacaatgcacggctcatgtgcgttcataatgcggtttaagattggtgtcaagaagtctcgaacaatgtcttcgtcgtccattgataggtcgatgatgcacggttgttctgacatgattgagttgagaaatgataaggcaaagtggaagtataatatgatattacagatcgagcgaaacatttcaatttttttcacaagcacgtcgaggagaaatacactaaggaacgcgctttcgatgataactacaatgacgggcgcattaatatcgcgcaccgccaagggaactcggtggcttgcgcatcctactcgtccatcctcacccacaacatcaaccttagcggagaggtcttgtattcaacaagcggcggagcccctttcacatcttccccagcggagcgaccgggggcgcccgaaggggagcccccacgggaagtccgcgaggaaccgagcgggtgggcgaccggaggggagcctacagttcccatgcctaaacgacagcgactgccataattttgggatatcccctgaaaccaacatgtcctgctgcgtatcgtaacactcagcacatatagtgttcagagtgccctcctgagctggcacttgcctcttgcattagcgttgtaaacacatccttgatcgcagcagggagcctagtcgccttgtaatctccatccagtacaaccatagtgacctggcattttgcgatcaccatgtccttttcctcaccgtcgccattcgtcacagactttagaatgacctcgtccatgacatgccgaatgttgccagtttaacttgggtcaactgagcatcggtcaacatcccttgcagttcatggtacgccgcggcccatgccatttccaactcacgctcgatctgggtggacgtggcatcccgcacggcttggatctccttgtccaggcgctggatctgggtggacgtggcatcccgtaaggcttggatctcctgacgctggtttgcctgttccgcttggatctcctgacgctggtttgcctgttccgcctcaagctgccgcaaacgattatcaaagtcactcataccttccctacatgctcaaaattattttggaaatgtgaacgtgaatacatccatgctcttgttggatgccatagaaaacaacaggtttctcttaagttcaatttacttaccatgcacaattacgcttattcatgctctagaaattgacttataatgggcgttcctgcctcccggccgattttgactagctgcgaaacatggtatggagcggaattgtgattccttggtgctgatgtctcaagctagctagtcgttcaggaggctctaaatcctgattagaaattttaaaaaatcgtccgggaggcaggaacgcccattttatgcggttgccacccgttgtttgtaccagttccctgctttcctgtacaacgccttacgaacgtcgttcacattgaatccgttttcttcgatcttgtctctttcctccttgaacacgtctcggcacacccatgacgaaaactcagagacgctttgtatccgcaactccacgccctgttcaaccaggcactcgataccttggctcaaccgagactcggtcgtgacggactcgacgaactcggtcacagtcttgatgtactctgcctgcgaaggcaccgcttgcttcgtgacggcagtgcaatgcgtcttgcccttcgtcttgaaccacagacgagacgatgggtgttccacgcacgtccacacgatgccctcgccaccacccttgacaccggccatttggtacgcgaacggacactctgcatccacggagttcgtgagatccgccatgtagtcttgcgcgggctgcgtgtcgctcatgtcgacttccacctcgtacgtcggaaagttcatgatgttgaagatccattcctcctgacagaacaccgtgctgtacttggtcatgtcaacccatttgtagtcgattctgatcgcaaatatcacaaacatcttgacgagcttacacagggccaccttgttctgcacacctttaccgcagtactcgccacatacgacgatgttcgatcttatatctgctccatggatctcttggatacgatcgaacagatcggagtacttcttcgcagtcagaaacatgtggcagccttggttgtcgttgtcgactgacaggattctgtttctagattgaatggtgtcgacgtagtcaggggttccattaatgaagtgcctcacaatgtccgagtgcgtcccgtgcagtttgaccgtgcctcggaacttgagcgtctgcgggatcgcgcttccgaagacgtacggcaactctttcaggacgttcctgaaatgctggatcgggggaaatggaatgaaggccggcattcgactaacatacaggtgtcggtgtagccttacagtagttctcaaataaagtgggacacaccttataatcatccagactgcagatcgttgcttttgggcaacgttgggggggtgcagcaggttgaagaggtaaaatgggcgttcctgcctcccggacgattttttaaaatttctaatcaggatttagagcatcctgaacgactcgctagcttgagacattaagcaccaaggaatcacaattccgctccattcaatgtttcgcaaacaggcaaaatcggccgggaggcaggaacgcccattgtaagtcattgtttcattttactgttacgccgactgtagggtttaaaaaattgaaaccatttccatctgagcaagaagacaaccaaaccaactctatccaaaatctaactaatatgtcaacagtcggtgagaaaatatggttgcaacttgctaatgctgcatacaaatcacatgatccgtatgatccgcatctggtatacaacatatacacttttccacctgtgatgttcacattcggagacgcttccttcccagcgttctctaagttcgtggaccataaaatcgatggaatgtacatgtctgaatgctatgactccaaattgtacatggacaaaaggaacagacacaagttgtttgcgctggaagccttgtgtatgaccgaagaaccatctaccatctaccgcatactggagaggctgttcatcatccgacctggatccaaggacatcaacctcgacttatttggcgccgatacactgtcgatctcttactttgatacagaaatccaggaggtcttcttcgagaagatttgcatgtcttggctgcgcgtcagtaaggcagttcgagtgatcgcagagcgataccgcgaacacctccagaggaaaaggaatcacatggtcagtcacgtgctcgtgcctttcatcgtgagaaaccacgtcaactagacgtggccacttaaaaaccacgtcaactagaccccgttctctgtattttttccatgaatacgggggctctgcttgtcatgaccaccatttggtatcgacagcgtttcgaagattagttattttcggaaagcaaacgaggcaactactgttgacttaaaagttacagagtacacaagaaacgcataatttctaacgagaatctaggtctacgacagttgtcccgttgaaaacgatgccatgagtggttcctgttaagatcatttgctctattgtgtactggtaacgccgacctttctcacccttgaagcgttttacattggggtagagccccaccccagcgtgctctaagagctcggcagccaagatcaaagggttcaggcagtaatgtctgctatggtcaagagtaggccataggttcgagtacatctgcaatgctacatccatgtcagcatctggaatggcgtggctggtaggataggtgtcacgccatgtctgcaaacttgagcgagtgaggcacatattgtttatctgccagagagcgatatgttctcaaataaagtgggacacaccttatacttggcttgctagtttcacaaagttcactcgcgattctgagaccgcggaaacgcattcaataggtgggtttgcatgggacctgaactgtcaagtcatccacgtccgtacacacgtcaagctggatgaatacaatgaagctttgtgggcggactctacaagtggtctgcgacaaacgtaacagcttccgacccgctactgcgcttttcttgtatgtcgagaattcttaacgacaattttctaacggcgatgtcgtacatttatttctgatatatgtttcattttactgttccgccgactgtaggtggtgcgcgtctgattgcaaaatattggcttatgtattaataacaaccaacatgggacacaaatttgtcatcgtatctgcctcttgtccgtcaattgaagcatacaaccatatattacatccactacaggtcatggggtttcgcatcatagcacttgatgagccccttacatattgcgtgactgaactactctcggtgtggcaggtgacttcattgccagccatcagagatgacaatggactcttctgcggccgtcaagcactgatgtgggcgcaggagaaggggttcgacatcatagaggatgatctcgatgcatgtagtgtcacaatcagcgaattgaaacaactgattagcgcaaatagaccaggggggcaaagagtgaatcctgtgcatacattataattctctacggacattcaaaagtacagagacagctctaacgttgtttgtatcgacgaagcaggattttaagcagtcgaaaaaagaaaatgtatcttttcagaggagcctccggaagaattcttcagtatttatttgttgttgaaataattgttgttcccgagatggagtgtgcgtttttgctgagttgtgagcaatgcacttgtcattcagcgcggatacgtgttcggcccctgacaattttatagaagtgcctacacctgttcttcattggagtcccgtcactccacacatgatattgtaagcatttgagacaagaatgcagctgcttgttgtgttgcaccttgaatttctcaaaaatgtcttcctctatatttttatacattgttaacgaaactatatcatgcaacacatttgagtcgtacagcaagatctttgtttgcgtatcaatcatgttgatgatcgtgtctaacacatcttgtggcaatgcacccataagctaagatgtttttagttacactcaaaccggtcaataatgttacagtatattgaatcaattacaattctctatgtacaacttggaaagacggtcgattgttgtacactttgctgaaaagtttgatcagagtggctaatacttgcgaatgtaagcaacatgacagtctagagatttgttgattcaaaatcgtattggtgttccactgccccgtgggttgctacaccattaggtgatacaccgtaaggtgtgccgtacacagcgttgaccgtacgatcctccatgtcaagttgtagcatccatagtggaaccgttgcacacaaacatagcttgctgctgctgtctgcaaatccttagaatttgaatgccgcagtaagcgatgacatatgaccgattaatctcgatgatgtaggtgttctccacgcgcgcagccttaatggtagttacatctgttgtatcatgcacacttagctcaggtgtgaacactgtgataccatctacattctctgtccaaacgcgtcccgtgtggtttgacaggctttgaagcttgatgactatgtctggcgccatgtcactccggagcacgtggacggtgcgattcatatagcttatcgacatgggaacaatgcctgtagaagtcatgacaacaggtgtattacacacacacacaaatagtcgctttatattaataatgaggcctccgacaaaaaataacagacgcttgatgaatggatcgagtgggccggcgcgctccgcatgaacgcatcgagaaagtatcggatgcgggtgaagtcgttgacaaaacttcaaagccccggcatcctcacgcaaacggcggaacactgtgtcgtccgtaccacattaaacaagtggcggagccccttttacctcccccaagaggagcccccacaaaggagtccgcgaggaacgaggaacatcaaccagcagacacactacatcgtaatctctggctggcgtggctttacttaagcgcaacctatgaacccaccacaggaaaattccgacgcgtcccaggctaaaacatcaggaaccgtaacatctggcactgaagggtatctcttcaataccgacgatatggacgaggctcaacgcccacggaaaaggcgttgaggatccactacggtccacagtcaatgatgcgatgtgtagccacacctcggttgggatcccatgatgttgattgttgtgcctgagggaaaacaagtgcgtggaattaaatgttgtagtcatcaaatgaagagccaatgaatagatgatattgatactgatcgtgtttaccttggaggtgaggaatcaaatggggataagtacactcgacggaatactaaaatgaaaccgctttcttgagtgtacggtacaccttgcggtgtaacctaatgttgtcgcgaccaccggagggggaccgagtggtgtctacaacaatacgaatttttattcatcaacaacaacagagctgctgtgggaaaatggaagaggtcgtcctagacccatcaattccatgcagtgcagccttgcgattgtgagagcagaagagcgatcccggtccgagtaaatgcatgtttctggagagaatcgcagtcctcgtacctctgggtaccgctcgatcgatttttgagaatcgacaagggaagtggcgaagccacccctcctgtgcttctcttgtgcgcctttacgtttattgtacaaccttacccctaagtggtcgcaatcagcgacctttggcatcgttttcgatttcgtgtgaccaaaacgttcac

SEQ ID NO: 181 - DNA, 22190 bp, unidentified
  misc_feature 1..22190: note = Fanzor polypeptide
  source 1..22190: mol_type = other DNA
gtccgcccacggcgcgccaacgtagtcttgcgccataatttcctcgtcctcttcgatgccagggcgcacaatcataccatcgtcctggacgaacaaagccatgtcgcccaccgcgacctccttcagacgcctccaaaaggaagcgtccttcaatatgttgctgtacttctcgatgctgaaaggtttctgtccgggaagaggcggggcgtaagataggctctccattaccaccgtgaccagctccacccctccggggagaagcgacggggggagagagcgttgcacgaactgctcattctcaggagcacaaaagacgaccacgcgcggccacctacgtacatctagattgtccagagtcacgagtacggacaacatgctccacacgttagggcggttgtccacaacgaccaaacttcctataatcggcttatgatgatcctcgggatgacgagcaaccggtttcagaagatttcggttgtggacataacgaattacgaagtcgtgtagaggaactgcgttcggtttcgctgggtccaggggggcgctcgcgtagagttcggtctcctccgccatacatcaaagtcattcctaggcgcctctcctgacggcgtgaccgaggatggcgtgatgctcgagatcaagtgtccatggcgtcgaaagatcgacggtaccgtaccgatgcagtactacctccagattcagggtcagttggcggtgtccggttcgctcgagtgcgattaatttgaggtcgagttcgacatccttcaatcagaggaagagatagaggctgagttcgcagaaatatcgcgtgacgagtccattatgaagtccgctttccgtggagtatttgtagagaagataaagcatggtagcaatgagcctccgtcctacgtgtatacaccctgtttcggcagagatcatattgtgggtggtgggaaatctgattcatcacaccaatcgttgctcgatcatcttcgcgaattcgtggatgctgagtcgtcctcacttgacgactcgtaccgtgtgaatatcatatggtggaaggttcgaaagcatagcaccgtcaaggtgcatgctgatactgatttctccgctcgcatgatcgataccctcgagggtgtttggaatgatgtcacgtgtctccgtttcgacaaggatatgtatgatcaacgtatgttggatctcgctcctgtgcgcagatcagcatcttcctctgctactgtgagcaagcgtgggaagcgtcctcctctgggaaataaggttgtgtgttctcctgagttggcaagggggtacgcattccttgaagacgctaacgatttttagatgccgttcgagaaaaataaccacagcaacaatgacattgcgcaacataccacgatcaattcatggaggtggtgacgttgtgtgatgtcatcctttcgcccactatcacgcttcatcgaagaggtttcttcatccttgtagtgatgaatgtcgtccttgatttttgaacgattatcgacgggatgggatcgctcctctgtccctttccgtattctcatcctctcgctaaacgttgaaccgctgcctgacaccacggaagatttcgcgttcatagctgccgacacaacgtgagatttcgcgttcatagctggcgacacaacgggagatttcgagttaatagctgccgacaccacggaagaggtcgcgttcatagctgccgacactagtgcaatgatgtttgatatactcttgttttgggtatccgacgatactcgacgtatgtcttcgtcttgaggcacaagatccgcttcatgcgcatcatcgtcttttccatcggtattggctctgtgttgcagatcatcatcaatcgtcatcgcatcctctgatgagaagggttcatcgcacttggggcacttgtccagcgtctgtctgatcgcgttcatgcatttatcgtgacattctgcttggcagcatgcgagttgtacgcttttttgtgtcgctttcatcggaaagtggcacaatgcacagaatgattcgcatgccattgtcggattgaatgggatgtataggtcgtttagatcatttacacttgctttgcatgcgcattggatgcatcatcttgtggaagaagttattgtttgatactttacactcgacggaacatagctcattgtgtacggccacacttaagcgatcgcctcttcccactggtccaaaagaacacgacgtctttgttgatgtgcaatgcgtcatgtaaggtttttgaggtgtttgtctgcagctgaccctggttggacaggcgtatgtttcatcttccatacgatgcttttgtcggggttgacgaagcctttaccttctaggaacttgatggcttgttcgattttcccctttccttcacccgccttgtatcccttttcaaccgcgtacatgacgagcttattgtctttagagtggtaccacacgtacagtaggtcaaacctctcagttagcgtgtatgcgtgagctcccaagtgcccgactatattttcagccggaatagttggtttgataggcacagtgacctcgcgaatgaagattgacatgtccatcatgtacatgagcctgatgagttcggatggtcgcaagaaacggcacaggagttcttcctcgagagtcttcatccctttgtgcgtctttaagttgaactctacattcgcctcttttttccacttgtctagtgcccatttcatgatactcttcagttgaggttgagaaagcttgacattatcgtatttgacattactcacctcatacttcttacgatcgtccaagttgttttccgtgcatttcttaaacacatcctgtcgatcggcggaaccgattagatgaccggttctagaagttgatcgtgttgtagatgctgatgacgaggcccttgctgttcctgaggagggccttgctgttccagaggagggcctggttgttccagaggagggcctagttgttccagaggagggcctagttgttccagaggagggcctggatgttccagatgtcttcgagttcgcggttgttccagatgtcttcgagttcgcggttgttgaggtgcgaggtcgtgtagttgattttttcattgtacttgttgaagttttcttatccatcggtaagtaagtgtgtgtatacagttctcaaaatattttttacaacgtgtccaagagctcactacatagatgggtcaatgcagatcaggtgggtaaaagtaagcgtttaaaacgaaaaaggaaagaattgtccatgcttttacgtttcacgatatccagagaaccccttcatgcaaggatttggtaggtataatttgaaagagttgtaatgtgagattatcgaaataattttgggacactcagtataatttgaatgatatcccctgaaaccagatacaggtccatggttccgtcgagtgtagctgcatggttgaatgatttattttttcgtattcgagtgtaaatctattggttggggataggcgaatatgctctgtttttttatatgtgttcagagttgccgcaattgacgcctgagcaggagcaagtactggaatggatgatggaccgtgaagatgttgcttgtgctactcgttctagttttcctggcgtcctctgtggaatccttgcagaggatgcaggtttcggaaagacgcgattgatgtgcgagttgatggctctccgaaaggacatgttcccatgcctcatcgcagtgccgaggatggtcttatcagagtggcctcctacggtccgtgcggttacgggtgtatttcccacactcattgtagacggcgggttcttcgtatcgaacccgactagctttcttgctgatcgcaaggtcgtgatcaccacacacggtgtgcttcggaaccactatcttaagtttggtgacgtgacatgggggcgattcgtggtggacgaggcgcacgtcatgcggaacaagggcacggcttttgtatcgcgcctgtgtgcacgtggcctctcagagttcgatccgttgggcagtcacggccactccggttcacaaccgggacaaagacgtgctttgtctcgctcgcttcgtgggcgtgcatgcacaagacgttgcgatactccgggacgcgcgcgtcatgcaccaccatgtcgttgtccctctggtggtggagcaacctgcaaaagaagatgcgtcggtggttgctctggcagatgtcaattctgacatagaggtacgacttgtgacgttggatgtcatttcgcgcgctcattacgataagctgaaggaggactattcagcgtcttcgtgtacatcgaaggaattggatatcgtcgcgacggcgtgctcatcgagtatggcgtttatgcgagtgttgcgtctacgccaggccgccacacaccctctcattgcgtcatcttcgcaaggtttggtattttcatcgagttccgcaaagttcgatgcggttgctggagagtgtaggcgcctcctcgaaacgtcaaggaatgtttcagcatcgatgcctaacgaggattcctgcagcggggtggtggttttttgcaactggatcatggagatggacttgcttgaggcgttcatagggtctcgatttaggaaggatgaggtttgcgtgagccgcctggacggagcgtgctccattgatgagcgggattcgacattgtaccggtgcaggacggatcgtgagactacccgcgtgcacatgctagtatgtcagatagaatgcgcgaattgtggcttgaacatgcagcatgccttcaacaacgtgatcatgatgcgtcctcagtggaaccctgtgaccgaataccaggtgattcgacgggttctccctcgtggacaagagcgtactgttcgcgtgttgcggttggtcgcgaaggactcagttgatgagcatgttctcgagcgtcaggcgaagaagactcgaataattcgacatgcaatgcaagacgatgtggtcgctacgacacttggctcgctctcaattggtccatcgtgacctcgttcacttcttcacttggcagggtcccattcaattccattttgttctaaaatatagttgggacactctgaatgattttcgttcaacgaatcaaaaactttgggaagacttgggatcgcgatgtgaacgcctccaagaacatccaccaagatactcaatttccttgcacgagtgtatttgtgtattcgacgaagagcgctgcgcctgctttgatgaccttgcgttcgtccgttctgtttcgtctgtggatggtggcgcacatgtgttctatgtacgcgaccatctcgatgacctccgcattcgtgctgatgctcccatcggattcttccgtgtcggatgacaacattcctatggttgatattgcagattctatccatacctttcctctctcttttggacttctgcaagcgatgagtttgcgagaaagactgcgcgcggtatcttgttgtggggatggttttcggggtttgtaaatgttgatgccgccggcaatggtcatcttgggacgtaccatggctctgctcttcagaccggcgtccactcctgatagagaggatgtggtgaatgtgatctgcacgcggtccatgtatctatcgacgagaactcggatgcttttttggacgtgcatgggcgcgcattcgatattaagaatgaccacgcgttttcgaacctgcaaacggtgattggtgcacgtgtcgccatccggttggtgttttctgggattgggaaaaagagacgctgtatcgaccatctcccgttccaagattttgacgagcagtcctttgctgttgttgttggttaatcttcctggatcttctgaagcgtcaaacacgagtattggggggtattgtgatgaggaatgagtgaagtagcttgtgaagagagtaatcgcattgtgatgttcgcgtttgtaaagacttgtatggtttgtcacgttggagtcgtttttgactaagacgttttcgattagctcctctaagactattccgttgatgccaacatgatcccttgttacgacaaggatgcaaggaatatcttgggtcatttcggatgccatgccgggaatcagattaccttattttactacaatctctttccgacaccacgacgtcacacaaacactatacagttttctcaactccataaatgcggatacatttaccttacaggggttgtctcaaaataaagtgggacacaccgtatctcatcaaccagtaataagtcttgctcttacgcatgagtgagtgcaacagtttgcaaaggcgggttcacagcagctgccatcgttgagatgttcgaactcatcgcgtcctctgtcgtacatttattcatctgatataggtttattttatgttccgccggactgtagaacctttgggttatcactcgatccaaataagtgtatgagggatggtcctaaaaattagatttcttgccgcaacaagtaaagacagggcttgaacatgttgcaacttttttttgtgtctaagtagctgttagttggtcgtatcatgaataaggctcattttatagcagccagtccagatcacgaacctgataatacggcaggattctccagggtgtgatattgtcccgcaaccaccatttaactgcccgagtcaatcctattttcttgtttcggcgccttctagctcaccctaccgcccccccccccccctagcccctcagtccggttggtcgtaaaacatttaaaacttcctaacacgtaacaacatgtctgatcgcattacatccagagaaaacgaatcgcttccaaatgttgacgcatttatggtcagagatgtcttaacaccaaacgaatgctctgaatggataaaactggcagaacaaaaagggttccaaagcccatacataggaggaggtatgtttgcaggcaaaaggaaacgtgttacattaacaagcgaagaactagcagcacgagtgtgggataaaattagcacagtcattcccgcaagggttcatgacgagaaagaatactcatcattctccttttctggacctgcaaataacatacgtagtggtggttattttccaacacatattaacccgtttttccgtttctcaaagtatgagccgggagatgaattttccatccacaccgacacgtgttatgcgcgtgatgaatgtgagactgggctttgcaccatcttgttgtacctgaacgataatatgcaagggggtgagacagtcatacttccgaattgggaatggaacgaaaagatcaccatcactccagaaccgggtctcacacttgtattttaccacatgctaccacatgccagactagaagttatttcggggtgcaaatatataatacgtagcgaggtcatgtaccgtcgcgtctgcaatattcccttgttgcaagcatcgaacgtttttgaataggaaaactgccccgtgggttgctaaaccattaggttacaccgtaaggtgtgccgtacacgaggcggtttcattttagtattccgtcgactgtacacgaagcggtttcactttgttgactgtatgttctggcatgtttttttctctatcgcgcagagctgcgtcgacacccatctgcgcaggatcaagcacaaccccgggcagttctcagggttccaatgccccagaggaaacgggaagggggtattacccaatgaagagccatgtgtaggacgcatcaagaacactcacaggtacctgcctcgcaaccagaagaagaagatgatgaagaagatgaaagtagatgcccccactttcccttatgcccagccaatccccatcagcgtttccaagaatgtcatagagacctactcgccaccaaaggtcaccgaagtctccatcatggacttcatctccatcaagccgcaaatgacgatgagcaagcgtggattctcaaagcaactctatgtgtgtcctgttgtagaacaacagaagcctgtgcacgaagagttcccgcccctgccaacgtatcatgctagcaggtccctgacgcccactgagccccccatggctctatgtgcaaccgaagatgaagagatgtgtgcaatagatgtgcacgaactgatgttgttgtgctgcccagatctgatgatgtgctcgtaaagtcccgagctaaaaacattgagaacatgtgttcatttgatcgtgtggtggggattttgccgggttgcggaacatggatagagcggaattgtgattcaaaggacgttccttcctcccggcgattttgttgaaatgtctctagctattatctgtatctagcgagtcgtttaggattttatttttccgtcaattgctttgtaaaaaaataacattactcggaatattttcgagaacctcttcaacctgctgcaccccccaacgttgcccaaaagcaacgatctgcagtctggatgattataaggtgtgtcccactttatttgagaactactgtacagccccaaaatgtatccatttttccgacgccacgaggcgcgaaagtgactctgtttcacgagcgaatgtgaaattatgccaaacacgtctctcgtatgtcttccaaatgaagtttcgtcgatcgatacaaaagtcctcccttcctcttttaaccgttccctttggcttataaatgacgtggttttctcatataagttatcaggcctggagaagaactttgcttttttctttgtgagcccaagcctttttatcacaacgcgaatcaactcttttgagacctcaaatccgaaagcatcctttaccttatgacgaagaccagcaagagatgcgaatggatctatttttaatgacgcccttaagaactctacagtcggcggaacagtaaaatgaaacatatatcagatggaaataaatgtacgacatcgccgttagaaaattggcgttaagaatggtcgctgacttgggtgtgtttaaaacttctgtgtttacgaacatcagtcgttctactctgtggaggtggaaacgctttggtgtaaatcgaaaacgacgtgaatttgtaagcaaaatttttgagacgaacaaagatttgttgaaattgtttttattgtcaactcaatgcacaaccgcaagaggtgttgttgcatttttcaaaagtactcacaatttacgattatcaactaaaatagtgtatcgtttcataaaactcattggttttacaagaaaaaggagcaaactccgtggacagtgtaaaggggacttagttccacttgtcactgaattttttagtagatacaaggatacaatcaatgctgggaaaattttagtatcagttgacgaatgtgggtttagtgagcgtctcaagccacattatgggtattcccctgtaggaaaacctgttatcgttaaaactactggtgggtgggtacaccatagtttgttgatggcagttttttcagatggtaggaaggagttcgttgtgaagaaaggatctgtgaagaagacggacttcgctgcatttattgactcattgagtttgtgcaataattcagtagtaataatggacaacgccagtatccataagaacttggtcctcagaagccccgtaaatatttgttatactcctccttacagtccagaattcaatgctattgagctgtgcttcgctaaggtgaagaaggactttcgtcgattgaactatatattaaacgatacaaagacgcacgtgtctgatatgatttccttagcattcagcaacctcactgataaaatcattatgggttgttttgaccacgtatggaacacgtatgtgatgtttgtattaagagttctgtgatgtacaaattatgtaagatggcaacgaaacctccgacagtcgcgaaattgaaggagctactaaaattggccgaagtagcatactcctcaaaggacaagaaggacgatattgtccgtttatgcgaagacaatggtctcatcgccagaccccctccagagtacaagacggtggaaaagatgtgcgtcgtgaaatgcgccctgaagatagcaatgagtcttgacgatgaagaattcggtaagttcagggggcatgtggatcagctcgtcaatgtggtgagccgcgtgttacggcgttccagtctggtgctgactttccatgtcacgaggctcatgatggcgacctgccgattcctaatatgtacgatatgaaggatacctaccggaaggattggctaaggatcggagttgacggcgtctttccagatgaagagagtagaatatcatacgaagccgtgaaagacgtaatcggaaaggtgcttggtagcgatgaccctgactacatcaactcctaccctatctatttcgaccaggttttgaactatgccggtcacacattgagcactgtcgtgtcgaacaacgcatgggttcctttggtacctcgtctgacccgcctcactaaggctactttgaaggcactgggagctccgaagaccatccgtgtgtacgacgtgatgagggtcatccaacaagaaatacaggagatggaatcttggccagagtctgttcaggagtacgtccgtgaagttcgagtcaggctgaaagttccagatggaagtcgactttatgatgactatggcaaagacatggacttcccgaccatggtccggttcaattattggatgcagacacggttggaggatattggtgcacgtcgtatccggttgatgcccatctttaatgtccaacgggcgcatgtccgccttgacatgaagaccctcgtgaacctgttcaggcacgtgttccccaaagacccaaacatcgtcgagctttcaaagtgggaaaatgtaaaggatcccgaccgcttcatgttgcctcttaagcctgcagttaagacgaaaaaatcatgtggtcttggtgaatgggaggcatacaagttggcccaacagaagtacgatgctgacgttaaggatatcaaggctactgacgagtacagacatgcaaagggtaggtatgacacgctcgtgaacgcccgaaaaacagtcgcaggttccttcttcaagaaaccacctgtcaagacggggtgggtgttcgattgtagcatctgtactgacggagtctcattgagcatgcagtacagcaagacagtacaggttcgtgtatccgatctgaagaagacaagtaagaggtctcgtgacgaggaaggtatgagcgtctcagaacagtatgaccataaactcaaaacgacattgtccgatatgggtatcgtcgttctgggtgtggatcctggtaggagcaacatcgctacagtcacgtatctggcagaagacaaaagcaagacatggaagcttacacgcggagctttttaccacaagtctggtatcaagaaacaaaaaaaacagcaagaaaaacgtttctcagacatgattcctagatgggagtctctgcgtgaaaatggagcagcgttgagtacatccaggaaggatgatatctcggcttacttgaaaaattacgctacgttttccgacgagtggtggaggatggcactccgtcgcagagaatcccgagacaactttcagaggtacattggcaagcgcaaggctatggactcattttgggcagggatcaagcgcaacatgaagttggatcatcctgacctgagggttcacgtagcatatggttctgcaatcacgaagctgaaggctaccggaccaggagaggtagctgtgcctacgggatctatgttcgcttcctgcaagcgcctcttcaaagaggaggttcatgtgacagatgagttcaagacgactctcatgtcttgggaaaccggtgccaagaaggaatgtgtttacaagattccaagtgtccaaataaccacggaaggtcggattcgtctaggttacgagttgttgggatacaccccattgaaggagactccaaaggtctcttatcgcgaccagttggcggtgagggtgtactgcacacgtaaaaaaatccaagaaaaacacaggacgggtggcttagccccctctcttgtcgacaacaactcgatcaagcggtaccctgaggtacgaggactgcgattctctccagaaaccagcacttactcggaccgggaccgctcctctgctctcacaatcgcaaggctgcactgcatggaactgttgggtcaagggagaccgcttccattttgcagggatgcgtgttgttgggctacaaaaaaacatgatggtgttccactgcaatgtgggttgctacaccataaggttacaccataaggtgtaccgtacactccagaaagcggtttcattttagtattccgtcgagtgtatgaccacatccgattttgtaggtttattccgtttgtacacttttttagtggggtttgagatccacctcgagactgtcatgtggcttacattcgcagcaatgtgtacatgtgtacaacaatcgaccgtctgtccaagttgtacattgagaattggaattgattcaatatactgtaacattattgatcggtctgagtgtaactttattggtcggtgaatctgtgactctgtgactcgacacaggtgccgccgtgatgcgagaagtcgctctgtgactcgacacaggtgccgccttccgttcctcgaagcacgagtgtaaacttcgtggcctaagcccccctaccaagcctgtgtattgctggcggtacactctggtgtccaactaaaactctcaactacgtttttgatctcagagatgtctgtgagaggcgtgtgtcacgatgatgatgcttctcgcgttcgttctgtattttggggggccttggagtgagacgtattcttcgacagtgtcccgccgttttcgctgaggtgtcccaaaattatttgagaacaactgtattacaaacaatgggcgttcctcagactcctcaaaaaatatttgtagtgaaccacggacatgtatctggtttcaggggatatcattcaaattatacagagtgtcccaaaattatttgagaacatactgtaacattattgaccggtctgagtgtaccccccccctccattggtcacgacgctgagagcacagctgcagcagcgtctgcctctgcttccactttgttgttaccagaccccgtaccgaggatgacaccgtagatgtcccggatggtcgtagtagtgacgcgcgttgttgcgttgctattctcagaaacggtctggaatgtcggaatgtaaccatacttctggcggtaaaaggtgttaaggtcgtgctttgcgctgcgtttgttgatgataacctctgcgaaatccacgtacttctcaatgaagcctacgagccacgcactcacgacgtcgaaccccatctccaaaaacatcgcgccaagaaatgcctcgaacacgtcctccaggaccttcttgtcagtagtcgtctctttgtcagcaatgtgttcagagggcggtttgaacctggccacgatcctacgaacgaattcaccgaatggagtgtgattcgccgcgagtcgcgaaagcatcgcgccgctaaccaacttggagcggacgctcatcaggaacccctcgtcctccgaggggtagcgaatgtacaagtaagacgtgataactgcactaagcaccgaatctccgagaaactctagacgctcatagcaagtgtggcggttcacccaacggggtgtgaatgcggcagcgaacacagacatatcttgtacgttcttgcgcacaacaccaggaggaacgtgcatgctcacgatagtctcgatctccgacgaagatatcacggattgttccggcttcttcattatctttccagatttgttagacaaatttgcgaaccaatgggtttccctcgtttctctttacactgtattctcaacaacatacacatgtgtgtttacactgtattctcaacaacatacacatgtgttagtgttgtcaacaagatgatttgagtgaagacacatgtatatttcattttgttctcatgttaatgtacgaacacggacacacaacacaacacaatgaatcgaagagctttactgtttggattgaactacgaaggaacgaccgcatccctgcaaggatgcgagaacaatgcgcacaacatggcggagttcctcatgcgtcaacacaagttcaagtgcgacgtccggatcggtgcagccgcgactaccgcatctgccatactggacgcgctagtcgaccttgcaataaactcctacgacgaggctcttgacaccttctggatccattactccggtcacggcacaaacatcgccgggttctcagacaacgagctcgacagattcgacgagtgtctcgtcccaagcgatttccgcctgattccagacgactacatcgcaaaagtcctatactacttcaatccacgtacgagtatcgttttcgtggcggactgctgtcaatcaggaaccatctccgacctcccgttcacgtggacagacttgatcaacgagaggagtgtgccgcttgtggagaacaagaatgaacatggaagagggcgaaggatcctcgccataagcggatgtcgagacgaccagacgtccgcagatgccctcttgcaggaccccatggatatatgtagcacgagcaaggagtactcaggagctatgacgacatacttgctacaagcgttgaaaaaggatccaacgctgtacaacaacgtgtttaaacttgtgcgcaccatgggcgatcatctagagagggacggattctcccagcaccctcgactcgcatcatttcacgacatacgcgcatcgcccacattgttctgattaagaagtcacctggtcgacgtgaccatatcgagatgggaacaacgccttccacacaatgtctgctattgtacgcattccaatgctcagcggcgtgttctgttgtggaacaccgtacggatgttgttgcgcgcccaagaaggaagaggttgccccagcgttatcgccagtggatagggcaaatccgcaatggagaacgctgtccatgacatgcttcacgacatggttgccagccgtctccacgatcgagaggatgctcgtcacgtgcatgcaaataggcgattgattgaagaaaatgatccgaatcaagtcgctccgacagtaccggtagtactgaagctgtaacaagcggtgcgcaaagtacatgaccataccgatgatgacagtcgatgcaatcgagtgagcggagtgaataagacgactaataagcgtgctaaaatattttttcatctaagatacaaacaaaaaaagaaacaacacacgacgatacaacacagggagaatgaacaaagcgatacaatccagattgcaaaatcaggctttacactctatcttctgcaatgatttttttgaatttagtatcgatatttacatgcgatgtcgttgaacaaacctaatggtgccacatgaaccagttttacatgtacgagtcttgcgttcaactgtcttttgtatgaaggcggagtgctgtatcgttgccgccaccaggacagaatgggcgtttctgcctcccggcggattttgactggttgcgaaacatggtctggagcggatttgtgattcctctgtgctgatatctcaggctagcgagtcgtcccggaggctcaaaattctgagtagaaatttcaaaaaatctgccggtaggcaggaacgcccattatatagatggttttacacaagcatgtacgacccatcatcccaatattgagactgtttacgttgttcttcttgtttttgtttttgtttttgttgtgtcttcttgctgaggtcatcgtgcatttcttgtcgtataatatcttcgaccggtttgtcatctttctttgacattttaaggatttcgtcaaccttattttcctcatttttgatgttttctactttctttgaaatggtatcgtttctcttggcctccaccttggctttgacgaattctgtcttgtggtcttcggatatcgtcgtgaccataccgaatatagacttgttcaaaaagtattcaagcaggacaaagcaaagcagtatagtgagcatccacatgatcaacgtccccaggataccgaatatgatcgagatgatcttcacaccgagggcttttctcacgaaggaaatattgtttatgaaatcgaacaatgggaggataatggagttgagcagtttctttactgcgtcgttggtagccacggcgatagagaatccggcggcagcgacgatgatcttgttgctgaaaatgaacttctggaggtcaaagtaaaccttaatgaaaacattcctctgcgcttcgctcatcgtgcactcatacacaagtgttttcaaataattttgacaaattatgattttcaagcattgcttgcctttattacacattgacccctcgagggccacgtgtcattgacggggcttgccgacgacattggccttgacagtattgggtatcttttccgtttcttaaaagtaagaccttgtcgggagcccgttgatgaacaggtacccaagtagttcgatgtgatcatctcggtcaggtgggccttgagctccgcagggaccggtgtctgaaacgcgcaaacgaggcaactgtttcaaccttcttgaactcgtctttgacgaccaagggaaacgtcgctgtgaacgtgaatggcattttgtggtatacagtctacgattttgataaaaatgtcacacaacatgtccaagtcttaagttgttgtataaagtgtcgttgaacacgttatacacatagaacacgttttgattccatgttaacaaaacatggaactgctccctgaaggccccctctacatcatcgcgtctcatatctcaaagagcgatgctaagtaccgtcgcttatgcgatgtctcaaaggacgccgcgagcctcatgttggtgggcaacatagcgttcgccgagcttagtcttgctttgcaagagaagttggagcccgatggactcctcgtgaacgatgcagcgttcgagaggatgcgtattaccgatgagggtcttacagagacaagcaaggtgaatgttctcaagaaggcgtgtcgcgatcgtggcctgagggtttccggtgtcaaagccgcattgtggaggaggttgaaagaggctgaagatgtctctcgaccccctcgcgggtgcattttgtctgccaaattccgttccgaaatgagggctatgcgctacgctcgcatctgtgtgtcgaaggccaagtctgagtatcgcgtaaccgagagggacctctcgacgctgcgttgcgaactcgtgtacaaatcagtgacacccaagcttctttacagtgtccgcgacgtggctcgtgttgcgctcgagaagcaggagacatccccactatcttcaaatgatcgaagagagaatcgcgaggtattgttgtcgagtacattggcggagttgtccattgtggactcgcgcgtgttttcagtaaatttttttgcggcgagcatggcccgcgacgcttacgtgaattccgggagaagtggggggatcgcgaaggctaccgcgaccatcattggggcgagcaaccgcatgctcactctcgagcgcgccttgaaagagcgtgggtgcaatcttcgtacggattcgcgtttgtgctccgccttcattgacctggacgttggaaacccggtggacatcgccaattcgatgcacgagatgcggtttttattcgaccacaccgagttcaagcttattctggacaacaagtggagagacgccctccgagagatagactcccgggatgaagatgatgatgaagacgataaagacgactacatcgatcctgataagatgagtgagtctgccaaatcggtcgccatcaagcggtgggccgagatacacgaccctgacgaggtccctgacatgcctgaaagcctgcgcgaaactgtattttgtctgaaggcggagtgtatcgttgccgccgcaaggaaagcgtggcgtgctcgacagcctcaaattactttccgtgccctcaattatctggagaaggagttcgaaaagatccaacaacgcactcgagacgcagattccctcgcagccctgcaatccaccctcaaatgcagagacggtactgtttgcgcatgtggaggattcgcgcatgcagagtcatgaggattggtggaggatccaattatctagggcccactttcttgccaagtattaggcagctactgtcggcggaacagtaaaatgaaacatatatcagatggaaataaatgtacgacaaattagaaaattggcgttaagaatggtcgctgacttgggtgtgtcccgctttatttgagaactatcgggggggctcccaaaatttgtgtctccggatgtaatatctgaacatctgtaccaaatcacatcacaatgtatcttttgtattcgctgatcggaattgttgtagggttagcgatgggtatcacaggcattggtgcaggtatcctaacgatcacccttctaactttcgctggcgtgaacataaaaaccgccgaaccaaaatgtaatgtaatctaatctatctgtacagagtgtaatgggcgttccagcctcccggaggaaaatcggagctgttcaggatccatcctccacgggagttccggattgattgttgtagtttatatttcaaacaccttgtaaggatcgaatctgtgtccttcgtccggattgctcaaatagcctcgttggttggagacaaggttgcattgacctattttctggtcgtttgagtagtgcgtgtgtccgtgcacccacagcttcaccggggtactcttgaggagatggtgcaggtccgttgcgaaggcgctgttcagcaagctccctctcgtcttggggtgactggttccttgaaagctcggcgcgtggtgagtgacgacgacaagatcgacgccatcggcttccgcgcgagagatttcgccctcgagccagcgaacgtcctcgaggtggacggcgttgttcttcggcactgtgaagccggaaatcatgcggtagtcggacaatcagcactgcacgcgtattgcgtccatatcggggacgtgagaccacagcgtggttcccaaaatccttactttggtattattggtattttggatttgcaaatcgtgcgctgaacgattaagaaagtggacgttggcgggaaggtcgcggtcgatcagcagtgtcacggcggcaataccgtcttcgagagtgcccatgccgtacgcctcgtggttacccatcacgacgaacacctcctcgaatagctgagagcagtgctcgaggaatgcgacgtactcgctgtcagacggactgcccacatctccggccagaatcaggagcggcgcctcgattttcgcagggtcgaggcgaaacccgggaaagtgctcgaggtgaagatcggacaagacgtgaaaagatggcatatctatttttatgtacacaatttataaatggttgttgtgccaccttttgttacagtagttctcaaataaagtgggacacaccttataatcatccagactgtacagttgttctcaaataattttaagacactcagtataatttgaatgatatcccctgaaaccagatacaggtccgtggttcactacaaatattttttgaggagtctgaggaaggtttgtaatatatacaacgtgtccaatacagtcgacagaatactaaaatgaaaccgcttcatgtacggcacaccttacggtgtaacctaatggtgtagaaatccacggggcagtggaacaccaatacgattttgaatcaacaaattgcaagatgttaacgagaatatcgtggttcttttttagatcacggctctccatcctgcagactccgtatcgtttttttgtcggtactttcgagagtgtccattgaaggaccagccgcactaaagcgatcgcctcttccccagtaccgtggcccaaaagaacacggggtctttgttgatgtgcaatgcgtcatgtaaggaggtttctttgctggacgggtcattttataggaccatccactcatacaatacatgattgtcaccgccttataccgttttttggatgtttcattttactgttccgccgactgtagctcactacccaagagcttatgcgattgaacaaatatttggaagcatgaagagagctttagggcattgtcagcatgaattgcggtgctctcacgcgtttaagacttggtgactacttatgtacttccttagaactatcggcccagacagtgtttctgtctgtactgtgtcagcttcccgtagactgtgtcatccttcatgacacggtgacagcttcctgttgactgcgtcatcggtctctcactgacacactctgtatagccggtgcctggcttaagtttcctgacttagggtctagtcaggttacaggcatccgcctctcccaccgctggtgttctttggcgtccgcctgtccttgtaacgctattcttgtctccgtgtatagattggcgcgtctgtctccgctgcatacatctctctccactcttcgaagtgctttctagctgataggttacgggcttattacttctaccactgctttacaatgcaacttccgcgtgggcctcctgccggcttcgagaaacttaccccacagaatggtatttcctggtcgcgcggtatggagagcgtcattatcagtaatggatgcgaccgaattcttcctctaaagattcgtgttcccactgattggctagatgattgcgcgccagcggcctctgctgctggagatgagtctccttccgccatcatggaagccacccccccctccaatacctccatttctccgtctccttctccttttgtccaacgtctccgacctgaggttgaggatattctgatgcgcctatgctgtgtttccacacagattatccagtatgcaaggtcgcctccacccgctgatgcccgctttacctacgacactgtagaccttgctctccatagccatgaagatggctatgcttacggcaagtctgacgactcagaggaagattactctgatgattgtatggaagatctacagagtgccagaagtggcgacttcggtggagtcactccctcttctgctactaggtttttccacacctccactgtctctccggtgtatgagcctcaattggcaccttctcctgcggtcttcaagcctccgtctgccgctctgcttgcgccgcttccaccggacctacctgaggtggtcaagccgtctttgctgcggtttagagtttagatgatcagcgcgcatatgatgctggcattgctgccgagtattttatgtcggttcgtgcctcgtatgctcctgtgcctgatcctcttgctgctggaccctcggcctctcatggtgagtctcgtgtagatcctgcactgttgggttttagtgccctgcccctggaacgtcaggagttcatgtgtctcactatgatgcttgcgaacatgacggatgcgatggtcaatgtgtatcaggattttgccactcctcgggatatcttcttgcatatccgaagacagcgttctgatgctcttgctgctcgtgtccctctcatgcttgttgagcttcggcgtgcaaccatggacaactctgaacctgtggatgtgttcttttgcagggtccggggcttgtgcactgacctccgcagtgcgggatacccacagcctcagcgccatgccatgcatactattattaatggcatcatgcacccccgcttcgactctctgcggctacagtttggtctcgcactgcatcagaaccagcctgttgattactggacctgtctggcagcatatagatcattagatttcttgaacgtgtctctccctaagtctgatccgaggcatcctggttggtcccgcgatcctccccaggtccctgccaatgctgcttttcagcgtggcaggggacctggtcctcagggttccgggactaccaagaggcgcttggattgcacttggggcccctgtctttccaaaacgagccactcggaggaccgttgctggacgaaacatccgcacctgcgaaaggccaaggctggtgcaccgggcattgaacccgtgcccgttgccttggcccttccaggttcgctgactcgcaagcagttgtcctccttgcaggctcagattgatgggtacgccatgtccaagaactaggaggtacgctctgtcctattctcttgcactacgaagttctctaacgtgtgtagccctagtctttctgagggtgtctggcatgtggactctggagctggaatgtcaatcacgggtgataagtctttgttcactgt

SEQ ID NO: 182 - DNA, 21926 bp, unidentified
  misc_feature 1..21926: note = Fanzor polypeptide
  source 1..21926: mol_type = other DNA
aatcagccaaagccccaccaatgctcttacgttcagggaggttcccttggacagcaactccaatacggtgaccacatcagaagcaccagatacgtctatttcgaagctattgcacgataccttgctctgaccattggccctcgcatccatggccaccgcttccgaccgaagaaatacggcgcccatgcaggcgaacgtatttatttttctatgttttcttgtggatttgtgcagggacagagacgacataatatcaagcaggcttttacacatggctttattgcctccatttgatctatttatatttcgtccgatccaagtgcataatacatcaaatgaatcgtcttgtttaactccaccatttggcatgtcggatgggttgctttacaatggaacgtttttttttcatcttcaagagttcttcaacgtttcctcaggcggcgcagtcgtgtgcgtgttagcgacggcgcagcacctgttgggggcgtacatgcgagaagcgcacgatgcgaaccaaatggccaggacgcagatctaggtaccgtgccatctggtcagagcacgcgataatcggaaagtggtacctcgacttgacgcggtatcgtgcgacgagttgctcaatcacgtcctcgtcgcggatgggttcgtggcggggcaccaactcgtgacgagagatgttgaactgcagttcggagagacagaaaaactgcacgtggcgacgaacgctctcatctagacccctccgacttgtgctcaataccttctcgcgagtcaccaaaataacctctcgaatgttgttgccgcccacaccggcacctcctccaccacgttgttgatgctgattctgactgtcgccaccacccatcttggtggtataagagtccgctttggacaacgccttttcattaatatcgttgttgtcattctcggtgtctcctccttcctccataatgacgtcatcttcttcgatatcccccacaaaatcctcatcttcatcttcatgatcgttccgtctggcaaccgccgcgtccttccctacattattttcgaggggggcgaggagtttcctcacgtcggggagcttgaacgtttgattgagactgtagatgacacggtagccgcagtctcctggaaggtcggcgtggaagacgccccccgatgatggggtgacggctctggcgtgcaggtcgagcgcgatcggggcggtctcctcaatggataacgtctcccctctgtcgacgagcatctcgcatattaccgtgaagctcttgcggacctgtttgtccaacatttttgttattaataaattatttagttatttgctttacactcgctcacattttaggcaccactttcgaattggcagtgtttctgaggcataatgtttttgccacgaaaccagccagcatcgtggggatgttgtctgggacgaactcgtacgtgtcttcgaacgtctccttattcacaatataatatccgacaccgtccgtttcctggacgacgtagtctcctgcgttcactaccatttgcgattgagagcgtgagctactgaacgcaagcgtttgcgatgtgtacacggcggctcggcgtctccctggcctgaccgtcaacgtggaccccccgatgtcgtacagcttgagtgccttgggaatggtgacgttgtaccggtccgatttgggattgcagattaccaatacggcaacgacaccttcatcggggaccatcatggacgcaatcgtgaacgtcatgctctgcaattcatcgcgtgtgcggacaaacgtgtacctcaatcgtttcttctccacatcacggaatttaaggtcgtccattctgagtttgtgacatgttcaacgtatttttaaacatttatactgtattttaaatgaagcgtggtgcggtggcaagaggattcggaaaaaaaatagaaataagatataacgcatgaatgcagctcccattgaagaagttcgacattacggatatccgccatgacaaggtgattgtattgataggaaagagagagaccggcaagtccttcctggtgcgagatattctctttcataaccgcgcaatccctattgggaccgtcatttcgcctacagaggagtccaacaagttctacggcaacatgattccgcacatgtttatccacgacgagttctctccggatatcatcgataacgtgataaagcaacaaaagttgttagctcggaaggtagacaaacaaatacaggtgtacggttcatccaatatagacacgcgcgctttcttgattctggacgactgtctttttgacaagacgtgggcaagcgacacgggcatccgctatctgttcatgaacggtcgtcacctccctatcatgttcatgatcacgatgcaacatccgatgggcatcccccctaatcttcgaacgaacatcgactacgtatttatccttcgtgagaacgtcgtctccaaccgaaaacgtatctacgataattacgcgggcatgttcccatcgttcgacatgttttgccaagacatggaccagtgcaccgagaactacgagtgccttgtgatcaacaacaatgtgcaatcgaacaaacttgaggaccaggttttttggtacaaggccgagccacatgaccaattcaaactcgtgtcaaaggaggtgtgggaactcgctagaaggaccaaacaaaaatgggacaatggtgaagattcggatgaagagggaggagactcgaagaaaccttatgacaaacgaacttatttacaaggaaagggggggaaacaacaaacacaaattagtgtcaagaaaaccatgtcctgatacacgtgtcctgatgagaacaactgtagtatcatttacatgaacagaatctcgtctccgttcttcgtggcgttgtcctcgttctgttcctcctcctcctcctcatcagagtgcttcttgacgttgttttcgttgagatacatgtcatcatcggtgggcatgaacgcgtagccgtcgaggttggcagacatgatcatgcgcagctggcagaccttccacgtaacaccgaacgatttgttcagtcccacggaccagatcgactgaagatggatgattgcggacacgcgcgcacccttgccacgcttagggctccggaggatctcattgaggtcgagaggctcgcgatcgcctccgtacacagggaaccggaaagcgccatctacgaaggggaggttcagcttaaagttgggagggtacatcgtcgacaactcgccggtatctttgtccttgctgtaccggatcgatggggtgaacatgtcggccaccacatcacaagaggggtacttcttcttgaaccacgcgttagagttctccaatgcattgtcgatcacgtgctcagaaacgcgctccatcatgtcgaaaaaatcctggacgccctggtttgtgtcccgtccagcgaaggacatttgcagtgtgtgcttgtcaggtagtccccgctctccgggccacacgctgataccgaacggcagagacatcatgggcgtctgtacaagcaggttccggttgttataattgatgaagatactgcgacctccgttgtctagctgcttcggagcactaaaggtgatcttgctcacgtcaacatcgcaagggaaggtgacgtcgctcgcgacagacttggacgtagtagtccttggtataggggaaattaggatggggtggtgggtcaacaataaatgagaggaacaaagctgatacctaacacatatcggatcctctttatacttgtttgagtgtaacatttttattcttatttttttggaaatgtgtaccgcgaactttcttgggtttggggggcatggaaagcattagcaagtcaggatcgtaacatgttggagagcgacgaacattgtcgtcacgcaggggggtgtccacgttttctcgttggattgtggagcgtgtgtgtgaatgacgatacagtcggagacgcaatttgtgggacgccctaccggtgacccttgaacccaacgggtagatcagctaaaggcgagtacattttgcccttcatctctgtatttcagcatttaagctggcccaaaggataacaaggcaagctgctgacaaacccaggtgggtcggtcggtttagcgctcacactcgcctcgatggaaactgtggttttggggggaggcgagggaacacagaatgcctcaggtcgctctctcccgtccatccacgttgtcagaagcagaagaaggttcttggcagcgttcacgtctcggttccaggttgcaccacagcgcacattggatgatgcgcttttgacactgtctctacggtgcagtactttgtggaccttgacgttcttcaccaccatcttctgcttctcaaaagttatagacccgtcgattggggactctttgcaaactccgcgccagactacgctgtctgccttcatgttgacaagcctctggaagcagccgtgacatttacaagaagtgttgcgttcgtcgacgtttttgaacaaaacattcttacgacgtgagaggcacctcctgatctctttgatgggcccagaacatgaacgactgataccatacccttggttggaccagttgccgaagccaacaacggtcgtctgtgcccttggtgcaatcacatcgcataccttttcaatcgtcttctgtttaccaacgtatcgaaagaatcgcatagatcggtagcctttgttggctctgtgttgcaggaggatcgggagcgctttgagataagctctgacatggtcctgcaagtcgaccatgttgctcgtattaggcgatggaatggacttcacgaggtcttgagtctcgtcattccatttgtaggtgcgacgcttgcttgtattgtacccagcaactttgctaaagcgagccgagctgaaagacgtgatgcgacctgcagaagatgctaccgtgacgatatctgtcattccagggtctactccgacacgcagcgcacccactgcgtccttgcactctacgatatttgcgtccttgggatagcctgcgttttctccttcttcaacgacctcttctttacccttctgcttcatttggacggatacccctttaccgtcgctgaggattcggttgtcaaagcgagaccttttcgtctcaagaccttggacattaaagtactttcgccacagcattgtatggttctcgtaacgtccatcgccagagacgctctcgagtggcgaatcacccatgctgagaagcttcatgaaagtcatggacgatatcgggacgtacgaaattgtgaagccgttcttgcgagggaggatactgaacagacgggggtgacttttttttgttttttttatctttcggatccactcgtccgacctctcccaactctgtaagcacgtgatggaacaatcgcattgtcaggtgcgctctagtgttgaactgcttccctcttggcagcggaaagagagccctcaagtgactgacaacctctttgatgtggatcgcatgcacgaggccctctgggatgattgtgtcgattttcgattctgggtactggaccaccgctttgacaatcttcttgaaatgtttcttcagagagggatgtttcaagcgcaggtacttgataacgaccctgtccacgtttgcccagacgctgttgcacgccatcgtcgccatttgtattgagacgtctgcgattacttgtccccaaggacgaacgtccaccttcacgtagcctgcaggtcttagggcgtcgaaagcaaccatggtatcattgaagctctggcccagagtatcctttcgaacattggaggtcaataccgcaaggaggcacctgtaataaaagttccgatccaggtgtggcaactgcttgacgtcaaagtctccatcatcgaggcatcttgtgatatgaaagtttgcgaataagtatgcctctgcaactgcgtggttgattaagagtaccatgctttgtatccttgaggagatctgatgcctcgatacatccatgcacagagaattaagcgtcttcttgacgacgctgatgttaatatcgtcatctcctttgtcttgcactacccccattaagagggggtgagtattctttttcttttggtgatataatattgcacccacatttccttatacacatttcctacgttatcatgattgatgcagagataagacaccgcgtgtttgttcactacaaataccataatcgtagtttgaggaaagttagtttgctgtacaaagtatcaaaatcatcactccaacgttgggtcaccaaagccaatatacaacatcatcggaagaaaagggtgagtgtcattacagaagatatcaaggctgctataaaacaactgattgactccaatcccttcttgacaatgtctcagcttgcagagggtgtgacttctctgtcctctgtcaagatgtctccaaaaacttgtggacgctacacacgcaaacttggttacacccgcaagcgcgcatacaaaacagttcggcacaagaatgaccacaaatcttctgtcgaccgtttttgtaaggagtatttagccgttcctacatcggatttgttaagcatcgggcgggttttttcattggtgacacttgtcgcagagggtactgtcaacgcggcaaacgtttaaatatccaaatttctaggacattgcgaatgtccaaattgacactaattgctgccgtttctgcttaaggtatcgttcattacaagatccttgatcacaattgcaagaaagtcgactttgtacagtttgtatctgagttacatgtacagcggggtacaatcgctgtccttgacaatatccagttccatcattcaaaggagacgatttctatgttcgattctgtaggaatacgaccactctttgtacctccttacagtccagagtttaatgctattgagaatgtctttagtttgctcaagcgaaaatatcgctgcatgtgcccaataattccagatgtagcagatatatttgattacagtaacgctttgaaaaggattattgatgcgcacgatgttagccatcattttgacttttcagggtactttgaacatgtaaattcagtgtctttagatgccttgaattttttgtgtcaatcacctgaagacagtatctgtattgacaagatcggttacaaatcttgaattggtcaacttttcagaatccccaaaatagaaggtgtcccaatatcaaatttccctagctgtatggagcctcttgcttctcgttaacgctcttttgtttaggcggcttattatggggtttttgaggtgtcttctgtgtttgttgttgagacggcgtattatggggtttttgaggtgtcttctgtgttttttgttgagacggcgtattatggggtttttgaggtgtcttctgtgttttttgttgagacggcgcattatggggtttttgaggtgtcttctgtggttggtgttgaggcggcgtattatgggatttttgaggtgtcttctgtggttgttgttgaggcggcgtattatggggttgttgaggtgtcttctgtggttggtgttgaggcggcgtattatggggttgttgaggtgtcttctgtggttgttgttgaggcggcgtattatggggttgttgcggtccgaccttattggttcgctgagattaacgatgtccctcaaactctttgatagatcgaatttgaacaccttgttatggaggtgctggagcgatgggttcaacagtgttgtcaatcgtatctggaatctgacaggctcgtcccggttgttaatgtcggtgaagatcgtgtaaaacaggttatcgaagtctttgagcatgagtattctggcagaggtattgttgtatttacgaatggagcgcaccaacttgtacttcataggcgacatcttgcgacactcgactgaagtcgtgtcaccatcaatgtcgtatgtgatcgttaacatgtgtatagcgatagcttccatctcttgtgcgtacttcgcttgatcctcagcacacttgagcaatcgatggtcccccaacgacattacgtacatgtagttcctggcgttcctggattttaagaagctagataaccctccgcgacagtgatcgatgtagtgaccaccgtgaatcaactcgttcatcaagaaaaatcgatcaagcacgctccctggatcaaacttgagctctggctcagagctcctgtagtactgtccagatagggatacgtattttatgaaagagcttatcttatggtcggttccatcgggattcagtagcttgttcattactatgctgtagatcatgtaggaaactatgtggaaggctccggcaatcgtgtcgcggtgttttacactgtccaaaccgtccagcaactccttatcattaattcctataatggtcttgtaaatccacgtattcgaaccgtcacgtttggcgacaattacattggttgtcttgtcctcgctaatgcgagctatctggttgaataacagagcaacgctaagcgctagatatcttttcaatatgtccaagtgactgagtcggtgttcgttatcgatcatcaagacgctcatgtacgctggtaggttatgttcgatgagacgctgttggattaccagtccgaaaaacagttggcgcatttggtttcctgcgccgtggttggggcgcggcacccctttgccgctcgaaaacatggaccacatcgacgggtatggcttgttggagaaattgtcaaaaacgaaatgcgcacacgacgtgatgaaggtttttattgaagttgaggaggacacgatttcttcattattgagtccaacaacgcttctacagtcggcggaacagtaaaatgaaacatgtatcagatggaaataaatgtacgacatcgccgttagaaaattggcgttaagaatggtcgctgacttgggtgtgttaaaaacttctgtgtttacaaacatcagtcgttctactctgtggaggtggaaacgctttggtgtaaatcgaaaacgacgtgaatttgtaagcaaactttttgagacgaacaaagatttgttgaaattgtttttattgtcaactcaatgcacaaccccaagaggtgttgttgcatttttcaaaagtactcacaatttacgattatcaactaaaacagtgtatcgtttcataaaactcattggttttacaagaaaaaggagcaaactccgtggacagtgtaaaggggacttagttccacttgtcactaaattttgtaatagatacaaggatacaatcaatgctgggaaaattttagtatcagttgacgaatgtgggtttagtgagcgtctcaagccacattatgggtatccccttgtaggaaaacctgttatcgttaaaactactggtgggtgggtacaccatagtttgttgatggcagttttttcagatggtaggaaggatttcgttgtgaagaaaggatctgtgaagaagacggacttcgctgcatttattgactcattgagtttgtgcaataattcagtagtaataatggacaacgccagtatccataagaacttggtcctcagaagccccgtaaatatttgttacactcctccttacagtccagaattcaatgctattgagctgtgcttcgctaaggtgaagaaggactttcgtcgattgaactatataccaaacgatacaaggacgcacgtgtctgatatgatttccttagcattcagcaacctcactgataaaatcattatgggttgttttgaccacgtatggaacacgtatgtgatgtttgtataaagagttctgtgatgtacaaattatgtaagatggcaacgaaacctccgacagatgcgaaattgaaggagctactaaaattggccgaagtagcacactcctcaaaggacaagaaggacgatattgtccgtttatgcgaagacaatggtctcatcgccagaccccctccagagtacaagacggtggaaaagatgtgcgtcgtgaaatgcaccctgaagaaggctatgagtcttgacgatgaagaattcggtaagttcagggggcatgtggatcagctcgtcaatgtggtgagccgcgttccagtctggtgctgactttccatgtcacgaggctcatggagggcgacctgccgattcctaatatgtacgatatgaaggatacctactggaaggattggctaaggatcggagttgacggcgtttttccagatgaagagagtagaatatcatacgaagccgtgaaagacgtaatgggaaaggtgcttggtagcgatgaccctgactacatcaactcctaccctatctatttcgaccaggttttaaactatgccggtcacacattgagtactgtcgtgtcgaacaacgcatgggttactttggtacctcgtctgacccgcctcactaaggctactttgaatgcactgggagctccgaagaccatccgtgtgtacgacgtgatgagggtcatccaacaagaaatacaggagatggaatcttggccagagtctgttcaggagttcgtccgtgaagttcgagtcaggctgaaagttccagatggaagtcgactttatgatgactatggcaaagacatggacttcccgaccatggtccggttcaattattggatgcagacacggttggaggctattggtgcacgttgtatccggttgatgcccatctttaatgtccaacgggcgcatgtccgccttgacatgaagaccctcgtgaacctattcaggcatgtgttccccaaagacccaaacatcgtcgagctttcaaagtggaaaaatgtaaaggatcccgaccgcttcatgttgcctctgaagcctgcatttaagaagaaaaaatcatgtggtcctggtgaatgggaggcatacaagttggcccaacagaagtacgatgctgacgttaaggatatcaagtctactgacgagtacagacatgcaaagggtaggtatgacacgctcgtgaacgcccgaaaaacagacgcaggttccttcttcaagaaaccacctgtcaagacggggtgggtgttcgattgtagcatctgtactgacggagtctcattgagcatgcagtacagcaagacagtacaggttcgtgtatccgatctgaagacgacaagtaagaggtctcgtgacgaggaaggtatgagcgtctcagaacagtatgaccataaacttaaaacgacattgcccgatatgggtatcgtcgttctgggtgtggatcctggtaggagcaacatcgctacagtcacgtatctggcagacgacaaaagcaagacatggaagcttacacgcggagctttttaccacaagtctggtatcaagaaacagaaaaaacagcaagaaaaacgtttctcagacatgattcctagatgggagtctctgcgtgaaaatggagcagcgttgagtaaatccaggaaggatgatatctcggcttacttgaaaaattacgctacgttttccgacgagtggtggaggatggcactccgtcgcagagaatcccgagacaactttcagaggtacattggcaagcgcaaggctatggactcattttgggcagggatcaagcgcaacatgaagttggatcatcctgacctgagggttcgcgtagcatatggttctgcaatcacgaagctgaaggctaccggaccaggagaggtagctgtgcctacgggatctatgttcgcttcctgcaagcgcctcttcaaagaggaggttcatgtgacagatgagttcaagacgactctcatgtcttgggaaaccggtgccaagaaggaatgtgtttacaagattccaagtgtccaaataaccacggaaggtcagattcgtctaggttacgagttgttgggtcacaccccattgaaggagactccaaaggtctcttatcgcgacgagttgacggtgagggtgtactgcacacgtaaaaaatccaagaaaaacacaggaggggtggcttagccccctctcttgtcgacaacaactcgatcaagcggtaccctgaggtacgaggactgcgattctctccagaaaccagcacttactcggaccgggaccgctcctctgctctcacaatcgcaaggctgcactgcatggaactgttgggtcaagggagaccgcttccattttgcagggatgcgtgttgttgatgatgggctacaaaaaaacatgatggtgttccactgcaatgtgggttgctacaccataaggttacaccataaggtgtaccgtacactccagaaagcggtttcattttagtattccgtcgagtgtagatgcatcgtctaagtacgggttgttcagatctatggatccgtagtgtttcgatacattggggtatccaatacccttcagtttcttatattcatagttctccttgataagcatttaggttcacccagtgcgcaaattattggtatacatttgttctccaaattaaatgatgtaccattaattgttacaatttgtctacagtcggtgaaacattaaaatgaaatagtcggagacacaaaaacaatggtgttccactgccccgtggatttctacattatgttacaccgtaatgtgtgcgtacacgaagcggtttcattttagtattccgttgactgtagagatatcagccccgcggaatcacaataccgctccagaccatgtttcgcaaccattcacaatccaccgggaggcaggaacacccattatttataatgctgccacacacccaacttgtccaataaaaatgaatctatcggttgacctccagtgggatgtagacctcgttcaccgccgggtcaatcgggtagaacatgccgtggcgcctgtaccttgaaaacttcagaattcccacatgattcttctcaatgcgccgaggcctttgcagaagccggtcgatcatgcttctcaatgagtacacgaacctattgagcgtacgcatgtatccttcgtagtcgctgcgtcccatgcagaggctcgtgatatgctccatctcaaaaggagtcagaggcgcgtgcatctcattgtcagagagaaactgttgtttatgacacttttttttgacgaaggtacgttccagtatgtccgagcacacgcttcttgtggtggtagtatcattgattactcccatgcgtccgtgcatgacgagcgactctgctgcgaagagaccgtcgagtcggcctgcggcgatgcggttactggttcctacataggtgtacttcaccccgcatcggagcatttgcgtccgtcggtgtccagggaccgcgctattgaatcccttgaacacgtacttcataacgcggttcaggccaccgattccccaaaaatcgagttccacgaagaacatggtgctccgcaccgcctctatgaacgtcggggcacagaggacctccagagcgtcggatgtagggttgcaagagatggcgaccctggacggtgcgatgtcaaagttgaggataagtgtggcgatgtcctcgttcatgctcatgatgaccttgatgacgagggggtctcccaccatactgacgatgttcatggcgtgtcgcgtcctgatgatttttccggcgtttagcctctcgatttctgcgaccatgctctcggcctctgcatcgtcatccatgcccacaaggaagatgtcgtagtccctctgcgtcttctccattccagtgacaacatggccgagcgcggctcctcctgcgagcactagttttccggcacccagtcgcaacaacgctagcacctccgttgggagggacttgtgcagttgctttgacatctctgctaccgtgagactttcgtccatcactaatggctcggagatcgagcttggacgcgatcgagcttggacgcgaccgagcttggagtcgatgccgccgtagagccaattgatgtttcgggagctcgtgcattctggtggacacgtccgccggatcggggacacgtcgttgagatttaccaggcgcgcgttccttgtggtagcgttgtcgctcgtccgacatttccactccagtgccatggcgtcccacatgttcgggttctttcgcaagatgtccaggctagcattgacagcttcgaggagtcgttgcaacctgtcctggcgcaaaccgagcatgtcggcctccacgcacaagcgacttaaacaattgtccataatgcaaccgtccacactgacactgtcattcataatgaacttgtcgtcgtcattcagaatgaaacggttgaacatgaacatgatgtctgatcgcgagtgtgtattggcagtctttggcacggcattgtagatgtcgatgaagctggtgcgtgtgcatggagccgggacgggaatgggttccgattcaggttccgattcggagtcatgaatgtggtcaggactgcggccatttagagggatgtagcacatgccaagctgatcatccagcaggggctcgaagtaggagaataggctgagcaccttgctgtttgaaggaatcttgaacgtttctccgttgtggaattgcagcgtgacgaaggttgtcttcttgttgctcgcctcttctgccgccttcatcttctccttgcacgatgtcgccacgtatttcaggatctcgtctgggatgtgcacgagtgcgttcttcagttttttgcagtgttcgattgtgttatcgcatggatgcaggatgcgtgcataggagagggggcggatccatttttgcctttacttggagagatgaccacgaagcccgatgttcctgttgcggcgacgctcttgaagtccactcctaggatgcgttgtgctggtccgtcgtagtattcttcctcttcggcgagtgcagatcggaggaaccaatagtgtctgccggctcgggttatctcggtggggacgtggttcagaatcgggaagatttccttgaggtgcttcactagcttctcgttgtccacgtcaacgacacaaagctgtctaagaagcactcctgcatccatgtggttcttgtgcttagacacgaaggtgtcgtgatcgccccattcccaaacgttgtccttgtgctgaaacttgggtttcttatcgattgctggcatcaagacatctgagaatgtaatctacgaaactgtattctcgtttacacccttaaaagctgttattgaattggagttgattttcccccttcttggagactagcttcatgtgttcaagtggaacgggtagagtggacgagtcgcgcacgtattggcggtacatgtttgcttcctttatgatttgcgggacgcagaagttgagcaccaattggtttaggtctctcacttgttctaggatgactgcttgttttccctccctattataggagtctgtcaggaatacggagcgcatgacgaacactagttgatcttctgactggcggcctatcacgagctttcaatccgagtctacccaaacgcggtagcggatcgcttggtgcagagcgcccaaattggcgtcgctgaagaacacgttagctacactggaaggttggaaggacaccatgcgcgaccgcgcgttattggattccctttgtggatagccctgttggttgttggtttccacatcacgcatgataggggggggaagcattgtgacggacgagcgtcttactatttttacatgttttataaaaaaaaggcgcgtgtgacacgatgcgtaaaaaaagccgcatcattaaagaacccctttccaaaactcaaaaatgttgagcgtgattttcgcagccttggcggtaatttcatgcgtggtcgtgtgcttcgtgatgagtgctatccatcccatgaaattgggggaaaaagaaatgccactctggatgggaaagatgatcactgtcctaaatgaaaagtacgatgcggcaaaatcaccagccactaataaacatgtcccccccaatgacaacgcttctccagaacaaaccaaggatacccccaagaccccacagtccatctctaaagcggattcctccactgcaatcaaaaaccccgccaatgccaatgcttctcaaccaaatacacccgacaatgcttctaaagaacaaaatgcggaccccactgcaatcaaataacacgcaaatgccactttaccccccaccgatttacctcctgatacaggacaccctgtataatttgaatatcccatgaaacctgctacaggtccggggttcactactactgtttaaatttttagtttaaagcgttatctgcattggaaaagtgtcttcagttcattatcatcatcacaatgagcgtttcttcataccaagttgcgtttccagagacctttccatcatcgtgtaccatatcgaccattcatacaacggatggtagttccgaggtcgttgttcgttttggcgacatcctttgggatttgtttgacgccgtgtgcaagcttcagacgtacgaagacatatgcaggactcctgagttccttcacatatcgtctgtgttcggcgctcatccgcacgcgcgatacggcctgtccctgtcgtccttgatggaggataactttgacaagacggccatctcatggcattgccttgagagcagtggtggaacgtaccttcccgatgaggacacggtggtgttccccacattcgacaactttttcagaggcgtgttggagctggtggaggagattgctaagcactcgtgtaatgcgagcactcaagagcgcttcgtggtgttccagagattctttgaaaaggcttgcagagtcgtggacgtgaacgacatgtctgaccaccttggcgagttcagtattggatgtactcgtgactactaaagggcggcgtcttcattgtgtgcatatgttttttggagactccggtggggatgcacatggaattgttgtcagagttgcgcaatgtgttgatgtactctacagggagttctggaacattgttccctggccggatgcccccgcctggaaaaaggtatatcgcctcctcggggggtacgtgcatgctctgtaggctattgtagatcatgttgactgtctccgggcgcactggcttgtttgcccaaggggctcctttgatgaacggtttgccggtgtacagaccgccgtttaaggcgcgtggcgggatctcggagtactttgcggaaagtgctccagaatctggccccaacaggacactgggttgcttgttcttgtaatggacttggtagtcgttgatggaacatacctataactttaagatgatcgtcccagttcgttgcttcacatgtggcaaggtcgttgcagacaagtggcgtgcttacacacgtatggtcgacgaggacaagaccttgacggacgaggagcgtgggaaaattcttgatacattgggcatcaagcgcatatgttgccggactgtcatgctaacaactgtagacatgatgtttgttttgtgatacaagtgcgttctatcacaaatccattttatttcagagggtgtaaatctcccgacgtcatctttgcccccccccctcccaatccattatgatttgcgactctataaggaactccgcctcttacgaaacgtgttgtatgcgtatcttgtcatccctgatggaccgtgccaaagatgatgctgtgcggtatgctgatgagcgccatgtcctcggttttttccagaaaaatcttgcgtacaccgtccagtccggtttcaaacattttttgagtgatgatgacactattgggtctagctacaccgacacagaccgcgatgtgttgttggatgtgtgcaatcacgtagcaagaatcgtgtacacaagaccgcatatcctctacgacggtaaaggattgagcccggtcgaagcggcagagaatcggaagatcctaagtcaagaaataatggcatctctgcaaaacatacatacgacgacgactctgcagaaacatatgtctatgatatccgaagcatccgagaattgtgtaaatgaagatgtggaaatagataacgatatggaagtagataacgatatggaagtagatgacgaggtggaagtagatgacgaggtggaagtagatgacgaggtggaagtagatgacgaggtggaagtagatgacgaggtggaagtagatgacgaggtggaagtagatgacgaggtggaagtagctgacgatgtttctggtcatgatgattccgatgattcttcacgtacccctcaccggccatgttggcggatgtgtgatttcgatgaggactgcaatcatcatgttgatgattatgcgatgtccgtgtctcctcctcatccttcatctgacaaggaagaagacgctatagaggaagttgacaatgaggagttgatacgtatcgatgaagagcactcccatcgcatgcgtgcgaaggtggaacgtcagtgtttggaagagatcctcggatgagggattacataaattctgaaaaaaatcgagcgcgtaatgcactctacgcacacgaggtgatcgcagggaagggcgagcgctgcaacatgattgtttaggcagcaaggacactcgtctgaaatcttcaacgagagatcccccgctagtagagaaccattggcgacactcgaacccgcacttctaaattcggctcatcaactgtaccatcgggactggtggtgttgtaatccccccttgctgtgcttaacccgtaaccgttgccctctgaatggcgatccttcacaccagcagaacaacatttgatcttgaaaatttattcctactttatttaagaacaactctattacaaacgtttaacatggcattggtgtctccgtctgcaggtgttaacgttacttctgtatcaattttgatttttatttgtttggtggcggccatccttccttcagttgttgatattcgtgttcatggcaaacgtgatgttgagatgtatctgagcgacgacgtgatgaccaagctcaagagcgataagagtaatgcgcataacgagtcagggattcgttttttttacactgacgggagctctttccctaaaaactcggtgtacttccgtccgtcggatggggacatcgtgtgcaatatttcccgtgattccgtgaagaaggttgctaactgtccttccgaattcaaattagaggatgttacggtaattgacatgcggacgcagttcacagaccctcgatacgagtgttctacaatgatgtctcctaacgtgagtcgagacctgcgaaacaacatggacgcgcgcgtgcgtgtgcttctaggcgagtacgagtttgcaaagacgtgtttgacattggagactcttgttttggacgcatctattcctacgtacactgtgcttctggaccgccgcgccttttccaccaagttgtttttcctcttgcgccccatcttcgtccggggcccggggtgtgctcccatgcgcactcgcacgataagcatgtacgactctcatgatccgaatagtgtttcccaaaccaacatccctgtagtatttgaggaagtgtccgacacccgcatcctaggtggcaatcccggggatttcgtggacattggcgctgtccttaggaatatgcgaacgacggctgtcaagtacggctcgaagcgtgttaacattcccatggtcatgtattacctcaactttgtgcaggacgttcctgtcgagtctctcaaatacacaaacgtggttaccgcgttcatcacgcgcaccaccttgaacgctcaggtgcgtttgacagacagcgtcgtcatgactgtcaacgtcggttccgtgaatgtcaacatttctaatgccagccgcccgtttgaggttgatcgcgtgcgcgatagctcgttagttgtggtgaccttcacgacatctcttatcatcatggcgtccatggactcagtgtcggggcgtgtgcaggtgctgcagatcggcggcatacctgtgatgcgcatgtcaaccgacgcactgaccaaggtggagcgtttgttccctccaacgaacaacatgtacccttacacgaacaagagcatccccaatctcgcggacctagctttgcgattaaatgcagtgactccttgatgcacattcgagtgtattaatgtaatccatgtccaacgcattcgcaaaaaaaactgcaaaaaaaaatactgatcctttatactgctctcagaagagaacgacaatcttatgtctggtaatcaagcgtcattcaatggttcctcggagtgggaacgtttctctagagttgctgctaacccgtcaggtggctccgacgggcgatggaaggtctacgccctcgtgttcctcatcatgctggccgtgtacatcggactgctattttggtggcgcaagcgaaagaccaagagttgcgagacgttcagcgagggtgacgaacagtgtgaaactcgttcgaatgacgaatgcatcgaagataatgatgacgcctgcagagacgattggagtgatggggaatgcgggcacgaacacgaaaaacccaatcaaaccaaaaaagaagtcaatgccgatgccaatggaacggataaggtgaaggagaaggagaaggagaagacgataacgaaggagaaaaataaggttgacgatagttgcgatatcgatagttctggttcacactctggttcagactcgtgttcagactctggttcagactctggttcagactctggttcggacactgattcagacactaactttgattcgtctgacgtttatgccaagcggatgtgcacaatgaacgccttttggcgcgtgttcaatcgtcgtgcaacgtctgatgaaatatctaaatactccaaactgaagtgcgaagatgacatcaacaacgctgtcgatagaattgaaaatgggaaatgtacgaagactggtgcaacactcattgatacggttgatactacgtccgacctgttgaaaaacaagccgtacccgaatcggacccggactcggactcggactcggactcgaaattggacccgaaattggacaacaatatcgaaacaaacaaaaagaaactcttagatacaagacgcccacaaccgagaatccgaggaactcgcaaccatcctaatactgatcccaatacgaacctaactcgcaaacatcctaatactgatccaaataagaagaatagaagcaaagacatcccttcatcagttattagtgcggttggtaatggtggctgcgtcgacgcttggtattctggggcgtcttactctggatctctctctccatatgtgccccacgagagtgcagcagccggtcttgatgatgactctgtgacttccaggttgttgcgggggttgcgtgtccccccttcttctaattattcctgtaacgaaacgggtcgtaaccggccacctgttgttgtgttatctagcggggatgatggaatcgatagcgcaaatgggtttaatggcataaccgaagcgtcaatcgcaaagtgtggtggcagctcaattgttggaggcttcaaaacatacgaggggggtaagaataggaaggttggtaataatactacgtctaatagtcgaaaagtgtctggacgccgtgattctgggcattccagaaaccctaataatagagatgcctctgatattgatcggcggaatgtcttgatgtccaagttggatgctatttcacaaaatgttaatgatgtcaagaacgtgtgtggagaaatattcaactgaaatattcaatcgaacggtgttcagtctacgcgagccatactattttacggatgaccagccaaaacaacatggtaccgatgattatgtacaagaggatctcgacaaattcaggcgaaaaaaaacgttgtgtctgtccacctacgtatgacatgaactgaatggtggcgtggagacatatcatacgcgctatgtcgaaaaacaaggggcggtactcctcgccaagtgtgtcggatacattgatcgtgaatagtgcctcctcatttcctcctccgccgtacaaccattgccaatccgggttgccagagattctcctagattctggtcgttccgaggatgatggggcgcaactcttatt

SEQ ID NO: 183 - DNA, 21911 bp, unidentified
  misc_feature 1..21911: note = Fanzor polypeptide
  source 1..21911: mol_type = other DNA
ttgctgcactagatacgatcaaagagatcttgctgtacgactcaggtgttgctgatctagtttcattaacaatgtataaaatatagagcaagacatttttgcggcattcaaggtgcaacacaacaagcagctgcagtcttgtctcgacttgttacaatatcatgtgtgagtgacgggactccaatgaagaacaggtgtaggcacttctataaaattgtcaggggccgaaacacgtatccgcgctgaatgacaatgcattgctcacaactcaacaaaaccacactccatctcgggaacaacatattatcaaaacaagaatcttccggaggctccctattttaaacgtgttcacatgaacacctctgaaaaataaatttctttgttcgcctgcgtaaatcctgcttcgtcgatacaaacaacgtactgtacttgtcacagaactttctacatttcttttgaatgtccgtagagaattcaaaccttcctcagattcctcaaaaatatttgtagtgaaccacggaaaaaatattgtagtgaaacacggtgtcccaaattatttgagaacaactgtatggcaaggagtaacataattatttaacatacatgctggatgtgaatgactgtctggttatgtacatgtatgtgtgtgtgtctggttatgtacatgtgtgtgtgtattaaattgtatgcacaggattcactctttgcccccttggtctattttcgcgcgagtcagttgtttcaattcgctgattgtgacactacatgcatcgagagcatcctctgtgatgtcgaccccttctcctgcgcccacatcagtgcttgacgggccgcagaagagtccattgtcatctctgatggctggcaatgaagtcacctgccacacccgagagtagttcagtaacgctatgtaaggggctcatccagtaaaatgatgcgaaacccatgatttcctgtagtggatggaatatatggttgtatgcttgaagtgacggacaagaggcagatacgatgacaaattgtgtcccatgttgggttgtttaatacatacgacaatattttgcaatcagacgcacgtagttccgacacatccatgggaattacaatgtagggcttgatgcagatgtagatttcgctttccttgtggtcctcaattgcccactaaggacctgaccgtagcgttagcgaccggtagcgcccaccaagcttcattgtattcatccagcttgacgtgtgtacggacgtggatacttgacagttcaggtcgcctatcaccgacgctgccgcctctgtctgccctccaagagatgcgttgcagccgtgccaaaatcagatgcttgaatataaggaggtcgatgacatgagtactacacacccccaacgttgcccaaaagcaagatctgcagttttttagagttataggcgtgctttattacaaatagagcccaaccattctaaaaatcatacaaatgccaccaacttacacagtcaccgttcagtatacagacgacagtagtccgatatcaggtttcatttgcagtattcgaactgtggaagattccttgttggcatgtcagggggaatagggggacaatatcagaggctatcgatgactttagacatcgggttacaatgtggctggcatatcctgagaatcatggattctctgcctggccaacgcctctcaccgacatctctgagatcaaaaacgtaattaggacttttagttggacaccagagtgattgggatcataattcgtggattcatgtagctcaagacaacaaattgcagcctacagtcggcggaacagtaaaatgaaacatccaaaaaacggtataacgcggtgacaatcatatattgtatgagtggatggtcctataaaatgacccgtccagcaaagaaacctccttacatgacgcattgcacatcaacaaagaccccgtgttcttttgggccacggtactggggaagaggcgatcgcttaagtgcggctggtccttcaatggacactgtagaacaactgtaggaaccctcatgcagcccaagaccacaaattgcaccctgagcttgcttgcagtcccccaacccctcaacatctcctcaatcgatcgccttccaatatcgcgagactcacctccctctcgacgctctggtcctcgatttttgtcgcgagagggggatgcgtgcgatgaatgcgaatctggcgcaaaatggaaagaaagtcacaacaccaaacactttgagatcccctaactttcttggctgtggtcagaatgaacgattccaaaagcgtctcccatgcaaacccacctattgaatgcgtttccgcgatctccggtctcagattcgcgagtgaactttgtgaaactcgcaagccaagtcgtaggtcgctctcgaagcagtctggatgattataggtgtgtcccactttatttgagaactactgtaaacatatcgctcgctctctggcgagaaacaatatgtgctcactcgctcagtttgcagacatggcgtgaacaccatcctaacgccacgccattccagatgctgacatggatgtagcattgcagatactctcgaacctatggcccactcttgaccatagcagccattactgcctgaaccctttgatcttggctgcagctcctagagcactcaggggtggggctctacccacaatgttaaacgcttcaagggtgagaaaggtcggcgttacaaggacacaatagagcaaatgatcttaacaggaacactcatggcatcgttttcaacgggacacctgtcgtagacctagattctcgttagaaattatgcgtttcttgtgtaccaggtaatgtagataaggggaaatcgtgtgtttacgtactcaggtcaaaatatttgacaaatgcgttggcgtctcccgcagtatgatgatgatgagaagagccagatcatcaattttgccaccgtgaactgagctccaaacgactcgccctcttcatctccagcagcaaggcacttctgttgtatgtggattatacttatgttcctacggatcacattcagaggactttatgtgtgcacatgcgtgaagcaggaccatgttgggcaagaatgtggatggtttggacataccaggtcaccacagcactggttcctttttgcacccactcgactttcatgtcgctgtgcttccggggcacttgaagaaggcggagctgatggatctgttggatgatcacgtggcacactcacatgatgactcggtgctcgtgatcgtcttgtgtggtcatggatcctccggccaactcgtcatgaccaacggggcgaaggtgtcactggaggaggtgtcacatgcgacaatgcatcactgaggaacagtgtgtgcctttcatgttgttttgcggtgcgcggacttccgaggcctcaacccactgagagggatcaagacaaccacaacttcgacggtgcatgttcatctttgcaaccgatgacgctgtcttgaactcgcaaacactgaatgcatttgtgaaagcgatcggcagcatcatggataccgggaatgttgttactctgggattgaggacgccattcgctgtcacatgctgtgtttcaacggatccgtcttgcatctggtgggggcaaacaacgagatgcgaggttctttgtttcaaccgcattcgtcatgcagagagaggtgatctggcttgtgtgcccctgttctacatgtgagacaccgggatgcttcttgaacagtgtggagagacatacaccgcaagaactgtcaattcacctgcgacagagacattgtggggggcagctggcatcttcctgaattccgttcaaacagaaaaccttgatgtaaacaatcgcctctctctccaaccacaccacaggcctgaccaccatgcatgcattccaacacggtcatgccaccagccatgcagtgcgtgcaagcactaatgcggtcaacaaggatttgcaatcatcagacaaacatcatcatgtcgctcggtagctttgcaaattgagcaataccccagtcaaccatgatattgtgcggtgcaagcatcagtgttatgtacaaggatatctatcatcccaagatgacgacagtatgccaacctgacagatgacttcatctccaaaatgtccaacttgatgtcagactctccatcttgcagactccgtatcgttctttttgtcggtactttcgagagtgtccattgaaggaccagccgcacttaagcgatcgcctcttccccagtaccgtgtcccaaaagaacacggggtctttgttgatgtgcaatgcgtcatgtaaggaggtttctttgctggattttataggaccatccactcatacaatatatgattgtcaccgccttatatttgaatatgttaaaaatttgtgtatttgtgtagttgtgttgtggttgaataaatctcttctcgttttgccacgtaatatatatagcttgaacagttttatacaggatggacacaaagaccgtatcggagcttagggcgatgctcgcacccctcaagctgatgatgcgatcgaagaactctgcgccgccgggctgagtgcaccgaggcagctgctgctgctgtgcctcctcagcctgaacatccgactacgtatggcaattgttgctcgcactctcttttcatgcgcagttcagctcgttttggtataggccgattttgtaaaaccgttgaatttaagctacccgtatatcctaaaagactgaattctccataggggtatcataggggtcaactcccccgtggctgctgtcctttacgaacagggattttctgttcgaactgctttcaggaagatgccgtctcgcccgtgccttcgggaatgacgatgccctcagatggagtttgtgcgttgcttgtttcgcgcctacgatcacgatttctgcttcgacatgccccctcctgtgtgtgttgtggtgtttggtgtgtgtggtgtgtgtggtgtgtgtaaatcagtagtgtgtctgctggttgatgttacactgtgggctttacagcaacggaatactaaaatgaaaccgttcgtgtacggcccacctacggtgtaacctaatggtgtagaaatcccggggcagtggaacaccaatacgattttgaatcaacaaattgcaagatgttaacgagaatatcgtggttcttttttagatcacgctctccatcctgcagactccgtatcgttcttttgtcggtactttcgagagtgtccattgaaggaccagccgcacttaagcgatcgcctcttccccgtaccgtggcccaaaagaacacggtctttgttgatgtgaatgcgtcatgaaaggaggtttctttgctggacgggccattttgtaggaccatccactcgtacactataacgtctgtcacgcattatacgtttattgggatgtttcattttactgttccgccgactgtagggaacttggacatctccctccggtcgcccccacccgctcggttcctccggactacctttgtaggggctcccctctggtcgccccggttgctccgctgtggggagtgaaaggcctccgccgtttgcgtgtgtgtacatggatggctggatgtgaatcgcagtggacgtcttctgtcaagatatccaccgccaggaaatttactaaaattggaggagtaagacccatttaagtggaactttggcaaaattgttgacttggagtataatgtgtgtcccactttatttgagaacaactgtaaagcccaacatggccccaatggcagcttcacatatgcatgcactgctacgggtaccccactctgatgtcgagcggcaatcgtgttgctgcccgccagctgggtcgcaacctcggggtagcttcctcgtctgaaatgctggaagtttggcaggtgcggcgagaaggtgtggagggccaacctggttgggtccacaccggcctgaatccttctgcattggaaaaggtgcaatgttggccagcattgcggcggcgaggagtagagaataaaaaaatgccctttttatataattggtgtgttcatgtggcatgagacatgcttcttgtggcacgagctggccagtcatctatctggtcgacatgtatgtattatccttgactgcaatgctgctaggaagtactactgcgcaatctactccagcttgcggtatttgacgtcacagaactgtcattgcgaagtgcgtggaccattctgtcgcatgtgcactgcaagcagtagccattcccacgagcttgcgccaaactgatttcctacacaacaaaagagtattgacaacaggggctgactgggcagcacgcaagggacacttgcccctattgcaatggtgctgttgtactgaggaggtctgcacgacttatgcattcgacttggcagcaccaatgggcatattaacgttctgttgtggctgcatgacaatgcttaggcggcactaggacatcggccgattgggcgcatatactggtcacctacatatgtaaaatggttgtatgacaacacaaactttaagtgttctgagcatgctaccatgattgctgcaggcaatggggaccttgaaatgttgctgtggttgcacgcgcaagttgtcacatgtaacacgagttgtgcaaactttggattcgcctgcgagcatgaaggaatcatgcagttccttgaatccgtggatgcaaatgatcgctagacgaagcaaacactaacatcataaaaaatattcgacacatcattgagtgtgagcgactaactccgctcggaactgaagccggtacaaggaatcctgttgttgcatgagtgtacacacgacaatttgtttgactaagctttttcacatgtatttgatgtggctcccgcgtccaatcaggcagctctggtcatgttggatggcaaggaacctgacatgaagacgaaagaatgttccctaccttgtttttgccaagacggtgcattgcgaaattaggtgagtgaggggtcttgttggaccgtgtttacagtcaacggaatactaaatgaaaccgcttcgtgtaacctaatggtgtagaaatccactggcagtggaacaccaatacgattttgaatcaacaaattgcaagatgtaaacgagaatcttcatcgtcgtctcatctaatcactatgaagataccacattgagcatgttatgcatgagcagattccttccaacgtatggcgcagtttgacaatacacattcagagctgcttgtacccgcgccaatgagatctgcaatcacctcactgcaagggcatttgctccgttgcccacgacacagtggcttcgttattgcaattgctggaggaccaggatgctggccattggtcgttggccccaacaaacaccgtggtgcacaacacagctctggcttcgagaccttacccacggagaccacgttgttgtgatgatcgggcaggcgcaatggttatcacaccatggctgtatctcgccctcacaccagcgatacaccaagcatcgctaacttcagctcccccaccgggaatagcaaaatgcgcgatgccaaacttcagtttgtgcgctacgacgtgtctcttagctggacaccgcacgtttggatgcgtgccttgcagtggtgaggaaggagacgaggcgatgcaacgtgagcgagcagtcaacattccagtcgcttatccagttgccccatgcaagcttgacgagtaccaccttatcagatggaactgtgagtgtttcgcctggatgtgcaagacgggttgcgtgcacacatcatccgatcaggtggatcgcattctgcgcgccattacaacagatcttaggaaaggggatagatcgttcattctgcaggcaggcatgatcgcatcaaaatcttgtgtagtgtcttaaccccatagccacacgcaccctctcctggtattggttttgacccgggatctaatccaaaatattggagcaaccaaatcattgctccatgacatgttagccaagagcatgatggcctggctgaatgctaccgttgaatttaagctagtccgcgaggaaccgagtgggtgggcgaccgagggggggcccacagttcacatcaactacgtaacttttagtcttacacatgtgtacgttgtttgtaaaagattcttgggaggttgcaacagtagttgactcgtttgcttccgaaaataactaaacggcggaacgctgtcgatactcttgggggatcaatcatacatgtggaaacacacggtaaagtattcgcaaatgtggtcatgacaagcagagctctgctatacaaatctgtattcaatgtggtcagggtcatcatccaacggagaaaacattacattacgagtgtccatttacattacaagtgaattatgtccacacttctcaaacttttcagcaattactgacaatattcgccgtattcatggaaaaaatacagagaatggggtctagtcgacatagtttcgcacgatgaaaggcacgagcacgtgacttaccatgtgattccttctcctctggaggtgttcgcggtatcgctctgcgatcactcgaactgccttactgacgcgcagccaagacatgcaaatcacctggaagaagaactcatagatttctgtatctgtgcactgtatcagtgtatcgtccggtaagcagtcgatttcaatgtgctcgaatccaggtcgggtgatgtacagcctctccagtatgcggtagatggttggaacgtcttcggacataaacaagcttccagcgcaaccaactacttgtgtcggttgtccgttgttcatacaatggggcttgatagcattcagacatgtctccatcggtcttctggtccacgagcttagagaacgctaggaagaaagcgtctccgaatgtgaacatcacagctggattagagtaatctctaaataattgtacattggcgaactctctcagatcatgtactttgtatgcagcattagcaagttgcaaccatattttctcaccgactgttgacattattagttatttaacgttgtggatagagttggtttggttgtcttcttgctcagatggatatggtttcaattttttaaaccctacagtcggcggaacagtaaaatgaaacatatatcagatgaaaataaatgtacgacatcgccgttagaaaattggcgttaagaatggtcgctgacttgggtgtgttaaaaacttctgtgtttacgaacatcagtcgttctactctgtggaggtggaaacgctttggtgtaaatcgaaaacgacgtgaatttgtaagcaaaatttttgagacgaacaaagatttgttgaaattgtttttatcgtcaactcaatgcacaaccgcaagaggtgttgttgcatttttcaaaagtactcacaatttacgattatcaactaaaacagtgtatcgtttcataaaactcattggttttacaagaaaaaggagcaaactccgtggacagtgtaaaggggacttagttccacttgtcactgaattttgtagtagatacaaggatacaatcaatgctgggaaaattttagtatcagttgacgaatgtgggtttagtgagcgtctcaagccacattatgggtattcccctgtaggaaaacctgttatcgttaaaactactggtgggtgggtacaccatagtttgttgatggcagttttttcagatggtaggaaggagttcgttgtgaagaaaggatctgtgaagaagacggacttcgctgcatttattgactcattgagtttgtgcaataattcagtagtaataatggacaacgccagtatccataagaacttggtcctcagaagccccgtaaatatttgttacactcctccttacagtccagaattcaatgctattgagctgtgcttcgctaaggtgaagaaggactttcgtcgattgaactatataccaaacgatacaaagacgcacgtgtctgatatgatttccttagcattcagcaacctcactgataaaatcattatgggttgttttgaccacgtatggaacacgtatgtgatgtttgtataaagagttctgtgatgtataaattatgtaagatggcaacgaaacctccgacagtcgcgaaattgaaggagctactaaaattggccgaagtagcatactcctcaaaggacaagaaggacgatattgtccgtttatgcgaagacaatggtctcatcgccagaccccctccagagtacaagacggtggaaaagatgtgcgtcgtgaaatgcgccctgaagaaggcaatgagtcttgacgatgaagaattcggtaagttcagggggcatgtggatcagctcgtcaatgtggtgagccgcatgttacggcgttccagtctggtgctgactttccatgtcacgaggctcatggagggcgacctgccgattcctaatatgtacgatatgaaggatacctactggaaggattggctaaggatcggagttgacggcgtctttccagatgaagagagtagaatatcatacgaagccgtgaaagacgtaatcggaaaggtgcttgatagcgatgaccctgactacatcaactcctaccctatctatttcgaccaggttttgaactatgccggtcacacattgagcactgtcgtgtcgaacaacgcatgggttcctttggtacctcgtttgacccgcctcactaaggctactttgaaggcactgggagctccaaagaccatccgtgtgtacgacgtgatgagggtcatccaacaagaaatacaggagatggaatcttggccagagtctgttcaggagtacgtccgtgaagttcgagtcaggctgaaagttccagatggaagtcgactttatgatgactatggcaaagacatggacttcccgaccatggtccgcttcaattattggatgcagacacggttggaggctattggtgaacgtcgtatccggttgatgcccatctttaatgtccaacgggcgcatgtccgccttgacatgaagaccctcgtgaacctgttcaggcacgtgttccccaaagacccaaacatcgtcgagctttcaaagtgggaaaatgtaaaggatcccgaccgcttcatgttgcctctgaagcctgcagttaagaagaaaaaatcatgtggtcctggtgaatgggaggcatacaagttggcccaacagaagtacgatgctgacgttaaggatatcaaggctactgacgagtacagacatgcaaagggtaggtatgacacgctcgtgaacgcacgaaaaacagtcgcaggttccttcttcaagaaaccacctgtcaagacggggtgggtgttcgattgtagcatctgtactgacggagtctcattgagcatgcagtacagcaagacagtacaggttcgtgtatccgatctgaagaagacaagtaagaggtctcgtgacgaggaaggtatgagcgtctcagaacagtatgaccataaactcaaaacgacattgcccgatatgggtatcgtcgttctgggtgtggatcctggtaggagcaacatcgctacagttacgtatctggcagacgacaaaagcaagacatggaagcttacacgcggagctttttaccacaagtctggtatcaagaaacagaaaaaacagcaagaaaaacgtttctcagacatgattcctagatgggagtctctgcgtgaaaatggagcagcgttgagtacatccaggaaggatgatatctcggcttacttgaaaaattacgctacgttttccgacgagtggtggaggatggcactccgtcgcagagaatcccgagacaactttcagaggtacattggcaagcgtaaggctatggactcattttgggcagggatcaagcgcaacatgaagttggatcatcctgacctgagggttcgcatcgcatatggttctgcaatcaagacgatgaaggctacctgaccaggagaggtagctgtgcctacgggatctatgttcgcttcctgcaagcgcctctttaaagaggaggttcatgtgacagatgagttcaagacgactctcatgtcttgggaaaccggtgccaagaaggaatgtgtttacaagattccaagtatccaaataaccacggaaggtcagattcgtctaggttacgagttgttggggcacaccccattgaaggagactccaaaggtctcttatcgcgaccagttggcggtgagtgtgtactgcacacgtaaaaaaatccaagaaaaacacaggaggggtggcttagccccctctcttgtcgacaacaaatcgatcaagcggtaccctgaggtacgaggactgcgattctctccagaaaccagcacttactcggaccgggaccgctcctctgctctcacaatcgcaaggctgcactgcatggaactgttgggtcaagggagaccgcttccattttgcagggatgcgtgttgttgatgggctacaaaaaaacatgatggtgttccactgcaatgtgggttgctacaccataaggttacaccataaggtgtaccgtacactccagaaagcggtttcattttagtattccgtcgagtgtacctgtatgagtttgctcccccctccaccatgggcaaatgcgctcacctctcgtgcatgaaacaagcatgtgcgtgagcatattcaatggatacagcacgcagtctgcgggctaaatccaataaccgctctctcttctcattatatctcaactgtaatgatgaatctcaactgaatcccgtggtacccgagctggtgctcgtcaatcagtactttgcagtcacggacgccgacgccgacgtcgttctgctgaaggatatcaacgccttcgcccgggatttcaaaatgaacaaaaacaagtctcgagaaaaatgggggcgatgccggacacgaactgcagcgtcgctggcgtgaggggggggcgggggttcaagaaactgcgcttcttcacccccgatgccaaaacataaacgcaagagcgttaccgttagtattagccatccatctgatttacacctgtatgttagtcgaatgccggccttcattccatttcccccgatccagcagttcaggaacgtcctgaaagagttgccgtacgtcttcggaagcgcgatcccgcagacgctcaagttccgaggcacggtcaaactgcacgggacgcactcggacattgtgaggcacttcattactggaacccctgacttcgtcgacaccattcagtctcgaaacagaatcctgtcagtcgacaacgacaaccaaggctgccacatgtttctgactgcgaagaagtactccaatctgttcgatcgtatccaagcgatccatggagcagatataagatcgaacatcgtcgtatgtggcgagtactgcggtaaaggtgtgcagagcaaggtggccctttgtaagctctccaagatgttagtgatatttgcgatcagaatcgactatgaatgggttgacatgaccaagtacagcacggtgttctgtcaggaagaatggatcttcaacatcatgaactttccgacgtacgaggtggaagtcgaaatgagcgacacgcagcccgcgcaagactacatggcggatctcacgaactccgtggatgcagagtgtccgttcgcgtaccagctggccggcgtcaagggtggtggcgagggcatcgtgtggacgtgcgtggaccacccatcgtctcgtctgtggttcaagacgaagggcaagacgcattgcaccgccgtcacgaagcaagcggtgccgtcgcaaacagagtacatcaagactgtgaccgagtttgtcgagtccgtcacgaccgagtctcggttgagccaaggcatcgagtgcctggttgaacagggcgtggagttgcggatacatagcgtctctgagttttcgtcatgggtgtgccgagactagttcaaggaggaacgagacacgatcgaagaaaacggattcaatgtgaacgacgttcgtaaggcgttgtacaggaaagcagggaactggtacaaacaacgggtggcaaccgcataactcaatctcttgagcatgaagaagcgtaattgtgcatggtaagtaaattcaacttaagagaaacctgttgtttctatggcagccaacaagagcatggatgtaccaatgacaaccacgtttttctccttgccaccggacttgcgctcggtcgtttggggttgaacggtttaccacagaggcgactcggaatatcttcgagaacctcttcaacctgctgcacccccccaacgttgcccaaaagcaacgatctgcagtctggatgattataaggtgtgtcccactttatttgagaacaactgtacagttgttgccaaatatgttttgcacctcttttttgtaatcgagtataaatgttatgcccaccaatgtttggtgagagattgtgagataccccccctttcatttaaaatacgtcccatccccctgcccattcccagcccgatctttatcgcttcggaagcgtcccccctcccatcttcacctccccatcgtcccttccctccccaaggccacagaccccaccgcaccttcctcttacttcgcatctccacctccccatgttgcacctctcacgagcaacatgcggcagccaggctcttagtcgtcgtgccaccctatgccacattcgccccccgaccccggcctgtccccctcatcccgcgcccacccgcactttcggcagcagcaccaacaccatacgctacgtccgcttgtactgggatcagaaggcgcaatgcagtgcccaacagaatgggagcgggtcggttaccggtcgggagggggcgttgcccgatcccctaatcggtccttatgatggctgggtggatggagtgtactgcttagagatgggtgtgagagactatgagctggatcaatttggagtggtgaacaattccgtgtatgccaactacttccaacatgatcgacacgaggggttggagcgactgggtattgactgcgatgcctatgcatgagcaaacctagggctggcaataactgacatgaggctgtcatacaaggctccgcttagatctaaggacaagttcagagtgttagccggggtgagccgagtcactggcgctcgtgctgtcatggacgaggtcattctaaagtctgtgacgaatggcgacggtgaggaaaaggacgtggtgatcgcaaaatgccatgtcactctggttgtcctggattgaggttacaaggcgactaggatcccggctgcgatcaaggatgtatttacaacgctaatgcaagaggcaagtgccagctcaggagggcactctgaacactatatgtgctgagtggtacgatacgcagcacttgatgctctatgtgttgcaagctgcacgacactcgaagcgcgaggcacacagctggtgcaagaggcaaacgatgacaaacattaaattgttgtttaaggacatgttggtttcaggggatatcattcaaattatacagagtgtcccaacattatttgagaacaactgtatagacggcaatatatactgcctgggtaggcgacaagtactggcaggcagaacgacgctgggcgaccattagcgaatacatgcagtattccgaaggctacctagaggtgcacttagacgactcgggtggggcctgggcgcccttgtactgtcctcgcggcaagaacataaaatacagaggcaagcccgagaacaccgaaaactttagatgataaccccgcttgcagagttgggaggtcatcgacgcagtctagtcgtttaggcatttttcaggaatgaatgggcgttcctgcttccgaacggatttccaatcttacaatcacttttggggggtcttttgatgcttttcaaatgcaatcttacgataaaaaacgtaagattgtagtcaattttgacaaaatatgcttgaaatgagcttgaaagacggagaaacgtacagattgcgaatgttacaacgttgaaatgccatattttgtaacaaaaggtgttaacatcaattcgtgtcttacaattataattgtaagaaataaagggaaagcggacggttataaggcggcaggcagaattcagcttttacatcttacaataaaaatcgtaagtataattcatttaatttttctaatttagtaaaaaacggctatgtgtcaaacatcttactcctcctcctcccccccctcctcgtcctcctcttcctcctccttctcctcctccatgtccccatccccatcttcctcctcctccatctcctcctcctcagcaatgtctgcattgtctccatccgattgcacagcctctgccctggtgtccttctcaatggattgacaagctaggagcatgcttgtgtggtactttctctggatcttcatacccttggtgggttcgcagctaaattgaaatgcgtcaatgggaatatcgcccgtccatgttgcttttctcctaacccccacagtaataggcacaagcttgtggtccatccaatcttctggccaagttgggtattgtgtttcagtgtacaccaacttctgacccccaaagtacaagggctttaaatacacacattccacttctccattcactggtagtgattcgacctccaccacgtcccatcctctcaatccgctagagtcatccatttgtaccttgaccacagcgacatgaccaacaaccaaatcagtagtgggctcgtaggctattcttctatccggcttcgtcccttgtgaagaatataagtacaacacatcctcctcctctggcctttccatattagtctccaaagtgtgtgcaaccttcatagtcttggcaatctcgttacttgcaggtaaaatgtctgacacatccatggacaagtcatccaatgctgctatcaagcgcttggccattgatttctcagactgtgtcagaacacgactggttgctgacaactccgatgggaagtcgacaaaatgttggtctttcggatactccccagtcacagcatcatctggttgagtgctccaataactcttctcaactttgaagaaatcagtccaccacttattgctggcttcccaagtttcacgaagcatctcggcaatatgtttgaaggactgggcatgggatgggccatcggctgctggttcatccatcggctgatggtcatcggctgctgctggttctagaaccagaaggtcctccgctgcgtgttgtacacggacatcagctacgggtcctgcacggtcgtcaccggcggtttgtacaggaccatcggccatgtggcctgcaaggatgtcacctccgggcttcttgttatgaatagtcttccagacagccgcccagtttgcctcgatattctcgagctcttcaatcttgatcttgggggcttccttaaatactgttatggtgtccaccagtgggaagccttgaaggacgtaaataggttcagcgtcattgtcccactgtcctctccaagatcctgactcgtcatactccttgtaatagacccctgcaattgttggtgtgcaaacatgtattgtatattagtgaatcatttaggacacccatattcctcccgactatactcgggagcatcccttggataatacatcctaggtcctaggtacaacttcctttgtatcatttagtttctattgaagactgtacatgtaaatcaatgaggacatggcacacccatattcctcccgagcataatcgggagcattgtgcagacagtacatacacgcacggtagcatttaatttgtaaatatcagtatatcaagtattcttaccgactctcccgttgggacctttcgttatcttgaatgcgtgtaaacggcgattaactcctttgacggtgctagtgccatgtccgaacaacttgtaaacgttgtctaggaggacagcggagaagtcccctatagaggtcacgacgtcttgccttgtgtaagggcccattctcttgaataagttaccaacaatgcccatcagatggtccagggtgtacacttccatgttctttaacccttgcgagatcacagagtacttttggtcaagattgctatgtgtgtgtccgggagggaggaaatggacgtacacctcctcaaaccagttcatttcaaccagcaaggacaagtatgcgaacatgaaagcgttcttgttgtcctttgccgcgttgtccatttgcaagaagcaatacggtggaagctgctcctcttcttcaaggacccggttgaagaaatgttggaagcatgatatagtcagattgatggactgcgagtagaatggcaaagcccaataaccaatgaagcctcttccctgggagaataatcctgagttaacatagaaggaaacatgaagtcagaatattagcattattttgttaagtaatcatttcaagttttaaatactgtgtatgctcccgattatgatcgggaggacatgtcctacgtgcgctgtatttgtactcacacatgatgcgtgtctttagaagatcacctcctgcagtcttctttgtatgtgagaagtggcgtgactgaggaagattagtcttcttgttgtccattgcatcagcggatacgtgcaagaagagcttcggatactgttcagacagtttttcacagatgtcatacctacgccttgactggttttaggattgctttccccctacttttcttctccacgggaatatttgtctggcttactccttatgacttgtgttgtggaatcccaggaattctgggtaccagaataccagggattggggggaatgttatgatacagcctatagctgtatcagtaacggtgcggggcttaggtccgacacccactctagcagctggtgaccaggcatctgcctggcagctagcagtgtagtaggtgacttcaagcgaatagggtcgttgggtttgtcaatgctcccgattatgatcgggagaattgtgtgtattccgagtttggttttctcaatcattcgctcgttgggtttgacaatgttcccgattatgatcggaggactgtgggtattctgagtttggtttttctcaatcattcgctcgttgggtttgacaatgctcccgattatgatcaagaggactgtgggtattctgagtttggtttttctcaatcattcgttcgttgggtttgacaatgctcccgattatgatagggaggactatgggtatgccgagtacaaaaaaaaaaaaaaaaaaatgctgagtacatgttttctgaatcatttgctcgttaggtttgtcagtgctcccgattatgatcgggaggactgtgtgtattccgaatttggttttctcaatcattcgctcgttgggtttgacaatgctcccaattatgatcgggaggactctatgtattccaaatttggttttctcaatcattcgctcgttgggtttgtcactcctcccgattatgatcgggaggaatgtgtgtattccgaatttggttttctcaatcattcgctcgttgggtttgacaatgctcccgattatgatcgggaggaatgtgtgtattccgaattttgttttctcaatcattcgctacttgggtttgacaatgctcccgattatgatcgggaggactctgtgtattccgaatttggttttctcaatcattcgctcgttgggtttgacaatgctcccgattatgatcgggaggaccgtgggtattctgagtttggttttttctatatctgaatctgattttgaatctgaatctgaatctcaatcatttgctgaagtcaaggcagcccagttgcttgaagtcactagcattcggaggcccatgttaggagccctatcatggataccagttcacattcaggctcttgggttggtagttgacaatgcgcagcaagcctgtcagggtcggcgagggcgaatttatcgccgacaaagagcttgaggaaactagggcgtgggttgagacatgcgaaggaatgctcatgagcaatttcgaggagtttggtcctagcgacaggaggacgtcacctcgatgtacaccaaaagggccttcacctgacgccggtaagagagcaatcgaacggactgtattgctgcaccgtggctcaggttaaattttcaaatctgacagatacatttcgaatgttacgtacgcggtgggatgtacaccgttcgaaacaaccattgtgtgctgaccgcacttgccgctttcaatttcgataggatattgcgtaacttctgcactttttacatttcctacagcctccgcgaagaagtcaggaaaggcgcgacgaggtcagattcctacaatcaacgaagaggacagatcgccgacaactttgtaaggtcatcgtattcaaattgttatctccttatagcccagctcctgacatgggcctccgaatgctagtgacttcaagcaactgggctgtcttgacttccgcaagggtgagtgtcgaccagaatgctccgcacatatgcctgcattcgccgtgaaacctcaaccagtgagcgtgcgtagccgtaacatagaagtctggtccaccaacaacgacttcgatgttcattggcacttggcgctccttggtccattcgtccatgacgccacatcccaaatccttcccgtccgattggagtttaacttccactgtactgtcattgtagaccctgcggaagacaaataggttggtaaagcaaatgattgagattcagattcagattcaaaatcagattcagatatagagaaaaaccaaactcagaatacccatagtcctcccgatcataatcgggagcattgtcaaacccaacgagcaaatgattgagaaaaccaaattcggaatacacacagtcctcccgatcataatcgggagcattatcaaacccaacgagcaaatgattgagaaaaccaaattcggaatatacacagtcctcccgatcataatcgggagcactgacaaacccaacgagcgaatgattcagaaaacatgtacttggcattttttttttttttttttgtactcggcatacccatagtcctccctatcataatcgggagcattgtcattcctaacgagcgaatgattgagaaaaaccaaactcagaataaccatagtcctcccgatcataatccggaacattgacaaacccaacgagcgaatgattgagaaaaccaaattcggaatacactgagtcctcccgatcataatcgggagcattgtcaaacccaacgagcgaatgattgagaaaaccaaattcggaatacacacagtcctcccgatcataatcggaagcacttacaaacctaacgagcgaatgattcagaaaacatgtactcggcatttttttttttttttttttttgactcggcatacccatagtcctccctatcataatcgggagcattgtcaaacccaacgaacgaatgattgagaaaaaccaaactcagaatacccacagtcctcccgatcataatcgggagcattgacaaacccaacgagcgaatgattgacaaaaccaaattcggaatacacagagtcctcccgatcataattgggagcattgacaaacccaacgagcgaatgattgagaaaaccaaattcggaatacacagagtcctcccgatcataatcgggagcattgtcaaacccaacgagcgaatgattgagaaaaccaaattcggaatacacacagtcctcccgatcataattaggagcacttacaaacctaacgagcgaatgattcagaaaacatgtactcggcatatatattttttatttttttgactcggcatacccaaagtcttccctatcgtaatcgggagcattgtcaaacccaacgaacgaatgattgagaaaaaccaaactcagaatacccacagtcctcccgatcataatcgggagcattgacaaacccaacgagcgaatgattgagaaaaccaaattcggaatacacagagtcctcccgatcataattgggagcattgtcaaa

SEQ ID NO: 184 - DNA, 21545 bp, unidentified
  misc_feature 1..21545: note = Fanzor polypeptide
  source 1..21545: mol_type = other DNA
agcattctcagtgtaaagtttacaaattgtggatcattcatgaaagagattgcacagttggccgaacaatgctcagatgtttacatgttcactgaaaacccgaccgtgattggccggatcccaaacccgaccccacacattgaaacattgatgggtcacattgatgggtcacattgatgggtcacattgatgggtcacattgatgggtcacgcgagcatgcaccatcagttaagccacaacacatgtttgaactcatcggctggttgccccaactgcatgcccacctggtgtgtgtatgcagctcaggaggggaactgccagagtgggctttccagctcgtgcatgtgagcgaggtgcagtacctacatggcctactcagccatctcgggcatcctgtcgtacaccttcatggttgcgctgtcaagctcggtaggaacaagctcactgtggacaacccggaatccctcgacgaccctaaacccacctattgtgcccctgtaaccactcaacgaggagaataaggttcgttaaaagttgtttacaccacttaaggttcgttaaagttgtctgcgttgcttacaccacttcattcgaggacgtgtgacgacgagacgaggagtgacgagaatccgcagccgtgacatgtgtgtgtgaggatgaatgaatgaatgtacggacggacggggggatgcgcaatttgggtcaccggtaaggtgtcccacaatttgtgtctccgactgtattcgttctgtattaaaactttacgaacatcagtcgttcgaagttgcggccgcggccgcaatgcgtcgttttctgcgcaagataagaatgacgacgatggtagcaatcaaaatcgtgccctgacagactcccaacccgacgcccagcgcgatgctcgaactgcccccggatccgtcttccgatggcatctgaggtgtgggcgcatccgtgatgatgggggggggcggttcaggcacgggggacacggaggcctctgtgatcccccacatgttcttgaaggtctcctggaacacgatgttctccgtcgcgggtggttcgttcgcgtaccgaaccgtgacgtccacgaccaccgaccccgggcgtatgcccgtaattgagacgagctcgttcgggacgtccatgctctttgcgatctctgcgcgcacggagtcgttgaagactcgcaaggccttggggtcggtctcgaggatcgagtaatcgattccgctgaaggctatggtgaggcgcgatgcatagcacctgggtatgtacgggtcgtcgctgtcgcactgggtttcggaaatgagcgtgcgccagtcgtggtttgtcgagggcagggtctgcgccgacgatgagtcgctcccgaagactgtccactcccattccgtgagcgcgagtctggtgtcgggtggcggcgaggaccgcggagtcatcttgagatcgatgtcgatgatgccgttcagctccgtgcggtacaaaatagcgcgcgcgacgtccacgcagtcctcagcgcttcgccccccagggagtaccgttcccgttcccgacgggcacaggacgcaccacgcggcgtccgcggccgcgaaggtgttcagagggcaaatgcggcacgtcgggttcgcctccagatccggcgcaaaccatccgggcgcgcacggccagcaggacgcgccgtcgcccatgcgccccgcgccgcatcttgggcaaaaggaggcactcttgtctttgcgcagcgaactgctctcaccggggtcgtcgatatcccccctgtagtcctggcccagcctggagtcctggtcgctcttcgtagagaagcccgacgggcagggggtgggcgcttccagcgctgcgatcagcgtcgcgacgacctgccccacgggggccgtcacgagaggctgcatccaccagctctgcgggacaggcaccagccagtatcgcatccctagggcgcgcgagagctgcatgaagtcccagtgcggatcgaatgtgaacatcatttcgataaggggcgtccctggcgcgcagaacatcgcgttcacgaggcccgctccgtggaagcccaccacggccgccgctcctctgaagagcgcgacgatctgcgtcggtgtttcgcggtcggtgaagacgacgagcgggtagggcgacgcgtggcgcagcgcctcgattagctcgtgctcgttgcgcagcctgcgatcgctcgacgacccgcgggatgcgtagagaacgtagggcctgtcgttttcgacccgcgggggcaggtgcgcgaggacagctcgtaccagctcggggttcgtgtagccggtgtgccccggagacgggacgaacagctcgtcggcgtggtacacggtgtggtggtcgtactgcacgattctgtgtgcgggaaggtcgaatagtgtctggatccacgttgtgtcgttcttccagacgagaagcttcacctaggggtctgcgcgcaggagcgcgatgcccttggcgatcttggggacgatttcgtacatgaaatggaacgtcatgaacccgtagctgtggaccaccgagaacagcttggcgtggctctcctcgcggggaaagtggcgcaggcgttggatcaggtcgtggaacggcatcctcggttccgagacgagcgggtacaccacttcgcgggcgtgcgggacgagaacgtcgcccaggggaccggcaacgagtgccctgtcgtaccgggtgactccgatgacgggggggtacgggcggtcctcggggttctgcacgaaccacgcacgcagttcggtggtcagcacgtcggcattgagcacgctcaccttgaggtaggtgcacgagataccggttacgaaaatcagggagagggcagctatgggaagccggtacttcatggtaactctaagcttaatataggtggtcggtcatgtgcgaaggaagagagagaacaaattccttatacactgttaggtttacttattttcggaaagcaaacgagtcaactgttgcaacctttcccttggtggggcgcgttatcaatgcgcccgtcattgtagttctcatcgacgcagtcactgtcgtttaggcatttttcatgaatgccttaatgccctgtatgctactcaattcctgtgtggttgtgctttcttttgttccttcccacgcgacacctgtaatttcttgcatcttagcgtatgcatcggctccttcaaagatctcatttttgtacacgattgctggaaacttcgtgatcctcaacaacttcagcaggtctcggacctcgagatgtgataggtcattgacaacaactctcgcatcctcgcattccaaccaagaaatgtaatatgttgcaaacaaccgacagtgttcgcagttgctgctcaacaccacagtccatccggtagctgggacagttgtcgaaatcataacctcttaatgttgaaccaatgaataataatataattagactacattttgattacgataaaggtggatcatgcgcagtgcctactggcaaactggtgtggacgcagcaggaggaggaaggttgcaacgttttacttgtcagatgcaacagttgtaaagacaaaacaggaacccccccaatctgccccattgtccatcattcgcacatgccacaacggctggctgccgcatgccccatgacctttaaaaacttacaaaataaattaaacttataatgattgaggatgagaacaaccatgtcgtaggatgtaatgataatgataatgtaaatacgattgggtttccctgaattttgttatttttcttatttttgttacttttgtaattttggatggggaggaccactacttcactgctgctgcacccacatgcacttcactgcacacaccgcatcatcatcatctgttttaactgccgctgcacttcgcctcccccctcttaaaatgaaaatggtcatgagtctgtgctcttctcaatccgtcttgcgacaccccattcttctcccacgatttccgcctgtttgtcacagtccatacgtagagaccggctacatttgcatgcatgcattgatgcattcggtagatgtgccaaagagtttccgtcatcctaatggggctcctctcagtgccttgcacaactgctgcttgtccagcccccctgcgtacaattaacacgaacaaaattgtgatgattagtaaaaatggatcctgagacggttgttctagttggtgctggcacaggtgacatgaaaatgctgaatatcggcttgtgtatgcagatgagtgattacaagacctgcatacaacaagcactaactttgtcatgctcactaaacaaactagagagtgtcctcgcactgatttctgcaggatcgcatccaactaattgcgatctttctgcggcttctcgaaacggtcattatgatttagtaaaaacattacttgccctcccaggtgcacaatttgatacaagtactgcatgttatgtcgcacaacacaacgggtatcatgatatagtgaacctcttatcatccaacttgcctgcggcctgccgcttgcagagcggcaaagacgagggcatgctcagaggaagcagcgcgtaattcccgggccaaaaccaatacctgctctcttttcacttcgtattcgatgtctgaagatgtagacaaatttgcaatttcttgcatcaaccgctcctgctcttgtgacaggaatttcacatgagcattgaggccttcattatgtcaagcaggaggagtcgtgtgatcttctcaatcttgctacaccccccaacccaattcttctcacacgctttccgcatgtttgtcacagtccatatgtagagaccggctacatccatacatcgtattgtctgctgcatgcatgtgaactgtgggctcccctccggtcgcccacccgctcggttcctcacagacttcccgtgggggctcccctccggtcgcccccggtcgctccgctggggaagatgtgaaaggggctccgccgcttgttgaatacaagccctctccgcggtgcccctttaaggaacccaatatattctgcttgtgatcgtgaggtttctttggatgacccctgtacaacagtgaatacggctgcgtcagatgcgtcggcgtctcattcaaaacacggaaacacaaaaaacacgccaatttactaaacttgttctttcgttcgtgaaacatcgcatcgcttcatcagacaatattaggaaaaaaagttttaaatttgtagtacagagattatcttgcagctgtaaacaccaagacggaacttggcacctgatgttcagggcacaggcgcatgaggcacatgatctgctgatcactgtgctggatgactacacgccatcgcgtccgcagtacaagccatactgggtgagtgagagttactgttgtgggtgaggatggacgagtagtggacgacgagcccatgtccgacgacgagcccatgtccgacgacgagcccatgtccgacgatgagcccatgtctgatgacgagcccatgtctgacgacgagcccatgtctgacgacgagcccgagcccgagcctgagcccgagcccgagcccgaggcccagtccgatcccgaggccaatatatataagccggcccacacgtttgaagacgtatccgggctactggtgaggaccgggatgttagaaacgttcctcgcaaaagggcctacccaggcgaccatgtccaccacctggtggaagtactggttgtctaacgacgccattgacatctggttagctggatgttggccgaggaatgaacagaagatgatgatcatgcggctgcatcccgacaaggccaaggtcttgcgcgatgcgcgcatgaccgatgatgatcacaggtggatggacaaactgtcccagaatctgaatggtgcactcgacgtgtcgagtcccgagattcccgagattccccgtgagatgttcgacatcatctacttgctcaataaggagcatccctccacgctgactttggattaaattgctgcgtataattatattttttcgaaatgcggacttcatgtgtgcgttgttcagtatttgtatgggtaggttgtcgagcaggagtctgctctgcttgaattcaaatgtgagaatgagtatgcgcaagtcaccgtggcatgcccccaagggagataatctcaaggaggggtgatgtttccatcgccgtagaaatgcatacacgggctgtgcggaaacctagcgagctgcgatgccaactggctgacccgggcctccagacagtttgtcttggctgcatcctgtacagctttggctgacatgacattggagttacagtcaacggaatactaaaatgaaaccgcttcgtgtacggcacaccttacggtgtaacctaatggtgtagcaacccacggggaagtggaacaccaatacgattttgaatcaacaaattgcaatcgtggttctctgagcgcgctcgaaataaggcataaatgaaggagcgcgcagaagcacttgagaagcaactgaggtacgaactgtcaagcatgactgccgagcaatggaattccctgaacgatcatgacaaagtagtccaggctccttcaggtaatgccagctaccaactgtgggtggacaagtacaagccaacaaacactaaagagctggtgggaaacaacacgctgattgccaccctcaggatgtggctcagcaactgggatggtgtaaatctgcgtggccagcaaccacaggcccctcctggcagccggaagaatcctaaggacctgtccaagaaggcggtgctgctcagtggtcctccgggaatcggcaaaacctctgccgcccatatcttggccaaggagtgtaactttgagattgtggagatgaatgccagtgacacccgtaacaagtcggattcaaagatctcagctggcatgggagggaagtcggccaacatgatcaaggagatggcaaccaatcgatctctgttggttggagctgatgggaagatgaagaagcagctgctgatcatggatgaggttgatgggatgtctggtggtgaccgtggtggtgtgcaagacctgatccagacgatcaagtcctcaaaggtgcccattatttgcatctgtaacgacaagtggaacaagaagctgaaaagcttgcggaactactgtgtggagcttgacttcaggtcacccaccctacagcaagtcaagataaggatgatggagatctgtcgcaaggaggggctgactgtcaatgatgccaccatggaggccctggccaagggagccaatgccgacctacgctctatcctaggacagctgcaaatggtccgtcttagtcgcaccaccctgtcctacgatgacgttaatggcagacaggcatgcgacaaggacagtgacctttctcctttcgagtgtgcaagaaagttgctagagcctgccagctcaagcatgagcattcaagatctgctgaacctagctatggtggacgacatcgtccccctgttgatccaggagaactaccttaaccaccgcccagtaatcgcaggaaatgatgagcagcggatgagggcagtggcgaagtcagctgaggccatatctgcaggagatgtgatcaatacatctgtgcggcgctacatgaactggagccttatgcctgccttcaacacgctttcatgccttgtgccgggggcttacatgcgcggcgggagggacgccttctggccaggcgacaactactctcgcttcacctcatggctgggcaacttctcaacctcaaacaagcaaaaacgcttgctgggagaactcaccaccaccatggcttccagcggccacatggcttctagcagatctcccgtgcggttagagtacctatcagccatgcgcaccctactgacgcgttcactagtgactgatggagagagtggtggcatccagcagagtgttaccctgatgcaggactactgcgtctcccgggaaatgtttgactacgtgattgacgtgaccaagttcaagaccaaggccgattggggagaggaccccatgaaggatgtccctacaaagattaagagcgcctttaccaggagcttcaaccgacaaggcctgcatgcgaagtgcggtgcaatgctctctgcacctctgaagggcaaaaagggtaagaagggagctgccggagcagaagacggagcggatgacgatgaggacgagtccggtttcgagaagcttagtgcaggcgttgcatatgaagacgaggacgcagatgatggcgacgagatggtagcggatgaagggcaaaaatatgtactcgcctttagctgatctacccattgggttcaagggtcaccggtagggcgtcccacaaattgcgtctccgactgtagttgtaatcccaatgaaatcagtaagcggcaactactttcgagtcggagcactccttcgcgtttgccatgctcataattgtttagggttttatattgtacatttcaaaacacgatcttcagacatggattacttaccttaccagaatcccacgtacactgtagggtccattgtaacaatagacaacccaacaacgcacaacgacttggataagacaacaagtatcgttgggctagtatacgaggcttacattcacaatggatttccgatgtatggtgtgctgatgagaaagaaccatgcgtgctatgacatgaaaaatttcaagcaatcaacctcatgcttgtcaagtgatatatgttgccaacacttggatgagaaccgtatcacaacacttgatgtcaacaacaacaacaccaacaactagagtggaatagtcatcactttcgggcaaagcatgatcagcatgtaatgggcgttcctgcctcccggccgattttgactggttgcgaaacatggtatggagcggatttgcgattccttggtgctgatgtctcaagctagcgagtcgttcaggagtctctaaatcctgattagaaatttaaaaaaatcggccgggaggcaggaacgcccattatgtcgggcatgaacaatgtgtcgggatcgagacacttcacacactccggaaactttaagcccacgccatctacaacacacattgcatataaaaaaacaggcatctacagtcggcggaacagtaaaatgaaacatatatcagatggaaataaatgtacgacatcgctgttacaaaattggcgttaagaatggtcgctgacttgggtgtgttaaaaacttctgtgtttacgaacatcagtcgttctactctgtggaggtggaaacgctttggtgtaaatcgaaaacgacgtgaatttgtaagcaaactttttgagacgaacaaagatttgttgaaattgtttttattgtcatctcaatgcacaaccgcaagaggtgttgctgcatttttcaaaagtactcacaatttacgattatcaagtaaaacagtgtatcgtttcataaaactcattggttttacaggaaaaaggagcaaactccgtggacagtgtaaaggggacttagttccacttgtcactgaattttgtagtagatacaaggatacaatcaatgctgggaaaattttagtatcagttgacgaatgtggttttagtgagcgtctcaagccacattatgggtattcccctgtaggaaaacctgttatcgttaaaactactggtgggtgggtacaccatagtttgttgatggcagttttttcagatggtaggaaggagttcgttgtgaagaaaggatctgtgaagaagacggacttcgctgcatttattgactcattgagtttgtgcaataattcagtagtaataatggacaacgccagtatccataagaacttggtcctcagaagccccgtaaatatttgttacactcctccttacagtccagaattcaatgctattgagctgtgcttcgctaaggtgaagaaggcctttcgtcgattgaactatataccaaacgatacaaagacgcacgtgtctgatatgatttccttagcattcagcaacctcactgataaaatcattatgggttgttttgaccacgtatggaacacgtatgtgatgtttgtataaagagttctgtgatgtacaaattatgtaagatggcaacgaaacctccgacagtcgcgaaattgaaggagctactaaaattggccgaagtagcatattcctcaaaggacaagaaggacgatattgtttgtttatgcgaagacaatggtctcatcgccagaccctctccagagtacaagacggtggaaaagatgtgcgttgtgaaatgcgccctgaagaaggcaatgagtcttgacgatgaagaatttggtaagctcagggggcatgtggatcagctcgtcaatgtggtgagccgcatgttgcggcgttccagtctggtgctgactttccatgtcacgaggctcatggagggcgacctgccgattcctaatatgtacgatatgaaggatacctactggaaggattggctaaggatcggagttgacggcgtctttccagatgaagagagtagaatatcatacgaatccgtgaaagacgtaatcggaaaggtgcttggtagcgatgaccctgactacatcaactcctaccctatctatttcgaccaagttttgaactatgccggtcacacattgagcactgtcgtgtcgaacaacgcatgggttcctttggtacctcgtctgatccgcctcactaaggctactttgaatgcactgggagctccgaagaccatccgtgtgtacgacgtgatgagggttatccaacaagaaatacaggagatggaatcttggccagagtctgttcaggagtatgtccgtgaagttcgagtcaggctgaaagttccagatggaagtcgactttatgatgactatggcaaagacatggacttcccgaccatggtccggttcaattattggatgcagacacggttggaggctattggtgcacgttgtatccggttgatgcccatctttaatgtccaacgggcgcatgtacgccttgacatgaagaccctcgtgaacctattcaggcacgtcttccccaaagacccaaacatcgtcgagctttcaaagtggaaaaatgtaaaggatcccgaccgcttcatgttgcctctgaagcctgcatttaagaagaaaaaatcatgtggtcctggtgaatgggatgcatacaagttggcccaacagaagtacgatgctgacgttaatgatatcaaggctactgacgagtacagacatgcaaagggtaggtatgacacgctcgtgaacgcccgaaaaacggtcgcaggttccttcttcaagaaaccacctgtcaagacggggtgggtgttcgattgtagcatctgtactgacggagtctcattgagcatgcagtacagcaagacagtacaggttcgtgtatccgatctgaagaagacaagtaagaggtctcgtgacgatgaaggtatgagcgtctcagaacagtatgaccataaactcaaaacgacattgcccgatatgggtatcgtcgttctgggtgtggatcctggtaggagcaacatcgctacagtcacgtatctggcagacaacaaaagcaagacatgaaagcttacacgcggagctttttaccacaagtctggtatcaagaaacagaaaaaacagcaagaaaaacgtttctcagacatgattcctagatgggagtctcttcgtgaaaatggagcagcgttgagtacatccaggaaggatgatatctcggcttacttgaaaaattacgctacgttttccgacgagtggtggaggatggcactccgtcgcagagaatcccgagacaactttcagaggtacattggcaagcgcaaggctatggactcattttgggcagggatcaagcgcaacatgaagttggatcatcctgacctgagggttcgcgtagcatatggttctgcaatcacgactctgaaggctaccggaccaggagaggtagctgtgcctacgggatctatgttcgcttcctgcaagcgcctcttcaaagaggaggttcatgtgacagatgagttcaagacgactctcatgtcttgggaaaccggtgccaagaaggaatgtgtttacaaaattccaagtgtccaaataaccacggaagggtagattcgtctaggttacgagttgttgggtcacaccccattgaaggagactccaaaggtctcttatcgcgaccagttggcggtgagggtgtactgcacacgtaaacaaatccaagaaaaacacaggaggggtggcttagccccctctcttgtcgacaacaactcgatcaagcggtaccctgaggtacgaggactacgattctctccagaaaccagcacttactcggaccgggaccgctcctctgctctcacaatcgcaaggctgcactgcatggaactgttgggtcaagggagaccgcttccattttgcagggatgcgtgttgttgatgggctacaaaaaaacatgatggtgttccactgccccgtgggttgctacaccataaggttacaccataaggtgtaccgtacactccagaaagcggtttcattttagtattccgtcgagtgtaaccttcaatacgacttgccaccatgtttactggtacactcggacaagggaattatgttacataattcccttctccgagtgtacagtgtacgcgagtcatcaaatgaatccaatccaatcaaatcctctgccccgctccgcggtgcccgcgctcccccttcagaaaccaatcgagcaggagtctgctttaagcctccgtgtgaaaatgagtatgcgcaagtcatcgtgatccccgcaatccgcacgactgccgacatgatcgatcatgtatgtatcatcttctgtgtcaagtttaagttgttgtttgcatcgagttcttcatgaacacagatttgatcatgttggagggagttgtcaattgagcattgcctagtatcataaaatccgatagaccaagaccaatctaaactgttttgtgtggcatgcttcatgtacttgactacctcatcgcatgtatttggaaattgtgcaaattgtgatgcaaacccatggaaattggtgatgctgtgtttggggaactgcattgagtgggacatgtcttcataatggtttatcgaaaatcctcgaagcattttacagttttgaagcgaacaccaatcgacatcgtataggaaaaaacgcaactccagaaatttcatgtttgggaatgtatcaatcaatgcttggacatcaccttgtagtttggacttcatattgatgtcgccatcccaatatcttgcttgtggaaaaatatcttcgccgacaagctcgacacaaactgcattgctaattactgttggatatgatttcaacagtaaacaacctccactctggacctcgattgttatgttatccactgattcacctcccattttcacaacttctgcaatactttgtgtgcaccctcgcttgacgtaaccgatatgtgtgatatccatattcattttactgttccgccaattgcagtagatgccctcgttacaaatcgggtcatttggcatctttaccatcaggtgatctgaactcgcctcagcctgaagatctccaaaatggacatctttgaccccagtgcaaatcaagttggacgtacctaacgcagtgatgagagaagcgtaatctgtcattctatactgtatgcaaaagaattgggagttgaatgagcgaacgtgtagatagatatgaaaatctttggggggggggaagagatgtcacgattaaccaagtttgctgatgctgtccatgaacgagatggaacttggtccatgaacgatatggaacttggtccatgaacgagatggaggcggtgtcgcgtgtgtatgtgtgtgtgtgtgatttcagtagactactggtgtaagtgtagtgtgtctactggttgatgtgaagtgtgggctcccatccggtcgcccacctgctcggttcctcgcggactcctttgtgggggctccccttcggtcgcccccggtcgctccgctggggggaagaggtgaaaggggctccgccgcttgcgtggtggtgtgtgcatcttattcctattcagcacatttgcggccagctggaattcatacttggcttttaatttgtttaggcattgcacgccacatgagtctttgtattcactcagttgtataattatcccatcgccatcagctgggatactgaatggatgtgaaactgctacaattaaccgtgttccagttttgacatgcagtgatatagcatcttgtagtagcctgtctgtcgaattgaaaatgacgttgtccaaaactataatattaaacccgattaggctatccagggtgtctcgcatgctcataattgcaattggggaatgcagtttatgatgagttacgtcatggtctgtctcacaaaccaccaaagtggattcaccatcccctatttcgtttgtgatcatgaagctctttccagtctgcctacgcccgacaatatacatcacatgagggtggtctagaatggcaagatctgtgcatggtggtggaatgacgtgctcagacataaattattattattattcaaatttactttattctctttacattcgacgttttccatgcactttgtatttttgtaatattaccacaccaagtctgtccctgtttccactgtagatacccacgcataccgagtatgaacccaaacattgcatgggatattgtacaagcaaacatcgataaaccatggaattggtttggcttgagtagaaatcccaacatcacatttgacattgtgcaagctaacccagataaaccataggattggactgtattgagtatgaacccaaacaccacgtttgacattgtgcaagctaaccctgataaaccatgggattggactgtattgagtagaaacccaaacacattactgctattgtaaaaattgtcacaatctagaacaaaaacgcaaatcgcattctccaaatccagccatagcaaatcattgcactggggtacaacaacatcgcaacttgttgatgcgcagatgacgtggctcacgcacgacctatgattgggagtaagatctgtaaacctgtcatacaacacaaacatacgatgttttagactaagggcattcaataacacaacatctggctcaatgcgcacctcctcaatgtcatcaaatgcatatgctaaattcccattctgcacacaaagtatgacaaatggaatgtgtttgtgagggacaaacttaaatgcgtcttggacagtattgaaccctgtaagcacacacactgtcggctgcgacaatacggatgcctcatttacagaagcgttggttgccatacatggcattctgatatctagtacatgcaaattccttatacactgttaggtttacttattttcggaaagcaaaagagtcaactgttgcaaccctttgacaccatggacctacatcgcgcatggaattgaattagtcatgtgtgtgggtcagcacagagagatgttattgtattgcatgcattgtggggcacaacgcgcaccgcgtctattcatgagtgcacgagcaagcagcacgcacttgaggttctcgatctcttcgtcctgcttggaaaccaagctcagcgcctggtttagtagacgatgttgctcatgcgcagactcctccgtctgagccagtagcgttttgtacgctcgctgaacagcgtcagcacgcaagcgctctgcagccacggcatcagccacggcaacagccacggcatcatcgagttgggctttcgtgtacatttcggccatgctcagtcactgcacatgcattgccttgtctggggctgggtccctatactcaaattcttcgctcacgaagaactcagtgtgttagggagcatccagcgaactccgaaagtagctttgcatttcagtgagtgaatttggcgattacgttacgtgtgttgttgttgtgctggctctgttgagaaaatcatttcgttttttttcgaaacgtagtctatttggcgcgcggggtccgcgttgcctcatccgcgtttccgattcggtccgtcccccccccccctatttgttgtttttatctgctaaaaatccgttgcatttccatgctaaaaaaaaattgacgcctttttccttcctttgaaaccaccacaacaacaacaacaacaactgataaaccccaactcaactgatatcatgtctaccaacaacatgtctacaaacaacatgtctgccaacaacatgtctaccgagatcacatcattcgtgaatgatacctgtatattcaaagttgtcctaacgacggaccgaacgaagctatccagcaaacccaccgtccctcaattgaaggacatctgctacaagataatttcatttccccgcgttcctgcgtgcctcgcagaccctgtctgcgcaatgaaaattgcgtacgctaagtttatcaaagattcccccggcgcggagaaaaagcctttacagctaatgcttctccttgttgccgtcgctgctgcaaatgccgtcgcttctgcttctgctgctgctgctgctcctgctccttcctccttgcttgccctcgccagtgcccttgccctcccagaggacgacggccccaccgaggacgtttgcatgtcggaggagtgttccggtggtaccaagcgcccccgcaccacggtgttactctctgtggctcatgctgctccggctgcttctactgctgcttctgcttctactgctgctgctgctgctcctgctgctgctcctgctcctgcttcttctgcttctgctgctcctgctgcttctcctgctggctcgttctcaacgtgctccctgtcctcctccttggcctccggtcgtgttggtcgcgggtccccgctgaagaacgagctgcaggttggtgccaatataggtacatttaccatcgtggggtattcccccaccctgggctgcactgctgtcaccactcaaggcaacccgtgcagccgccgtcaagttctcgttaacaaccccgatggtggaccccccttcaccacgggcaagtgcgcgcacctcgcgtgcatgaaacagactccctcacagcgtgaggcgtacctcgccaagtagcgagctacgctcgacgagcttgcaattgagcttcgctccctgtccctcagccagcagctttaattagttatctttaattagttatatagatactctttaattagttatatagatactctttaattagttatatagatactcttttttttgctacatttcttagagacgagaaaaaatggtcctgcctgtatgtactgtactgtaccgtaccgtgtgaattcccccccctccgtttgcgtgcgtgcgtgttccatgcgtgcgtgcgtgcgtgtctattgttctcctgacgtcgtaggcggcgtcatgctccctcctcccctcttgcacatacaaccaaccaaccaccccaccaacttgctccctccctgcctgcatctatcatccgcggcgtcgtgtgtgtgtgtgtgtgtgatttccgttccgtaaatcagtagtgtgtctgctggttgatgtgacctgtgggctcccctccggtcgcccacccgctcggttcctcgcggactcctttgtgggggctcccctccggtcgcccccggtcgctccgctggggggaagaggtgaaaggggctccgccacttgtttaatgtggtacggtggttctcatccattgacaagcagtttttaggttggttgcttgaggattagaacaaccgtgatgtgtaatgataggtttccctgaattttgttactttcgttatttttttattgggagggccatagcggcacatgtgccgacacaggtgccgcctgatgcgaggttattttacgtctgcatggcactggatacaccactctattttatgtctgcatggcactggatacaccacgctttacagtgagaaagccgtgatgccgttgctagcagagaaagcttgctgcttctggttgtggagccacaggatgtcgacgccacagacagccagcacctagctttcaatccacacgatgaggaactcattgttgtagactgggacgttcacatcgtctccggtgcgcaatgagacgttgacaggcatcggcagcgggttgccgttctcatctgtggtatagatcttcgcaacgttgttgttgatcgcctccactcggacctggagctgattggtgatgttgaagccgttgacggtggcattcttgtacgagaagcaccccttggctgtcatttctgcacagcataacgtagtcatgtcagtgttgtgcattaaaactataaaagtttacagccaacagtaaacacacactacttcacttttccgtcgcttttatctcatggagacagatggacgatacaatgaggatgcgcttgccgccgcggtgtcttttggagacagatggacgatacaatgaggatgcgcttgccgccgtggtgtcttttggagtcagatggacgacaatgaggatgcgcaagccgccgtttgcgtggtgtgtgcatcttattcctgttcacttgcgtgagtcgtgagggctccccttcgtatgttgcttgttccgcgcctacgatcactatgctacttctgcttgaggcgtatttaatgtgttttgtgcattttgagaggcacgtaaatacgcacaaggaaagcaccggagggcttgagttggcatgaatgtgccaaaaactcagacgacatctgggtgattttaatcagatcagatgaatccgacgtctcgccaaattgtataaagggtttacttgagaacaactgtaaactgtacagctcctccatccatacaacgaaatagacaccgtgcgaggaaaacaaatcaggccaaaccatttacaataatagctcgaataacgtcggaccgttttgtagggaaaatcaaatatggacaaatgtctcatggtcattcaagcatccactcaacgtgttgctgatgtggatagagttatttcacgtgaagcctgctataatatacctgagagtctgagcaatgagatctgtgaagacttcaacgacatagaaattgatctgcctcacatgcgaacaactggagaaccagggagattgttggtaatgaaggaaagttctttcttgcatgcaatttgtatcatgtgtcaaacatgtccacgtgacatcgaaatagccctcatatctgttgacttcttcagactacatccaaatgaaatacacttccttcatgtttgcaataaacataaattgcatttgaacaagtatctattcaccaattaatcttgctggctgtgaagaggagaataaggttcgttgcagggtcttctgcgttgtttacaccccttccacgagacgatgagtggcgatgatccgccaccgtgtgtcatgaatggacggccggacggacggtgtggatgcgacagttttccacagttttgcgtgtgatgattgataccttgacaggtttctgtagctcaattcccctgccccactccgtggggcccgcgatttccctatcgatatacgatatatattgtctagcagacctctgcttgacatgtgatcaccgtttgcgattactttaccgagttttccgtaatcgatgagagtgctgtcaaggtagccgccaccgcttgcgaagacgagcagttcctctgtcaaaagaggaatcgtcagactctctccttccaagctgtgaaagtctcctaggcactctgtacgatccttgagggttccttgaagccgccgtagcagtagaagtatcatgatgatgatggaccgtagtagtgtgtgatccacatagcatacttcgctgcatctgcttgacacagtttccgccttgatgagagcgcgagtggtcgtcgtgtgatgtgactcgactcgactcaacatgatccgccttgatgagagcgcgagtggtcgtcgtgtgatgtgactcaactcgactcaacatgatccgccttgatgagagcaagtggtcgccgtgtcatgtgtcgtgtggaggctgatgggcgaggattcttcgacagccgccgccgtgcgtgtgtgaggatgcggtcgggcgagcgctctttacacatcccatccatcatcccccttttgtttgtgattcgtgagtgagtgagtgcactactgcggattttgaccacctgattccttcaccaatctgaacttacggtgtaacctaatggtgtagcaacccacggggcagtggaacaccaatacgattttgaatcaacaaattgcaggatgttaacgagaatatcgtggttcttttttagatcacggctctccatcctgcagactccgtatcgttcttttgtcggtactttcgagagtgtccattgaaggaccagacagccgcacttaagcgatcgcctcttccccagtaccgtggcccaaaagaacacggggtctttgttgatgtgcaatgcgtcatgtaaggaggtttctttgctggacgggtcatttttgctgcgcagacattcattcacattcacgacgaattcgaggaccagcgcgcaccaatctggccgaaggtgagtcccccgatattggtaagcgaccgactcgaggacatgctgaggggcatgaggatgcataaagctgcatcgtgttggtttacatacagaatgggtgatgtcatgaaaactgcctaccaggagcccccccctgcattggccacgtccatgctgcagcagctctataaacttgagcatgcagtgtctgacatcaagttggacattttggatatgaagtcatctatcaggttggcatactgtcgtcatcttgggatgatagatatccttgtacataacactgatgcttgcaccgcgctgcttgccatgcgcaggaacatgggctcgtcatccagcatgagcatggctgagatagttgccgattacgaggtaaacaatcgaggagaaggactagtcgggcctttcggtggcgactgccagtttgctgctagggctgctgaagaattcttctcaaagatccatgggctggtgcgtgcgataatggtcactgtcgtaatgtactctccgtcgggcgccaccctatcattggctccaggcatcaacggcactgctcctgtcaaagacagaaccgtcccagatggttataaaccgtacaggctgacagagggcagttgcgtttggactcagtatgctacgcaaacacccgggcccttgcaagggatacgtccactatgttgccagtgtggtcactctggatggtcacaatatcatggttgactggggtattgctcaatttgcaaagctaccgagcgacatgatgatgtttgtctgatgattgcaaatccttgttgaccgaattagtgcttgcacgcactgcatggctggtggcatgatgttgcatgccgtgttggaatgtatgcatggtggtcgtcaggcctgtgttgtggtttgagagagaggcgattgtcagctccgccatatcccatcagaacacactatagtctctcaatagcttctggcgcctggttgagcatccggccaagcgcatcacaggcgtcacaggcgtcattgaacaaagggaaaa

SEQ ID NO: 185 - DNA, 22409 bp, unidentified
  misc_feature 1..22409: note = Fanzor polypeptide
  source 1..22409: mol_type = other DNA
cgactgtagaggtggaaacgctttggtgtgaatcgcatggtaatgtaagggtgtagcaacccacaaacgctcgggatattgtaaccaccttctttttcagtacctctctccccagacacaagacccgttctaaacgcatcggtactctattcccgtcccgtactctattccccgttgccccccatccccattatattttgtataccgagtttgcccgtgccccccctgtcccattagtaccgcaatttttgcttacgccgtcgcgcgcgtaactcttagatgcttccgttcctgtataacatacgttgccatcctgaatcgcaaagatggtgtgcccccttccctttgctacattcgcgcactcttttatgatcacgtccttgtcgtttgaatagattcgaccgtcacccttagttgacctgttatcgttaaaactactggtgggtgggtacaccatagtttgttgatggcagttttttcagatggtaggaaggagttcgttgtgaagaaaggatctgtgaagaagacggacttcgctgcatttattgactcattgagtttgtgcaataattcagtagtaataatggacaacgccagtatccataagaacttggtcctcagaagccccgtaaatatttgttacactcctccttacagtccagaattgagctgtgcttcgctaacattagcgttgagatacatgtttatcccgttagctttaactaaaaacacatcttagctttaactaaaaacacatcttagctcatgggtgcattgccacaagatgtgttaaacacgatcatcaacatgattgatacgcaaacaaagatcttgctgtacgactcaaaggtgttgcatgatctagtttcgttaacaatgtataaaaatatagagcaagacatttttgcggaattcaaggtgcaacacaataagcagctgcagtcttgtctcaactgcttacaatatcatgtgtggagtgacgggactccaatgaagaacaggtgtaggcacttctataaaattgtcaggggccgaacacgtatccgcgctgaatgacaagtgcattgctcacaaactcagcaaaaacgcacactccatctcgggaacaacaattatttcaacaaaaaataaatactgaagaattcttccggaggctccctattttaaacgtgttcacatgaacacctctgaaaagataatttttctttgttcgcctgcgtaaaatcctgcttcgttgatacaaacaacgttagagctttctctgtacttgtcacagaacatttctacattttcttttgaatgtccgtagagaattataatgtatgcacaggattcactctttgcccccttggtctattttcgcgagtcagttgtttcaattcgctgattgtgacactacatgcatcgagagcatcctctgtgatgtcgaaccccttctcctgcgccaacatcagtgcttgacggccgcagaagagtccattgtcatctctgatggctggcaatgaagtcacctgccacaccgagagtagttcagtaacgcaatatgtaaggggctcatccagtgctatgatgcgaaaccccatgatttcctgtagtggatggaatatatggttgtatgcttcaagtgacggacaagaggcagatacgatgacaaatttgtgtcccatgttggttgttattaatacataagcgacaatattttgcaatcagacgcaccacctacagtcggcggaacagtaaaatgaaacatatatcagatggaaataaatgtacgacatcgccgttataaaattggcgttaagaattctcgacatacaagaaaagcgcaggagcgggtcggaagctgttacgtttgtcacagaccacttgtagagtccgcccaccaagcttcattgtattcatccagcttgacgtgtgtacggacgtggatgacttgacagttcaggtcgcctatcaccgacgctgcctgcctctgtctacccctccaagagatgcgttgcatgccgtgccaaaatcacatgcttgaatataaggaggtgagtacgatgacatgggtacgtacacccctcaacgttgcccaaaagcaacgatcttcagtttttagagtataagtcgtgctttatttacaaataaatcccaaccattctaaaaatcatacaaatgccaccaacgtacacagtcaccgttcagtatacagacgacagtagtccgatatcaggtttcatttgcagtattcgaactgtggaagattccttgttggcatgtcagggggggatagggggaacaatatcagaggctatcgatgactttagacatcgggttacaatgtggctggcatatcctgagaatcatggattctctgactggccaactcctctcaccgacatctctgagatcaaaaacgtaattaggacttttagttggactccagagtgattgggatcataattcgtggattcacacccgatgggatcctgatgtaaacagaagtagttgagatcccgcgtttgtgacgcaactcgcggaaaagatgatcaattgaatccttgatgatgttggtgacttgtaatctatgctggtcatgccaaatgtaccccatggccatcggaaactgtttgctgagttgtatgtcaatgtcagatatcacgaagatacggctgtgattggtcacaatgtctggcgccgccatacctgtgagtatcgggaggggcggagatgacatgagcaaccaatcttgttatataatatatgccgccccagccttgcaacgggaaaatggaagcagtccccatagacccgtggacgagaagcccccctcaagacaccccatgcggtgcaatgagaaagttacgatatctgtcatacccgggtcgacaccgactcgcagcgcacccaggcgcaaagaagcgtcctggcagtcttcgatacttgcgtctttgggataccccgcgtttcttgtgtactcaggtgaatgtagataagggggaaatcgtgtgtttactgtactcagggtcaaaatatttgacgatatgcgttggcgtctcccgcagtatgatgatgatgaagaagagccagatcatcaattttgccaccatgaacatgagctgccaaccgactcgccctcttcatcatccagcagcaaggcacttctgttgtatgtggattatacttatgttcctacggatcacattcagaggactttatgtgtgcacatgcgtgaagcaggaaccatgttgggcaagaatgtggatggtttggacataccaggtcaccacagcacgtgggttcgctttttgcacccactcgactttcatgtcgctgtgcttccggggcacttgaagaaggcggagctgatggatctgttggatgatcacggggcacactcacatgatgactcggttctcgtgatcgtcttgtgtggtcatggatcctccggccaactcgtcatgaccaacggggcgaaggtgtcactggaggaggtgtcacatgcgacaatgcatcacagaggaacagtgttgcctttcatgttgttttgcggtgcgcggccttccgagggcctcaacccactgagagggatcaagaacaacaacaaacttcgacggtgcatgttcatctttgcaaccgatgacgctgtcttgaactcgcaaacactgaatgcatttgtgaaagcgatcggcagcatcatggataccagggaatgttgttgttactctgggattgaggacgccattcgctgtcacatgcgtgtgttcaacggatccgtcttgcatctggtgggggcaaacaacgagatgcgaggttctttgtttcaaccggcattcgtcatgccgagagaggtgagcttggcttgtaccaaagaggctactcggaatatcttcgagaacctcttcaacctgctgcaccccccaacgttgtccaaaagcaacgatctgcagtctggatgattataaggtgtcccactttatttgagaactacagtcggcggaacagtaaaatgaaacatcaaaaaaacggtataaggcggtaatatatatagcttaaatagttgtatacaggatggacacaaagaccgtatcggagcttagggcgatgatgctcgctgatgctatcgaagctgatgatgctatcgaagaactcttccgctgggctgaggtcaccgaggcagccgaggcagccgaggcagctgctgctgtgcctcctcagcctgaacatccgacgtacgtatctgcaattgttcctcgcactctcttttcatgcgcagttcaagctcgttttggtatgaggccgattttgtaaaaccgtttcattttagtattccgtcgagtgtaagaaagacaatgaattctccataggggtatcataggggtgaactcccccgtggctgctgtcctttacgaacagggattttctgttcgaactgccttcaggaagatgccttcgggaatgacgatgccctcaagatggagttcgtgcgttgcttgtttcgcgcctacgatcacgatttctgcttcgacatgccccctccgttgtgtgtgtgtgtgtgtgtgtaaatcagtagtgtgtctgctggttgatgttacactgtgggctcccctccggtcgcccacccgctcggttcctcgcggactcctttgtgggggctcccctccggtcgccccctgtcgctccgctggggggaagaggtgaaaggggctccgccacttgtttaatgcggtacggtggttctcatccattgacaagcagtttttaggttggttgcttgaggatgagaacaaccgtgatgtagaatgataggtttccctgaattttgttactttcgttattttttgatgtggagggccatagcggcacctgtgccgacacaggtgcctccgtgatgagagtggtcgcaacctcgggatagcttcctcgtctgaaatgccggaagtatggcaggtgcggtgagaaggtgtggatggccaacctggttgggtccacaccggcctgaatccttctgcattggaaaaggtggcagtgttgtccagcattgcggcggcgaggaggagagaataaaaaaatgcactttttatataattggtgtgttcatgtggcatgagacatgcttcctgtggcacgagctggccagtcatctatctgcggtcgacatgtatgtattatccttgacatgcaatgctgctaggaagtactacatgcgcaatctattccagcttgcggtatttgacgtcacagaactgtcattgcgaagtgcatggaccattctgtcgcatgtgcactgcaagcaggtagccattcccacgagcttgcgccaaactgagttcctacacaacaaaagagtattgacaacaggggctgactgggcagcacgcaagggacacttgcccctattgcaatggctgctgttgaatactgaggaggtctgcacgacttatgcattcgacttggcagcacgcaatgggcatatgaacgttctgttgtggctgcatgacaatggcttaggcggcactaggacatcggccgattgggcggcatatactggtaatctacatattgtaaaatggttgtatgacaacacaaactttaagtgttctgagcatgctaccatgattgctgcaggcaatggggaccttgacatgttgctgtggttgcacgcgcaaggtgtcacatgtaacacgagttgtgcaaactttggattcgcctgcgagcatgaaggaatcatgcagttccttgaatccgtgggatgcaaacgatgcatagacgaagcaaacactaacatcataaaaatattcgacacatcattgggtgtgagcgactaccatccgctcggaactgaagccggtacaaggaatcctgttgttgcacgagtgtacacacgacaatttgtttgactaagctttttcacatgtatttcgaatgtgactcccgagtccaatcaggcagctctggtcatgttggatggcaaggaacctgacatgaagacgaaagaatgttccctaccttgtttttgccaagacggtccctcgtctagcctcatccggtggtagactaagtaggactcagtgccttgcacaactgctacttgtccagtccccctgcgtacaatgaacacgaaaaaaattccttttctcctgccccatggattgctacaccattaggttacactccggtgtggccgtacactctcgaaaagtagaagaagaatagcgtacgagtcctcagtcacactcactgagcttcactgagcttcactgaacctggaacaaatataaacccctcatcgtcgtctcatctaatcacgatgaagataccaacattgagcatgttatgcatgaagcagattccttccaacgtatggcgcagtttgacaatacacattcagagctgcctgtacccgcgccaatggagatctgcaatcacctcactgcaagggcatttgctccgttgctcacgacgcaggatggcttcgttattgcaattgctggaggaccaggatgctggccattggtcgttggccccaacaaacaccgtggtgcacaacacagctctggctttcgagaccttacgccacggcgaccacgttgttgtgatgatcggggggtgtcgcaatggttatgcacaccatggcattgtatctcgccctcacaccagcgatacaccaagcatcgctaacttcagctcccccaccgggaatagcaaaatgcgcgatgccaaacttcagtttgtgcgttacgacgtgttcttagctggacaccgcacgtttggatgcgtgccttgcagtggtgaggaaggagacgaggcgatgcaacgtgagcgagcagtcaacattcccagtctgcttatccagttgccccatgcaagcttgcacgagtaccaccttatcagaaggaactgtgagtgtttcgcctggatgtgcaagacgggttgcgtgcatacatcatccgatcaggtggatcgcattctgcgcgccattacaacatattttaggaaaggggatagatcgttcattctgcagtcaggcatgatcgcatcaaaatcttgtgtagtgtcttaacccgcatatccacacgcaccctctcctggtattggttttgacccgggatctaatccaaaaatattggagcaaccaaatcattgctccatgacatgttgagccaagagcatgatggcctggctgaatgctaccgttgaatttaagctagtccgcgaggaaccgagtgggtgggcgaccggaggggggcccacagttcacatcaactacgtaacttttaagtcttacacaatgtgtacgttgtttgtaaaagattcttgagaggttgcaacagtagttgcctcgtttgctttccgaaaataactaaacggcggaacgctgtcgataccaaatggtggtcatgacaagcagagcccccgtattcattgaaaaaatacagagaatggggtctagttgacgtggtttttaagtggccacgtctagttgacgtggtttcgcacgatgaaaggcacgagcacgtgactgaccatgtgattccttctcctctggaggtgttcgcggtatcgctctgcgatcactcgaactgccttactgacgcgcagccaagacatgcaaatcttctcgaagaagacctcctggatttctgtatcaaagtaagaggtcgacagtgtagtttcgtccaagaagtcgatgttgatgtgctcgaatccaggtcggatgatgtacagcctctccagtatgctgtagatggttggatcgtcttcggacataaacaaggctttcagcgcaaacaacttgtgtctgttacttttgtccatatacaatttggagtcaaagcattcagacatgtccattccatagatctcatggtccacgaacttagagaacgctgggaagaaagcgtctccgaatgtgaacatcacagctggaaaagtgtatctgttgtataccagatgcggatcatacggatcatgtaatttgtatgcagcattagcaagttgcaaccatattttctcaccgactgttgacattattagttatttaacgttgtggatagagttggtttggttgttttattgctttgctcaatggaaatggtttcaattttttatcttttaggtaatgcatacagttgttctcaaataattttgggacactcagtataatttgaatgatatccccctgaaaccagatacaggtccgtggttcactacaaatattttttgaggagtctgaggaaggtttgtaatatatacaacgtgtccgagagctcatgacatgttgagcccagagcatgatggcctggctgaatgctaccgttgaatttaagctacccgtatatcctcgggtccgggggacatgtagtaagaaagacaatgaattctccataggggtatcataggggtcaattcccccggggctgctgtcctttacgaacagggattttctgttcgaacggccttcaggtattcagttgcagattttattcaacaagcggcggagcccctttcacctccccacagcggagcgaccgggggcgaccagaggggagcccccacaaaggagtccgcgaggaaccgagtgggtgggcgaccggaggggggcccacagttcacatcaactacgtaacttttaagtcttacacaatgtgtacgttgtttgtaaaagattcttgggaggttgcaacaaaaatggtggtcatgacaagcagagctctgctatacaaatctgtattcaatgtggtcagggtcatcatccaacggagaaaacattacataacgagtgtccatttacattacaagtgaattatgtccacacttctcaaacttttcagcaattactgacaatattcgccgtattcatggaaaaaatacagagaatggggtctagttgacgtggtttttaagtggccacgtctagttgacgtggtttcgcacgatgaaaggcacgagcacgtgactgaccatgtgattccttctcctctggaggtgttcgcggtatcgctctgcgatcactcgaactgccttactgacgcgcagccaagacatgcaaatcacctggaagaagaactcctggatttctgtatcaaagtaagaggtctccagtgtatcggagccaaagaagtcgatgttgatgtccttgaatccaggtcggatgatgtacagcctctccagtatgcggtagatggtagatggttcatcggtcatacacaaggcttccagcgcaaacaacttgtgtatgttccttttgtccacatacaatatggagtcaaagcattcagacatgtccattccatagatcttatggtccacgaacttagagaacgatgggaagaaagcgtctccgaatgtgaacatcacaggtggaacagtgtatctggtgaatgtaagatgcagcggatcatacggatcatgtactttgtatgcagcattagcaagttgcaaccatattttctcaccgactgttgacattattagttatttaacgttgtggatagagttggtttggttgttttattgctttgctcaatggaaatggtttcaattttttatcttttaggtaatgcatacagttgttctcaaataattttgggacactcagtataatttgaatgatatccccctgaaaccagatacaggtccgtggttcactacaaatattttttgaggagtctgaggaaggtttgtaatatatacaacgtgtccgagagctcatgacatgttgagcccagagcatgatggcctggctgaatgctaccgttgaatttaagctacccgtatatcctcgggtccgggggacaagtagtaagaaagacaatgaattcagaagccccgtaaatatttgttacactcctccttacagtccagaattcaatgctattgagctgtgcttcgctaaggtgaagaaggactttcgtcgattgaactatataccaaacgatacaaagacgcacgtgtctgatatgatttccttagcattcagcaacctcactgataaaatatgggttgttttgaccacgtatggaacacgtatgtgatgtttgtataaagagttctgtgatgtacaaattatgtaagatggcaacgaaacctccgacagtcgcgaaattgaaggagctactaaaattggccgaagtagcatactcctcaaaggacaagaaggacgatattgtccgtttatgcgaagacaatggtctcatcgccagaccccctccagagtacaagacggtggaaaagatgtgcgtcgtgaaatgcgccctgaagaaggcaatgagtcttgacgatgaagaattcggtaagttcagggggcatgtggatcagctcgtcaatgaggtgagccgcatgttacggcgttccagtctggtgctgactttccatgtcacgaggctcatggagggcgacctgccgattcctaatatgtacgatatgaaggatacctactggaaggattggctaaggattggagttgacggcgtctttccagatgaagagagtagaatatcatacgaagccgtaaaagacgtaatcggaaaggtgcttggtagcgatgaccctgactacatcaactcctaccctatctatttcgaccaggttttgaactatgccggtcacacattgagcactgtcgtgtcgaacaacgcatgggttcctttggtacctcgtctgacccgcctcactaaggctactttgaatgcactgggagctccgaagaccatccgtgtgtacgacgtgatgagggtcatccaacaagaaatacaggagatggaatcttggccagagtctgttcaggagtacgtccgtgaagttcaagtcaggctgcaagttccagatggaagtcgactttatgatgactatggcaaagacatggacttcccgaccatggtccggttcaattattggatgcagacacggttggaggctattggtgcacgtcgtatccggttgatgcccatctttaatgtccaacgggcgcatgtccgccttgacatgaagaccctcgtgaacctgttcaggcacgtgttccccaaagacccaaacatcgtcgagctttcaaagtgggaaaatgtaaaggatcccgaccgcttcatgttgcctctgaagccttcagttaagaagaaaaaatcatgtggtcctggtgaatgggaggcatacaagttggcccaacagaagtacgatgctgacgttaaggatatcaaggctactgacgagtacagacatgcaaagggtaggtatgacacgctcgtgaacgcccgaaaaacagtcgcaggttccttcttcaagaaaccacctgtcaagacggggtgggtgttcgattgtagcatctgtactgacggagtctcattcagcatgcagtacagcaagacagtacaggttcgtgtatccgatctgaagaatgaaagtaagaggtctcgtgacgaggaaggtatgagcgtctcagaacagtatgaccataaactcaaaacgacattgcccgatatgggtatcgtcgttctgggtgtggatcctggtaggagcaacatcgctacagtcacgtatctggcagacgacaaaagcaagacctggaagcttacacgcggagctttttaccacaagtctggtatcaagaaacagaaaaaacagcaagaaaaacgtttctcagacatgattcctagatgggagtctctgcgtgaaaatggagcagcgttgagtacatccaggaaggatgatatctcggcttacttgaaaaattacgctacgttttccgacgagtggtggaggatggcactccgtcgcagagaatcccgagacaactttcagaggtacattggcaagcgcaaggctatggactcattttgggcagggatcaagcgcaacatgaagttggatcatcctgacctgagggttcgcgtagcatatggttctgcaatcacgaagctgaaggctaccggaccaggagaggtagctgtgcctatgggatctatgttcgcttcctgcaagcgcctcttcaaagaggaggttcatgtgacagatgagttcaagacgactctcatgtcttgggaaaccggtgccaagaaggaatgtgtttacaagattccaagtgtccaaataaccacggaaggtcagattcgtctaggttacgagttgttgggtcacaccccattgaaggagactccaaaggtctcttatagcgaccagttggcggtgagggtgtactgcacacgtaaaaaaatccaagaaaaacacaggaggggtggcttagccccctctcttgtcgacaacaactcgatcaagcggtaccctgaggtacgaggactgcgattctctccagaaaccagcacttactcggaccgggaccgctcctctgctctcacaatcgcaaggctgcactgcatggaactgttgggtcaagggagaccgcttccattttgcagggatgcgtgttgttgatgggctacaaaaaaacatgatggtgttccactgcaatgtgggttgctacaccataaggttacaccataaggtgtaccgtacactccagaaagcggtttcattttagtattccgtcgagtgtaggagacacgcaaaatgaagcgattacagagtggcgccaacgaatcgcgcaatggttggtagagaaccccagctgcagaacctggccgataccacacactataagccccgaaggcaatgccctagttgtcaaaagattcacatggtgcgccagatgtgacagatgtgacggttatacagcagtttgacttttcatgctactttttgacatacctcttcaacctgctgcaccccccaacgttgaccaaaagcaacgatctgcagtctggatgattataaggtgtgtcccactttatttgagaactactgtaaggctccaccgacacctgtatgttagtcgaatgccggccttcattccatttcccccgatccagcagttcaggaacgtcctgaaagagttgccgtacgtcttcggaagcgcgatcccgcagacgctcaagttccgaggcacggtcaaactgcacgggacgcactcggacattgtgaggcacttcattactggaacccctgacttcgtcgacaccattcagtctcgaaacagaatcctgtcagtcgacaacgacaaccaaggctgccacatgtttctgactgcgaagaagtactccgatctgttcgatcgtatccaagcgatccatggagcagatataagatcgaacatcgccgtatgtggcaagtactgcggtaaaggtgtgcagagcaaggtggccctgtgtaagctcgccaagatgtttgtgatatttgcgatcagaatcgactatgaatcggttgacatgaccaagtacagcacggtgttctgtcaggaggaatggatcttcaacatcatgaactttccgacgtacgaggtggaagtcgacatgagcgacacgcagcccgcgcaagactacatggcggatctcacgaactccgtggatgcagagtgtccgttcgcgtaccagctggccggcgtcaagggtggtggcgagggcatcgtgtggacgtgcgtggaccacccatcgtctcgtctgtggttcaagacgaagggcaacacgcattgcaccgccgtcacgaagcaagcggtgccgtcgcagacagagtacatggagactgtgaccgagttcgtcgagtccgtcacgaccgagtctcggttgagccaaggcatcgagtgcctggttgaacagggcgtggagttgcggatacatagcgtctctgagttttcgtcatgggtgtgccgagacgtgttcaaggaggaacgagacacgatcgaagaaaacggattcaatgtgaacgacgttcgtaaggcgtagtacaggaaagcagggaactggtacaaacaacgggtggcaaccgcataaatcaatctctcgagcatgaataagcgtaattgtgcatggtaagtaaattcaacttatgagaaacctgttgttttctatggcagccaacaagggtaccaattttctccttgccaccggacttgcgcgccgtcgtttggggtatctatcgcaaactcgtgttcgcgacgcagtcgctgtcgtttaggcatttttcatgaatgccttaatgccctgtatgctactcaattcctgtgtggttgtgctttcttttgttccttcccacgcgacacctgtaatttcttgcatcttatcgtatgcatcggctccttcgaagatctcatttttgtacacgattgctggaaacctcgtgatcctcaacaacttcagcaggtctcggacctcgagatgtgataggtcattgacaacaactctcgcatcctcgcattccaaccaagaaatgtaatatgttgcaaacaacggacagtgttcgcagttgctgctcaacaccacagtccatccggtagctgggacagttgtcaaaatcataacctcttaatgttgaaccaatgaataataatataattatactacattttgattacgataaaggtggatcatgcgcagtgcctactggcaaactggtgtggacgcagcaggaggaggaaggttgcaacggtttacttttcagatgcaacagttgtaaagacaaaacaggaaccaccccaatctgccccattgtccatcattcgcacatgccacaacggctggctgccgcatgccccatgaccttgaaaaacttacaaaataaattaaacttataatgattgaggatgagaacaaccatgtcgtaggatgtaatgataatgataatgtaaatacgattgggtttccctgaattttgttatttttgttatttttgttatttttgttacttttgtaattttggatggggaggaccactacttcactgctgctgcacccacatgcacttcactgcacacaccgcatcatcatcatctgttttaactgccgctgaacttcgcctcccccctcttaaaatgaaaatggtcagatgtagcatgagtctgtgctcttctcaatccgtcttgcgacacccctaccccattcttctcccacgttttccgcctgtttgtcacagtccatacgtagagaccggctacatttactatgaatatatttgcgttcgtgtggcatacttgacatgccatggtcatgcgtgtgcgtgtgcatgcatgcattgatgcattcggtagatgtgccaaagagtttccgtcatcccaatggggctcctctcagtgccttgcacaactgctgcttttccagcccccctgcgtacaattaacacgaacaaaattgtgatgattagtaaaaatggatcctgagacggttgttctagttggtgctggcacaggtgacatgaaaatgctgaatatcggcttgtgtatgcagatgagtgattacaagacctgcatacaacaagcactaactttgtcatgctcactaaacaaccgagagagtgtcctcgcactgatttctgcaggatcgcatccaactaattgcgatctttctgcggcttctcgaaacggtcattatgatttagtaaaaacattacttgccctcccaggtgcacaatttgatacaagtactgcatgttatgtcgcacgacacaacgggtatcatgatatagtgaacctcttatcatccaacttgcctgctgggtgagtgagagttactgttgtgggtgaggatggacgagtaggatgcgcaagccgccgcgttcccttggcggggcgcgatattaatgcgcccgtccttgtagttctcatagaacgcgcgttccttcatgtatttctcctcgtagtgcttgtgaaaaaaaattgaaatgtttcgctcgagctgtaaagacacacacatattatacttccactttgccgctatttatcatttctcaactcaatcaatcatgtcttgtactttcgttaacgtgtcagaacaaccctgcatcatcgacctatcaagggacgatgaagacattgttcgcgactgcgtgaatcaaatctgcaactgcgttctgaacacacttgagccgtgcattgtatccttggtatcgtctgatgatgagtccgacgacgaggcccaggccatgtccgagtccgagtctgacaaggaggcccaggccatgtccgagtccgagtccgagtccgagtccaagtccgagtccgacgacgaggcccaggccatgtccgagtccgagtccgagtccgagtccgagtccgagtccgagcccgaggcccaggccatgtccgagtctaacgacgagcccgaggcccagcccgagcccgagcccgagcccgagcccgagcccgagcccgagcccgagcccgagacccagtccgataatcagtcgtcccccacgtttaaagacgtatccgggctactggagaggaccgggatcttataaacgttcctcgcaagagggcctacccgggcgaccatgtccaccagctggtggaagtactggttgtctgacgaagccattgaaacctggttacatgccggttggaagaggaatgaacagaggatgatgatcatgcggctgcatcccgacaaggccaactccttgcgcgatgagcgcatgaccgaggctgatcacaagtggatggacaaactgtcccagaatctgaatggtgcattcgacgtgtcgagtcccgagattcccgagattcccgagattccccgtgagatgtacgacattatctacttgctcaataatactgagttggcttaaattgctgcgtataattattttttttcgaaatgcggacttcatgtgtgcgttgttcatatttggttaggttttcgagcaggagtctgctctgcttgaattcacgtgtgagaatgagtatgcgcaagtcaccggcatttgaagtcttcacacaggcggtctcagaaatgcatacccgggttgtgcggaaacctagcgagctgcgctgccaactggctgacccgggcctccagacagttggttgcatcctgtgcaaatgctgctcgagtgaatagtctggagattgagcttgagactgagcgcgctcgaaataaggcataaatgaagattgagactgagcgcgcagaagcacttgagaagcaactgaggtacgaactgtcgagcatgactgccgagcaatggaattccctgaacgatcatgacaaagtagtatttggtgtccaggctccttcaggtaatgccggctaccaactgtgggtggacaagtacaagccaacagacactagagagctggtgggcaacaacacgctgattgccaccctcaggatgtggctcagcaactgggagggtgtaaatctgcgtggccagcaaccacaggcccctcctggcagccggaagaatcctaaggacctgtccaagaaggcggtgctgctcagtggtcctccgggaatcggcaaaacctctgccgcccatatcttggccaaggagtgtaactttgagattgtggagatgaatgccagtgacacccgtaacaagtcggattcaaagatctcagctggcatgggagggaagtcggccaacatgatcaaggagatggcaaccaatcgatctctattggtgggagctgatgggaagatgaagaagcagctgctgatcatggatgaggttgatgggatgtctggtggtgaccgtggtggtgtgcaagacctgatccagacgatcaagtcctcaaaggtgcccattaaatgggcgttcctgcttcccggccgattttgtggatgcttctaaatttgtggaatcttatgattcaaatcaaaagaccgtttaggcaaatttcttgatttgtgagtttttgctggatttcttcgaatcttcttatgtttttgaacataagattgttttctagttttttgacaaagagacaattcctttactatcttagaatcatcttatagtttttaaacataagattgttttctagtttttggagaaagagacaattcctagacaattattgaatcttgttacataactcataactcataactcataaatcgtaactaataacctcgcaatctctgaactcttacatcaaaacctcataagtcattaccttgtaactcatcattcgttactcgtaacctcgcaatctcagaactcttaactcattacctcataactcattatcttgtaactcataactcataacctcgcaatctccaaaccgtaaatcatagcctcaaaactcattaccttataactcatatacttccaacctcactgcctcacagccccattcacggtggtggtggaggacacacatttgggtaggtccacattggtgctgcagcactctacgagacctccacgcactacaccaccacgacaaaacattatcctagcacctgaacacatcaccctacttcctaacctgacaacgtcttaatcccattattcacgtgcccgctttacaacctcattccccctcagccatgctcttcatctgcttcatcatttttccaatggtgatcaagagggccgatggttcgtcgatgaatgcctgtgctgtggcgatgtcggtgactataccatgcctccaacatttcttcaaccaaatccttgaacgggaagggcggcttccacagtattgcttcttgcagatggacaacgcagcaaaggacaacaagaacgcattcatgttcgcatatttgtcgctattggtggagcttggctggttcgagcaagtgtacgtccactttcttcctcccggtcacacacacacagcaatctcgaccagaagtactcggtcatctcgcaggctttgaagaacaaggacgtgttcaccttggaccatctgattaccgaggttggtggcgttttccaatctatgggcgactacactaagcaggaagttgtgacgtcaattggggacttctctgctgtcctgaaagacaacgtgtaccagctgtacggtcacggcacgagcacggtcaatggagtcaatcgacgtttacacggattcaagatcacgagacaggccaataggcaagctggtgagttgtcaaatttgaatgctttgtcctttattttaataccatatcctcccctatgcgtgggggagcatgaacaatacttattccttgttttcacaacaacaactgcaggggtctatttcaaggagtatgatgagtcgggacactggagagggcaatgggataaggacagcgaacccattcttgtcctatcaaggtttccattaagcaagtccgtgccattcaaggatgcccccaagattaggattcaagaactccaaaacatcgaggtccactggaagagtatcttggatgtcattagtccgaaggatgcagcagaggacattgctgatgacctttccggaccagatgaccttgctgtccgggagtatggccttgacggacaagatgacattcctggcccggcagctgatgaccttgccggaacttcagccggcgacggagccgggtacgccgcaagtattaccgctgacattcgcagaatttggttggacagcaacaaatggtggaaggagttctttgacaatgagaaagagtattgggccagactaccacctggtgctgagacgggggaattcccagcagacaaacattttgtcgacttcccttctgccttgtccgaatttcctcaatttgacgcttctcggatatccctaggcgagaacttgatagcaactctggatgacttgtccattgacttgccagatatcctacaaagtgaggtggcaaagggattgaaggacatactcactatggaaacagaacttgcaaggccacctactgcggatctgctgtacttacattcttcgcaagggaccaagccagatacaagagccgcctacgaccccaacacagatttggctttgggacatgtagcagtggtcaaggttgccgtggaagactctagcggggagagaggatgggacgtggttgagatcaaatctgatactgtcattggagaggtagaatgtgtgtacttaatgcctttatactctaagagaggtgaggcattggtgtacaccgacaccgactacccagagtggcctagtgagtggatggaccaaaagcttgtgccgattaccgttaagcttgggaggaaccacaaggctacatggacaggcaacatcccccttgatgccgtgcaattcagttgccaacccacgagcaacatgaagataccaaagaagtaccacacaagcgtgctcttagcttgcaaagccattgaggacaacactagaccggaggccgtgcagtcggatggagataatgtagacattgatggagaagaggaggaggtggaggagggtttaggggggtagtgggggtgaggagggggagaaggaggagaatgacgtttcatagtcaccttaatgatattattcataaaccactcttacgtttattttcataagccgtgaatgctaaattctatattccggtcaataactgccagttttacacattttccttacattaaaaaaaataagatgtaaaattggtgtttctaagttgttacacaatagggcaatttcatgctcataagattcgctatatccattcttatgagctcgaattgagcatatttcgtcaaatttgaacatattgaccgaaatcttatgttttaattcataagattgaacttgtaaaaaatcagaatagccccttaaaagtgaacataagaatggaaatcggccgggaagcgggaacgcccattattatctgcatctgtaacgacaagtggaaccagaagttgaaaagcttgcggaactactgtgtggagcttgacttcaggtaacccaccccacatcaagtcaagataaggatgatggagatctgccgcaaggaggggctgactgtcaatgatgccaccatggaggccctggccaagggagccaatttcgacctacgctctatcctaggacagctgcaaatggtccgtcttagtcgcaccaccctgtcctacgatgacgttaagggcagccaggcatgcgacaaggacagtgacctgtctcctttcgagtgtgcaagaaagttgctagagccttccagctcaagcatgagcattcaagatcggctgaacctagctatggtggacgacatcgtccccctgttgatccaggagaactaccttaaccaccgcccagtcatcgcaggaactgaggagcagcggatgagggcagtggcgaagtcagctgaggccatatctgcaggagatgtgatcaacacgtctgtgcggcgctacatgaactggagccttatgcctgccttcaacacgcttgcatgccttgtgccgggggcgtacatgcgcggcgggagggacgcattctggccaggcgacaactactctcgcttcacctcatggctgggcaacttctcaacctcaaacaagcaaaaacgcttgctgggagaactcaccaccaccatggcttccagcggccacatggcttctagcagatctcccgtgcggttagagtacctatcagccatgcgcaccctactgacgcgtccactagtgactgatggagagagtggtggtatccagcagagtgttaccctgatgcaggactactgcgtctcccgggaaatgtttgactacgtgattgacgtgaccaagttcaagaccaaggccgattggggagaggaccccatgaaggatgtccctacaaagattaagagcgcctttaccaggagcttcaaccggcaaggcctgcaggcgaagtgcggtgcaatgctctccgcacctctgaagggcaaaaagggtaagaagggcgctgctggagcagaagacggagcggatgacgatgaggacgagtccgggttcgagaagcttagtgcaggcgttgcagatgaagacgaggacgcagatgatggcgacgagatggtagcggcagccaaaacccagctgctaagtgccaagctgatcaagaggaggcatgacgatggacttaaagtctgacaatgctccagtcaagggggagggcagtgcgggacggggctccgggggcagaggggcaggtgcaggtagagggagtgggggcagagggggggtggcatagacctactgtcacgtgggttgctacaccattaggttacaccgtaaggtgtgccgtacacgaggcggtttcattttagtattccgtcgaccgtatcactatactaacgacttaaccctactgtctggtctcacggccttacagatcttgagctttaatagtccctgcttccagcaacatttaaatagggttttcagagttgtaatcccaatgaaatcagtaagcggcaactactttcgagtcggagcactccttcgcgtttgccatgctcataattgtttagggttttatattgtacatttcaaaacacgatcttcagacatggattacttaccttaccagaatcccacgtacactgtagggtccattgtaaccatagacaacccaacaacgcacaacgacttggataagacaacaagtatcgtggggctagtat

SEQ ID NO: 186 - DNA, 21317 bp, unidentified
  misc_feature 1..21317: note = Fanzor polypeptide
  source 1..21317: mol_type = other DNA
tcctgcattagacccgaattcacccgcattagatccaaagtatcctgcattagacccgaattcacctgcattagatccaaagtatcctgcattggacccgaattcacccgcattcgacccgaattcacccgcattagatccaaagtatcctgcattagacccgaattcacccgcattagatccaaagtatcctgcattcgacccgaattcacccgcattagatccaaagtatcctgcattagacccgaattcacccgcattagatccaaagtatcctgcattagacccaaagtatcctgcattagacccgaattcacccgcattagatccaaagtatcctgcattagacccaaagtatccggcattggacccgaattcacccgcattagatccaaagtatccggcattagacccgaattcacccgccttagatccaaagtatcctgcattagatgcaaagtatccggcattagatgcaaagtatccggcattggatccaaagtatcctgcattagatgcaaagtatccggcattggatccaaagtatcctgcattagatgcaaagtatccggcattggacccaaattcacctgcattagatccaaagtatccggcattagatgcaaagtatccggcattggacccgaattcacctgcattatatccaaagtatccggcattagacccgaattcacccgcattagatgcaaagtatcctgcattggacccgaatatgcaagattctatcaaatcaatgtatcgagtgttgttgctaggatccttgatcacaatattcgactcgaatacagatatcccaagtattgttgtttttgcagattgaatgacaatatctttcacgatgttcgatgtaccaagcactcctgtgttagaagtaacatacatggaaatacctccctcagagtcaggagtcagcacagaaacaccgcctgcacaattcccattatcataaattgaaaaaaattgaaaatttgacttccaagtaagtcacactgcggggaacagttgaccctactaaggacgtgatattatcgacaccggttcgtacgcacgaagctagaaccagtcacgtttcatacggtcaacgactaccgtgagagccgaaacgcccctgccaggattcgagctcccgcgttttccttcgaccaaggccggatactctcccattgagccactccgagcccggatcgggatcccattatcatatagagcccccttcacgacaagcccttcatgttcgtctacgaacacgctaggattggaggcaccgattctacctgcgagcactctgttcccttgctgcgtccataaaaggaggaggtcgttttctctcactacccaagggaaaattatattgtcggcggttgccatcatcacaaccgcacccatcatgtcaagcgcatcgttagaactcgacatagtcttgtgtactcaatgtgtctaaaaaacctttgctctacagtacgggcagcttttctgaatgcgcaaccaatcgcaaattcctcgccccttttttttgtgatgggtgatcgtggaggggcatgtaacgtggaagttgtgattgcaacttagattgatgacgatgtcttcttctttgaacgcctcatgacagaggccgcacacgtcactggtgtttggatataggtaaggtatgtattcgataccctcttcagtcacctctacaccatgaggttcgcacacctgcatgtacaaagaggatgacaaggcatgtttggcttcgctctctgtgatggtctcgttgtgacacgattggcgcaggcgaacgttagtggggtccgtgcacataacaccccacttggaaacgacccacacacaccacccgcacaacatgtcgtccataatccaccccctgttgcgcacgaacccatccgccctctcaatgcagcatacgatcgagtcataccgtgtattttcgtcgcatgtcacgatcccacggtcggctacgtacgccggcgaaatgcagaaacgtttcatctgaacgcggtggatgcgggatgtcagcgaagtgacaattgaaatcttcaatagtttgtccgtgttaagtacgtacaaccgatcctgggtatggcaaagagagtcaatgtcgaacgctatgttgaaccagttgaagttgtgccacgcactccagaaacaattcacaatcgccacgctcacgcgtctgtgcacgctcttgtccgcaagaggaatccacacatggtacaatgtctccttgaaaacatgcgaagagcgataatcggaatcgttcttcgtaattccgtgccgggtgcaaacgaactgggtcgcgaacaaagcccccatcacccttgggaacaactcagtgttgctagggctcatcttgcaagtgatttcgaacacgtggaccgatgaagactcatcatctcccatagaagagagagtctgcatgaccgtgtcacccaatatgtcggcatggaaagcatgcataatcatgacgagcttgttaacaccttccttgaatgcatccgtgccagcagagtcctccacatgcttcacgtttttaacgaatggtagagaactgcccataaagcctggtaccacgatacccttgcgacaatgcatgtatgttaaataaagtccttaaactgggcgaatttcttgacgtgtattcactatcacgtaagacataaaactgattcgtaggaacgcgagcgagcgagtcctcaagattttgcggtcgccaccaggatccatggctgccgaaactcgatgcggtaccctctccaaactaatgtcttcagaggcgcctcaacgactgtacccaagaagatgaacagcgcagacacatccgcggatacatcgatgttcctcgttgcggaatacacaatcaaaaagaataataagtgacgaacaagagggtttgagaatagcgcttgcatttcctcgtcaggttggaggacgaacctccccccaaaaccgacaatcaacgatgataaacctaaggcaacttgattcgccattaaacaaatttatgaatacactcattttattctgtcatcgcccttaggcacgcaaccgatattgagagtcacgaaagcctgaagggattggttgacgattgcccctggcctcacgaacgcatcaaacaataccattgcacggatcgcctcgagcatctgctcgtgcaacacgagcctgccttcgacgctgttgtagaaaccgggagcgagaatgtagaacgagttcaaaaaaccctgagcgttgggttcgccaagacgaacgacttcgtgaccctcctctcggttgatataagcgttcgcctgcaagatcataggcatattatctgcctcacctgacgcagactcgggacgaccatcgaactctgagaaccggacatcgtcccctactacgaactcgttcatgtcgaagaaacggttgcacacgatgcggatgtacaacccatactgtgtttcgtaggacaaagatgtcagtcgcaaggcgtcaacactattgttgaacaatgcaccgctaggacgtgttatcgacacaacgagcgaacggagggatgcaagaggggtgtcgaacgtcttcctatctagttcacgcacgggtttaagcatgacgtatccgcgcccgttggcagcgcggaacgaacggtcgaacacgagcacgcaaaaactccgacggatggcctcggaactcccgtcgtacatgccatcgaatccctcaaggttcaccaggacataagggtacgaaaagtcatagtcgtgaaggtacggacgcgcggaacttgctcgcttctccataggaacgatagcgctagacacggatatccacgagattccgcggaaatcctcacgcccaaaccctgtcacactcgaaccgaagcgaaagcggtgagggtgcgcctcaacgtccctatcaacaccgtggagaccaacactcctatagacatcacccacatggtgggttacagagggaatcaccgcagaagaaggcaaagcaaacgcattatcagttacaatgtgatcaattagattgtgaccacttagattgtgagcggttagattttgatcggttacagaatgatcagtatctggagcagaggtactaaacgtaagacggtctcttacaagatcctctacacggcgatcgaattcctcgtttgatatatgagggacttcatctccgtccaaacgaagatcagatccgtcgtcgttggtgttacgagagttcgtgttgtaagaggatgatgaatctacaaagttggtcatgaccgtgtcccggtcctccgcacgcaatctagagagcgtgctctgggggcgagggggcgcatcttccaatcccggcaaacgtggtcgtgattgctgctgaaaaacgtccctttcgcgactaatgaatagagtgtcgttgttgctcttttttttgatataggttgtagatttcgggggggattcttcctcatccatcttcatcatgtcccgcatgagatttaacgctatattgttcttatcgcgcaatgagagggagtcgctatctctccgcttctccaccccctgcatgaacatgaaaagtttttggcgaatgcggagaatatcggatgcaccctgaaagacaatgttgtggcgctccttcatgtagacgtgaaaggctgcctcgcaagtcttgacgttctcaagtgaaatgaatgcagatgactgatttttggattccataatgaatcgacaaacacacgtccaatcccaacacgtccaataatggttgcaaatatttctttacgagacaacctcacgcatcataaaataaaaaaataacaatttataagaacatctaatcgaatatgtctgacatcatcaacaacaacaacaacaacaacaatggaatccgctcccaggggtgggtcgtgatcgtggcatcggtcatattccacatcaccgtcatagtgacaagcttgatgcgcaacaacttcaacatcacgttggcgctgatgttgcttctgtcaattgcgttaacggcgcttgcggtctatgacattcagtgcctagagtccggaggatgtacagtttggagttggataagaactatattaatcgtcttaactatggtattgtccacgctaactgtgataatgttgggatacaaggacaatgaaaacaaaacaaagaaaaaacgtgggcagttgactcgtttgctttccgaaaaaagtaaacctaacagtgtataaggaatttgcatatttcttaatacatgccccccggaccccggatgtgtaataagaaattcataggtttgaggatatacgggtagctaaaattcaacggtgaacgttcaaacacgtgcttatactcgactcgactaaaatgaaaccggaagcatgaattttacagctacgggaaaccttgtatttttgggattctgaaaaattgtcaaattcaagatttgtaaccagatactgtcactacagtcggcggaatacttaaatgaaaccgcttcgtgtacggcacaccttacggttttacctaatgttgtcgcgaccaccggagggggaccgagtggtgtctacaacaatacgattttgaatcaacaaattgcaggatgttaacgagaatattgtatgttttagatcacggatctccatcctgcagactccgtatcgttcttttgtcgagattgaaggaccagccgcacttaagagatcgcctcttacccagtaccgtgacccaaaattatttgagacatcttactaacgcatgcctcctccggggaagccgaccaggttggcaccgatgccgaaaccggcaccactgcggacactagatccaacggcaggggcgaacaggtccaaaacggcgaacgtggcggcaccgaccaaagaaatcatcattagatccttaggcggaagcttggtgttggggatgaagtacgctgcgacagcaaccatcaatccctcgaaaatgtacttaaggaaacgaacgagaatctctgatgcatcgaatgaaacaccagatgcctgagcagaattgtacattttgttgcaagggtatataacaccaggggtagaacaaaatcctagcaacgtttttcattcggtcggtgacaacaaaacatccatcactctctcaaacgatgcgatgtcgtaatcgatgtcgcagacagtccccgataacaaatacaccaacctaatacgcttgcggtcgtcaccatgcatccacgcatacaaagctgtctgcaatatgtgaacaagctgcacttcaccactcgtgcacttcaactcatataacgaatcctcagtcaccacatccgcctcgccataaacatggcacgcattgggaacgaactcgcgtcgaagaggaacctcaaacctcgtcaccactccaccgcaaatcccagctccgcgcatgacctccagagaggactcaacatcgacttcgtccaaccagtcaaagcgagtaatctgcttcgctcgataaaagtactgagatgcagaagactgatgcagtgtagccgcacacagaaaatcagacacactaggatcgcaaccagaagatatacgcgatacaagagcatctcgtaaattcccgcaatatttcgaactgctcatgttgagagtcgggagcatgtcaagaagctgcgacctccctgtaacacggtattccaagattgccgggattgcgatgccgtgaagatcagccacgtactccgcaagagcccccctagttctcacagtactgcacaatgccggcgcacgcacgccaatgtcctgaacacgccacgtaagatgagcactagctcgctttatcgtttggaagggaaggtgctcgagtagagagcatactccgcgctcattaggacggatatctgcatcatcattggtatcgtcaggagtcacttcttttttagatgcggaggcaggggggcacccctgcaacgttgctgtttcgagaagcgcggttgcatccatgtaaggagcaagatgagatctcatgttgtgaaccacgatcagctctcgcttcacccgtgtcagactgacgtataccgggttgggacaatccacagtcgatgatgagagcggcgcatcatgatgcatccgctggaagaaggtcatgtaagactcttctgtacctcccaagacgaccacagcttctcgctcagtacccttactcccgtgaaatgtcatgaaggccaacttcccacgcagcacctgctcgttcaaggagcactcctcgaatacgtcattcacactcagagggacgttgcgatccaacagccgcttctccagtagacgcaggggggacttgcctcgccctttctttacgctcggagaaagaaccattatctgatcgggtcggtaacgggtgaggaggtcgaacacgactgacgttggcgagacgtcgaacacattgcaactcataaaccgcggacacaacgtcgtcgacgacggcacgtgacctgccacaaggacatcttcacccttaaggaacacctcgttaacaaaacgaaccatgggcgcggttagacgccacgtcgtcttcaaggtgtgctgtctccacccacggacacccgagatttctgagggcagcaacgagtcgcattcggcgaggaacctcgggctggcacccttgtactcgtagatggattgtctcgggtcgccgatgaaaaggaattgaggcggtcggtggcacaggcgcgcgatcatgaggatgcttttccaataaagagggttgatgtcttgcgcttcatctacaacaacgagtctaaatgacagagcgctacgcaagcgtccattgttagcattaatagcatctaccatcgtgtgaagcgcctcgtcggtgtggcatccctcgtcgtaatagtgcgtaccgaagctgtggaacgaatgcacctcagcagcggattcaagtcccaaggctgcaacttttttgcgtgtctccgtcttcaagttggagttgtatgtcaggagcagggagcgggcatcggggaagagcgcatgcaatcgagtgacgcagtgtagagataatgtagtttttccagacccggccacgctttgcaacttgacattcttattctctagcaccagtgacttgatgacctcagattgctctggagaaggaggaggaaggagcatagaacaagtattagataacctcaaattacaaggctataaatcaatgatccatgcgtggtgtggtctgttgattcagaatcatcaagttagctttatacagttgtgttcgaaatgaaatgaaatgaaataaaatgaaatgaaatgaaatgaaatgaaatgaaatgaaatgaaatgaaatgaaatatcatgtcctaaaatatatgggacaatattacgagaacgatggttttgttgtcatcaccatcaacattcttctcaatacacacttgatctgggtgtaaggcagcagctttacgcactagattggatgttgcccctggaatcattgacagcaattgtctcaatgacatcttcatgcttgaaacattcaaattcatgtgcaatccagaccccttccacatccggagcttcctaatgagccctctcatgtcgaggggcttgggagcttgcaaagaggaagcaggtgtcgataggatctgctgattgtcagtaccttcagatggcatattcagaccggaaggagaaacatggggggggtagcctggtatgtataacacgttcattcgttggcaatactccagcatgctccggttgtccattatcgactggtgcacatcgctgttgtcattggtatggatccatatgacccattcatgctcgtgtgtcttcaacattcgcccgatgcagaagaacaaataggtcgttcgatctttgtccaacccatatgacatccgttctgtattccgaggaggaggagctgcacatggaaatacaaaggattgtgtaagaaaatgggattacgaacactctcaaggtacaatacacttgaaggaacataaatgaaatgtattgtgtacggctcaggtacccaaaatacaaggtgtcccaattcaaacgtccctctacagtcggcagaacagtaaaatgaaccgtcccgaaaagaaatgttgatttaatctcacattcagattcaaagattacctgaggttactttattgtacatttccagtaacttcttgctgagatcatcattggaaggaatcatgtccccatcgcatggcaatggcctagccgacgcgtcttctggagaagttccattgactcggtcggactgagtgctcctcgataagcaccggagactctcagatgacttctcaaaagattctcgtgattcagaaggtacatccatccatcgatctcgtgattcagaaggtacatccatccatccatcagaaggtacatccatcaatccatcagaaggtacatccatccatcgatctcgtgattcagaaggtacatcaccattgttttccattccatccataaacggagaacgactcttgtgtctggggagttccacttgtcactgaattttgtagtagatacaaggatacaatcaatgctgggaaaattttagtatcagttgacgaatgtgggtttagtgagcgtctcaagccacattatgggtattcccctgtaggaaaacctgttatcgttaaaactactggtgggtgggtacaccatagtttgttgatggcagttttttcagatggtaggaaggagttcgttgtgaagaaaggatctgtgaagaagacggacttcgctgcatttattgactcattgagtttgtgcaataattcagtagtaataatggacaacgccagtatccataagaacttggtcctcagaagccccgtaaatatttgttacactcctccttacagtccagaattcaatgctattgagctgtgcttcgctaaggtgaagaaggactttcgtcgattgaactatataccaaacgatacaaagacgcacgtgtctgatatgatttccttagcattcagcaacctcactgataaagtcattatgggttgttttgaccacgtatggaacacgtatgtgatgtttgtataaagagttctgtgatgtacaaattatgtaagatggcaacgaaacctccgacagtcgcgaaattgaaggagctactaaaattggccgaagtagcatactcctcaaaggacaagaaggacgatattgtccgtttatgcgaagacaatggtctcatcgccagaccccctccagagtacaagacggtggaaaagatgtgcgtcgtgaaatgcgccctgaagaaggcaatgagtcttgacgatgaagaattcggtaagttcagggggcatgtggatcagctcgtcaatgtggtgagccgcatgttacggcgttccagtctggtgctgactttccatgtcacgaggctcatggagggcgacctgccgattcctaatatgtacgatatgaaggatacctactggaaggattggctaaggatcggagttgacggcgtctttccagatgaagagagtagaatatcatacgaagctgtgaaagacgtaatcggaaaggtgcttggtagcgatgaccctgactacatcaactcctaccttatctatttcgaccaggttttgaactatgccggtcacacattgagcactgtcgtgtcgaacaacgcatgggttcctttggtacctcgtttgacccgcctcactaaggctactttgaaggcactgggagctccgaagaccatccgtgtgtacgacgtgatgagggtcatccaacaagaaatacaggagatggaatcttggccagagtctgttcaggagtacgttcgtgaagttcgagtcaggctgaaagttccagatggaagtcgactttatgatgactatggcaaagacatggacttcccgaccatggtccggttcaattattggatgcagacacggttggaggctattggtgaacgtcgtatccggttgatgcccatcgttaatgtccaacgggcgcatgtccgccttgacatgaagaccctcgtgaacctgttcaggcacgtgttccccaaagacccaaacatcgtcgagctttcaaagtgggaaaatataaaggatcccgaccgcttcatgttgcctctgaagcctgcagttaagaagaaaaaatcatgtggtcctggtgaatgggaggcatacaagttggcccaacagaagtacgatgctgacgttaaggatatcaaggctactgacgagtacagacatgcaaagggtaggtatgacacgctcgtgaacgcccgaaaaacagtcgcaggttccttctgcaagaaaccacctgtcaagacggggtgggtgttcgattgtagcatctgtactgactgattctcattgagcatgcagtacagcaagacagtacaggtttgcgtatccgatctgaagaagacaagtaagaggtctcgtgacgaggaaggtatgagcgtctcagaacagtatgaccataaactcaaaacgacattgcccgatatgggtatcgtcgttctgggtgtggatcctggtaggagcaacatcgctacagtcacgtatctggcagacgacaaaagcaagacatggaagcttacacgcggagctttttaccacaagtctggtatcaagaaacagaaaaaacagcaagaaaaacgtttctcagacatgattcctagatgggagtctctgcgtgaaaatggagcagcgttgagtacatccaggaaggatgatatctcggcttacttgaaaaattacgctacgttttccgacgagtggtggaggatggcactccgtcgcagagaatcccgagacaactttcagaggtacattggcaagcgcaaggctatggactcattttgggcagggatcaagcgcaacatgaagttggatcatcctgacctgaaggttcgcgtagcatatggttctgcaatcacgaagctgaaggctaccggaccaggagaagtagctgtgcctacgggatctatgttcgcttcctgcaagcgcctcttcaaagaggaggttcatgtgacagatgagttcaagacgactctcatttcttgggaaacaggtgccaagaaggaatgtgtttacaagattccaagtgtccaaataaccacggaaggtcagattcgtctaggttacgagttgttggggcacaccccattgaaggagactccaaaggtctcttatcgcgaccagttggcggtgagggtgtactgcacacgtaaaaaatccaagaaaaacacaggaggggtggcttagccccctctcttgtcgacaacaaatcgatcaagcggtaccctgaggtacgaggactgcgattctctccagaaaccagcacttattcggaccgggaccgctcctctgctctcacaatcgcaaggctgcactgcatggaactgttgggtcaagggagaccgcttacattttgcagggatgcgtgttgttgatgggctacaaaaaaacatgatggtgttccactgcaatgtgggttgctacaccataaggttataccataaggtgtaccgtacactccagaaagcggtttcattttagtattccgtcgagtgtagctggatgatgcaatgggcgttcctgcctcccggcggattttgactggttgcgaaacatggtatggagcggaattgtgattcctctgtcgttccggaggctctaaattctgagtagaaatctcaaaaaatccgccgggaggttttttttcattcaaagccaatataaaacataacaaaatggatattagtattgacttcgtgtgcaacggtaagaaatcattgcaacctttgatgtgggatatgcttgcggccgggggtaatgaatcttgcaaggagcttttaaacaccttccgagtagcttatgctaccggtctgatcgattacatccgccagatgtgtggggatgatgtttgcaacccgaaacaggtcgggactgtaaacgtcaactactcttctgacatcgacgtgaatctgaacttcaatggggaaattctgcataatgatttggatcgcatcgtattaattttcaaatcaatcaacgattaccattatcaacgcttcaaacgtaatttcaccgacatgtttgacatcaacatttacggatctcatttcggcatgctcaacaaccccaagagcgcgaaaagtaaggaagagtttgaccttatttctaatgatccgcaacaacgtctctttgccatgggtaagttggcaatcatgtgcaaatggagcgatagagaagacatgttgaaggccagagatttcattaagaagcagccgacatacaacagtaataacaatgagaagttgtacacatcttatctgaaaaagtatttcgcaattgatagaaataatacgacgactactacgtcgtgaaccggggctgtatccggtatagtgaaggtgggtcatattttctcgatgacgaagctccttgagaacgatgtttactggtccgttggtgcgtttctccacattgtttcaggaaggaaggatcttccagagagcatgtacgtggactcgatgttggacaacacggggttcattgtttccaatttgcgtaaaaagcacgtttgcaaaaaagaggtttctccgtacaccactgtgctccgggttgctaagtacatggagagggtcctggatgcttacatgttgtgtcgacatgtcaaatcagaagcccacttacagaaattattgaccatgtgctctaagttgaacattgagaggaagagaaacgtgattgacgatgaaacgattaataatgtagatacgttcgtttcattgttgggacttaagatgtcgaatcggatatcgtttttgaagtttgaaaagaaaattgtggagtttgtcttcgatctggtggacaatttacactagtttttatgaaaataaatgtttacactcgttttttgaggaacggacggcggatcatgccgagtcacacggcgaccatgcagtgaagtgcatcggcagttaaaacagatgtcaagcaaggtctacttattttcggaaaggaaacctgttctgagcaaacacgacggttccgcaggcgaccgtcccagacaccaaggccgcaatggccacgatcgatagcacgagcggggccatggcaagttgctgttgctgttgctgttgctgttgctgttgctgttgctgttgctgttgctgttgttgttgttgttgttgttgctgttgttgttgatgttgttgttgttgttgctgttgctgttgacttggttgagaattctctggacaagcggctcctccgccagggagccatgagttgttcaggctccggaggccccaatagtaatatgggtcaacgtagctcaacgcggaacgcggaaggtggtatcggtcgtcgtacacgcttggatacgagtagcgtatgttctccgtgtgcgtgtggtgcgtgttccctcctcccccccaaccgccgttgccgctgcctccaccaccaccattgttgtttgtgttgttgttggtcacggtgatgttactgggctgtggtggggggggggggctcggaagcgggcggaggaggctcggaagcgggcggaggaggctcggaagcgggcggaggaggctcggaagcaggcggaggaggctcggaggtgggtagaggaacatctccttctgcaaattgctctctgatgtactgtgaggaaacgttactgcagttattggtgatcagggtaatcactgacgccaacactacaagaataatgatgattgctaccaaccaaagccagatgccagggacgcccttggacgaggttcgcgctcgcgaagtgaccatattgtatgtatgtatacagttgttctcaaataattttgggacactctgatatcccctgaaaccagatacagatccttgcttcactacgaatattttttgaggcttttacgttccacgatatccaataatccagtccgtgtcgtctgcgtgttgatggattttataaaatcgtattgttgtagacaccaccgcacagagacgtttcatttatatattatgttgagtgtaaatggatatcatccctcgaatgcaacacccgcgtgggaggacaaggcaacgtccagagttcaaactcagagaagagcttataaaccgcaataggggcaaacacatttggaaatgtggtctactagaaatgtcagaattacaaccataccgatgcatgaaatgcaacctgacaatggaagagctgcaggaacttggcaacactggagtttgctcctcggaaattgactttacaggcaccgtgattgccgaggatggccgactgttattggatttaggcacatccatcgtcatccgtgattggatggggtagagcgtttattttttcgcagcatcgtggcgagcggccaagaaatttgttggccgctctctacgatgcggtttgctggtccctgaactctttcttgaggtaaaaaactctcttccgaattcgaatgtgcttctttatcttcatcatctcttttgaatcagtttgacaagggtcggatgcctgtccctgaccaagcatggaggattcctcattctctggtgtacgtaccattgttttgcggacgcctgtgtctatggatgcattttatctaccgccccattttttttattactattattatattcaaaaacgtacacaatgcaacctaagcaacaacaaactaagcaacaacaaactaagcaacaacaacataagcaaattggctcaggtatgttctcaaccgctgtgaccccaaagatggtgcagaaggaactcgcaaagatccccccaggcgacctcatcaaccgcatgaacatcatcaacacaaaccaacacatcaagaagacctcaaccctagaagagcaggatgcaatcacaaagctcgtgcagatcatcgagacagctacgaagcagaaggaggatttcgataaggccacacgcgacttctataccgtctacgataagctcaagattgcaatcatggaaacgtgcgacaccggccccaggttgtgcggcgtcgttaacagcgcactcaataccccgaagaggaactcgtaaatttcccgacaataaaaaaacacacaaaatgtagacgcgacgcaaaaatacactatgcactacactcccgacgccgcagccgcacccatcatggacgcattcttcaaggaacgcgagaaacacttcgctacacaacatcacatcgactcgttcgatgacctactaggaacgcgtctaagagcgatcgtacgcagcatgaacccaatcacaatggtgcgcgaagaccccaacacgaaaaccaaacacacggtgaaggtgtacgtaggaggagacgaaaaactccgccccgatcacgacgtgcacataggagacccaaccccgactctaccatcacaagcccgggtagcaaaccaaacgtacggggcggacatcttcgcagacgtccacgtggtctatccggacgacaacgacgagacacgagactttgaacgcgtgcacatcggattcatacccatcatgatccactccaaagcgtgctctctaagagggctaaagccgcaccagttacgagcacgaggagaatgcccatacgatatgggcggatactttgtaatagacggacgcgaaaaggtcatcgtgacacaagaggaacgcgtcccgaaccgactctacacacgacgcggagagaaaatagaagacgacaaactcatcctaaaagcattcatcaggtgcgtctccacagacgcacgcgacgtgttcccacgcacaagcgtcttccgagtcatgacttcgggtgaaatcacagccacggtcacccacatcaacgaaggagccgtgcccgtcacaactctcttccgagcacttggcatcgaaagcgatcgcgccatcctcaaaaccatcttccacgaagatccaggagaagagagaaacaaggtcgaaatcgcattcatgcacgcatccatagccgcaggacacaagtccggagtaagcagccagagaggagccatagatttcctcataccacgcacacgattcaagtcccaactcgacctcaaaagcgtcctcacagacgacctcttcccaaatgtaggacgcacgttcgaggccaaagcaatcgccctaggagcagtcgtgagacatctcgtaagagccgctctaggaaaagaacccatgtcggaactcgatcactacgccaacaagagactcatgtgctcaggtgcaatcacagccaatctcttcagagacgcgtacccactatcaatcgcaacaaccctgcgcacgctcaacgaagagttcctcaacggaccatggcgagtcgcaaacgatatacacacgctcgtcaacgaagccaacctgaaaaatatattccaaccaagaatcatccgagaagccctcgtacgagcactcaaaggatcgcgacgcggcgatgacaatgcacgcgtgcccgtccaagaactcagcagagtctcatatctaggatacatttcacacatgagacgagtaaacaaccccgtcgacaggaacgtcaagatagcagacacacaccgtctaaggccgtcgcactggggagtcatctgcccagtagagtcaccagacggacccaacgtaggcctcctcacgcacctagccacgcttgtcaccatatcacttgccataccagaacccgtcgtacaagaaaccataagacccaccatagacaaatacacgagacatctatcaaacagcacactatccccacaagcaaccgcggtgcactttaacgacacatggatagcgatcacagacacacccaaggacctagtcgatgcactacaaaaaatgaggacggaaggcaccagactgaacacacccggcgtcacatgggacgtgtggaggaacgacgtggcaatccgcacagatgcaggaagatgctgcaggccactaagaagagtacaagaaggaaaggtcgtaccaatcaacggcgatccgtcgtggaccgaattgatacgcagcggagcgatcgaaatgatagacgtcgaagaagtagctacatgtctagtggcaatgaacgaggcagacgtcaacaatcgagacccgatcccaggcagatacacgcacgcagagatacacgcaggaagcacactctcaatggtgagcaacaccttcccactacttaaccacaacaacggggcgtacaactcactatgtctagcgcaatttaaacaagcgctaggaacgaccatgacctccatcagggaccggttcgatacaaacacattcctactacaccacgcccaacgccctctggtaagcacgagcttcgcagaccgactcttcggaggacgtttcgcgcacggcgagaacgtcgtagtagcaatcgccacatacacaggatacaaccaagatgacgccatcatcatcaatctagacgccgtgtagcgcggccgactagaactcacagtattcgaaaccatccggtacgaggagtcagaggaggaaccagaggacccaaacattcaaaaaacaaaaaaacaaattgtgtttgcgaacccacagcggctagtgtcacgcgggtacgccctatcaaccaccaccaaaacaaccacaaaagaatacaaaaacctcgacgaacatggaatgccaaagatcaacaaaatgctaagagaaggagacgcagttgtaggaatggtcaaggtaccatcgaccgcagcaaaggaagacgtcttcacggacgcatctcaacgtctacaatccagagaatccgaccttcccacgtatgtagacggcgtccacttgcaaaacatagatcagaacacagcaaaagacaacgcactaccacaacttagagcatgcaaagtacgtctccgccagatgcgcagccccgaactcggagacaaactaagctcgcgttacggccagaaaggggtggtgggaatgattatacccgccgtggacatgccgttctgcgcagaggacggtatcgtacccgacatcatcatcaaccccaatgcattccccaaccgtaggacagtctcgcatatactggaagccgtgctagcgcgcgagggagcagtcaaaggagctcgcatgaacgccgacacattcggaggcgaagacatcggagccgcgctgacccaactgggtctgcgtgaaaacggacacgggaacatgctcatgcacaacggacgatccggagaagaggcgaaaacacgcatctttgtaggcgtgaattactacggtcgcttgaaacacatggtagaggacaagtaccagtcgcgtgcacgaggaacagtcgacgccacaacacgtcagccaacgaagtccaagggacagagcggagggctgcgcatcggagagatggagcagaacgcactcgtcgcacacggcctcgcatcgttcacacgcgaagcgttcatgcagcgcagcgatcaccactcaactaaggtcaatgccacgtcaggaacgccggcggaatggtgggccgcagcacgcgaagacccagaaggacccgacgaggaggcaactgttgaaacaccttacacgttcaccctcatgcagcacgaactcagagcattgggggtggaggcagcgcttctcacatccactgatgaattttatttatagctcagtggcgttgggttgtttgattttttccgtgtaaaattcgtacgaatcaatgtcgagcagttgcaacgccttgtcgatcaaattttcccgcatgctatctggaagctccagacacgaggacgggttgcaccaacagatgtttacgaacaaccgcccgctctacgggacgtcttctgcactcctcgataagcgtgcacagtcgctcgaactcttcgtagtccaagaatgtagtgtgacatgaagcaaataggaacgccgttacaacatgccaacgcggcttccgttttgcttgccagatagcggtataaagaattttccaatttattcgataacaacaacaactgcgaagaccataagaccatcaggagtatcgggagagatatggcgtctgcaaaccccgcttggacggatgccaacgtcgtctcagcccgcgaggcattttgcaatcgcaaggcgtttgtttccgggtggtcaaactacgaagacgtcaagctcgtggcgtctctcaaaaacgcaaagtcgcttgcgcaggtcaacgagctggagtgtacttacatctcgtacatgcaagcattggagcccttccaacccaagcgttcagaggtggatgagcagaaggaatagctcatggagagcattagcgataaggcgggatcactgatgaattggtatatgaaggaattgatagacagcatgcctgatgcaaaatatgtgcccatgatgtacgtggtgccccagtcaggcacatactgggtcaagggcgtgccgtttgctcgcgaacaggcgggccgcgcccgcaccaacatgtactttaatggggcgaccgttgttgtatttgttgccgttgttgctgcatttatctacaaaaagtgctgtcaaattaagtacgaaatgaattggtgatccgtgaaccagtcgattctgaattgggccatttgtaaatggtgcggaaaagaaaacggtaatttacgttgaatctaacatagttttcttttctcaaggaattcagcgatatcagagggggtcttcggttgctcaatgccttcgagagttttttctgacaatagtttaacggcaatgtccggagtagtgttgatacttgtattcaacagacagaagtttgtcgaacccttatcaagcgggtgaattacaatcgagaatttagattggagctgagataagaatatgtccgcaatttcagagttgaatctgaaagatttattcgtacctgattccatcccaatgttgactcggcggttccgtgagaatgcatttttgttttggtcatgtccgccaagtctcttgtagagagtggagtcgggattcccggtggttaatctccgcgtcgggataaaccatgcatctgccttatctatactcctcagggtgacgtacatgataatgtacaccacaatcgtcttgatccacattccataaggagcaggaggagcaggaggagcaggaggagcaggaggagtgtaagcaataatagaacgtactaacgaggcttaactaatgcaatcaaccttgatgctggggatgagcccagtgttaatagctgtcaggataacaactgtcaacaacacctcggcaggttacttggctcgtcagctcagtaaggacatcctgccttgtgttacaaggtacccggccctagctgccctctggtcctatccacggatccaaagggcctgtcgttgcaaggcaacagtctagggttcgtacagttcagtcgggtctaaggtatccg

SEQ ID NO: 187 - DNA, 21620 bp, unidentified
  misc_feature 1..21620: note = Fanzor polypeptide
  source 1..21620: mol_type = other DNA
actcggcgaatgtagtgttacaaggaaatgacctgtaggagagaatgtcttgtaccatggaaaataggaaagaaccatcgtcaaatcccctcgcctcgaatacttggtctatacaattaagttctggtaactgcatgtttttgaacacacaaatcatgtcatggctagacaacctcaatattacaccgagagacacaatggatcctgaagaagaccctacgaaggtgtctatctgatttttgattcccgcctcttcaaaatacttgatgcatccgatttgcaaccctcctaggaacccgacgcccccgaatgtgagacatcgaacttgagtaagatcaatcatgattgttacacttggaccagactctttgtgaacgcaacagacgcattaaatcacacgacaccgtagacgttcttaaaagtacgatcatgaagacatgtcgtactcctcgggttcgagaaattccgacatctccacacgaccgatcttcttacgcgtgagcctcttcttggcaaggtgaaacttgcttgtggtcattcttcgagtgacggtctgcaacattgatgcaacttgaggtgcctcatccaagcgtgaatcattagacacatctgtatccacaacaatggacggagtatcgacagactttgaatcaactacaccatcatcctcgacatcgacatcttcctcgacatcgacatcttcctcgacatcaacatcaacatcgacatcgacatcaacatcaacatcaacatcatcatcgtcgacatcatcatcttcctcgacatcgacatcgacatcgacatcgacatcgacatcgacatcgacatcgacatcgacatcgacatcgacatcgacatcgacatcgtcatcgagatcatcagaggcagggttcatagcacaggaagtgttcagcgaggtcccggagatgcggcacctcgtctcactccccagagactttgagatcgatgacgacaacacgcttagcaatgcgccggtcgggtcagtgggtctgaactatgtgggcattatcgcgtacctagtgagcgcgatgcaggaacaagcaaaaaagatcgaggacctccaggcgaggacctcacgcggcgttgttgtccccggacgtgagtctcgcgagattggaaagcgatcgacttgaggggctcaagcagctgaatgtgggatgaatgctcttgggcgttcattcggggcggaaaaaagtgtactgtaccttagatatcatggtagagcacttgaaaacagtaggtgagaggatcgaacacctaataaatgagatggtttctttgtacgaagagacaggagtggagtatttcaaagcccaggcatcagcatggtcccaatgggtgtggatgttacaggatagcaagcgccgagagtggcagattacatgccctggggatgctcagggtgtgtggcattcactaaagggttgcaacagttgactcgtttgctttccgaaaataagtaaacataatagtgtataaggaagttgcatgtactaaatatcagaatgccatgtatggcaaccaaagcttctgtaaaattggcaaggtctccgatgcccttggtgtctccaggaccgtcctccgtcgatgggcggataatggcacgatcagaacgatccggactccaggcaaccaacgtctctttgacccaagcagcatccaaggctacctcatcgagcaggaaaaaaaacccagcagtcgtcaagtcattctctacgcacgtgtgtcctcacacacacaacaaggcgcttggagttgagccctgatccgacgtccttgacttcaatgacttgctcgcatccggaatgtttgtcagaaatatggttttgcaagaacaattgctgtctgagcaggttgggttgttgtttgtgtgaggacacacgtgcgtagagaatgacttgacgactgctggtttttttttcctgctcgatgaggtagccttggatgctgcttgggtcaaagagacattggttgcctggagtccggatcgttctgatcgtgccattatccgcccatcgacggaggacggtcctggagacaccaagggcatcggaggccttgccaattttacagaagctttggttgccatacatggcattctgatatttagtacatgcaacttccttatacactattatgtttacttattttcggaaagcaaacgagtcaactgttgcttccttttgggctttgtgaatttcgcgtggccacaacgtacatccgatcgtcgtcaaattgaaactgtaccgtcccataatatttgaatcatgtacctcaccctcctcgtattcggatccggggagaatgactctgcacaatttggggaactcgagatccccgttgggacatgatacacgaggtccgaaccgtaattgtgacacaccctatccccatccatcagtcagctgccccttaacgtaattcaacaacttgacatcaataacatccatcctcgagggcctccattcgtccggaactttgtttttcccaaaagaaaacagacctcctcctcctcctcctcgttggtgtttcttcgaaaagtcttcgaaaagctcaagacgatctcgacgaacatgaacccgttcgcgacaggttttaaacgggcgtgcttgaaatcgaccggccacatacccatcgagttcagcagagggacctcttcgatcagatgctcgaaaccgaacgatttccatcgtttttttatggacgcgatcgcttctcgcgggacgggtgtgggtgtggacaatcccaggttgacgtcgggacggtgacattgcacgtcgtccaacacggcggggaaagtcagcgtaatcattggcgcacacgatcagaatctaaaatacgaagatgttaaaaaatcactgacatgttgtcgcgttcctcttctgcactcgaaggttgcaacaaaaagtccggtccgacttttctgagaaaaatcatttcggagaaaaaaacatttcggagagcatgacaaataatgaatgggacgcttcgctgaaattttcgccgtgttcatcatcgtgatcatcattgtagggtacctccgcggattctacagcgaggtcgtgttcgtgagctcggacgtcaacggtcgcgaatacctgatgcgtcggctgcccgaccgccagaacgcggcgaacctcaaggcgcgcatcaactcgaatcttaacaagctggttcagcatctcgtggccaagtacccgaaaaacccggtcgtgcgccagcggtacgataactacaacccagacgctctctcggagggcggggcggaacttgggtacacatcgtactctgtaaacaagggtgagaagatcgtattgtgtctgcgtcagcgtgaccacgagctagtggaggagaacatccttatgtatgtcgcgatccacgagctgggtcacctcgcgacggacgaggtgggacacacgcccaagttctggtcgaacttcaagtggatcctgggcgaggcgatgtctatcgggctctacaccaaggtcgactttgacaacgagccacaaaagtattgcgggatcaacatcacctcatccatcgtttgatggtttacagcgttcttgtctacaaaaaatatacaccgaaaaataatgagtcatccggggtacgcgcatgcaacgtacacggtcctgtgtgtcgccttcctgatcgcgtggatttccagttacatattgaagtcgaccaccagcagcagcgacgagtcgaccttggagaacgtagggaccatgtacgccggtttaaggaatgaccttgtgttctcgatgatagagcctctcataatgttagcgatcggggcgaccgttctggcagtactgcacgcgtttgtcctcccaacgatcgtaggaaacgataacgaggccatgttgttctgcggtctgaatctcatgtacccgcatttcaagttgtgcctctcgcacttcattggcaagatctatgatgcttttatgctcttggggatggggtgcgtgcccatactaatgtacacagtcccaatggataagtttatcatctgcattctctggagcagcctcttcatcgtcattgcgtctttcgcgagtagctgatggaccggtcgttgaagagccagttcgcaaaggcgccctggtcgttgggggcggcgacagtgtaaaactgacggaagccggaattacgtttgaacacatcgtgtggctcctgccatttatcgccgtggaagagtttgtcaactcgctttcggaccgacggacgcgtgatgtcgcaagggggacgcgtccctcccaccagcactgtgcccatgtcaccgattgcaggattcatgaacgggttctctttcgtgggcgcgcgacagagcctcgccgtctcggggtcacgttcgagaccctcgttgcgcatcatctcgatcgtgttcgttcgctggccaacgtcaaaacggtggaccgcggcggtcagcgcacctgtcaaaacaggaattagcagcgccttgggggaggcacagaaaatgcacacggcgatgccgtagtatatggagaatctgaacagtgcgttcagctgctctgtgaggagtatccctggaaggggtacgaaactgtagagtgcttccgttgtgcccatgaaactgcgtaggtcatcgtgccatatggttgtggctgccgccgcattgtcgttcatgttgatatagcaactaaactgctttacatgtacttgacaaaattacttggggaccccatacttgacggggcagctcgggaactgcttggcgatggccatggcgacactggcggtgctcttgggtgtatggagagcctcgtcaagtacgacatttagtgtatcggtttcggtttggcttacctcgacggtcgagacgcctggaatggcccttaccatgtccatcttctcctccgtcagcacatttgcgtcgcacaatgtaattgagatagtgatggtcattttcagttcatacaattgttttcaaaataaaatgggattgtttttaatcagtagtgagtgtacgcggcgcctcctccatgacgacggtaccgcatccccattcccaactttacgaatgtctctagaatgaatataagcatgacgcctgctagcacaaacattgcgagctccgtcaacgcttgtctaggcttcggggacgtgtccatttgtggatgaaagaatccttcgactgggtttttactgcttttaggcaggcgagcggatgcaatttttgttattgtgggggtggtgggcggctcattgtatgaatctgaatcgttggcatcgtcattaggatgatcatccgattcggagtcaggatcattgtcgtattcggtattattgtatttaggatgctcttcaatcttttcttcttcggcatgagattttcgatactctgtgtctcgttggtaaatgtccatgatgtcgtcgaatgaggaattgaacccctgtgtgtacatgtcgcacaacggactagggttcttgtcaaagacgcacgcgtacgacggcgtctttgatttcgcaattgattcccccccctcatccttttccttcttcttccggaagctgctcgtcgtcttctttgttttttagtttttggttcccggagctcgcttgtccgtgaagacacggtcgtggttgttccaaacctcgttcaatggggctccagtcaatatgtacgcggacatatatgcttggtgaatggctggctattacatgttgaaacataacactttttttgacacgcgataaacagatctccatgcgcactttttgacaaaaatattgtggtttgaagaaaagaacacatccgcatggaggctgcgcttctccttatcgtcgcaggcgcagggtacatgctttcaaagcgacgcaacgaaccgggaagggtgccgctagctgtctccccgatgacatcatacacgataaagaagagacccggcacattccgcaaatcatcatcatcatcaatgcctatctcgtttgacgcgtctgacgcggaggctcgtgaccgaccatccgttcacgacccgtaccactgcacacgcgtgcaagatgtctacgcacacaaaaaggagctcctcatgcagaacacattcaggtcctcaatgactggcgaccgcatgccagcgacgcacggcaacatggtccctttcttcagagggagtgagcctccaggatcggcgtccgtctccacaaaccgaggacacgagatggagaacttcgtgggcgagaaaggctcccaagacttcacatcactaagcggtggaaagcaagaaattcggcaactcttcagccctacagaggcgagagtggacgtcctgcgtccgcctgtaggcgttgggggatccgagtaccgcgacgtcgtgcaattgccacgcaatcgcgctaacgaactccctttcgaacaggttcgtgttcaaccgatcccggaggaagagatgcgcgaaatggggggtctgcgcgcgctaacagtggacgacatgcgtcctctcacgcgtcccaaacagagcttgcctggatagcttatccccgggtcgtccacatctactgctacggaccgacctaagcaccaacccatcaacactcagacgcgcccccctcctctcatccgcgagcagaagaccaccgacgactttatgcgcaccggtggagcggccgggtctcagcccgggtacgacaagatccgcattgtcgaccggcacaccgagcgtgaaacgatgcgttccgccgacctgtacaagggtgcagctgcccctgtgggcgtgcaccggatggaggaccgaggagggtcccaacgggacctcatctttcgaacccccctgggtgagatgtcgcgagggcctgccacgacgacggtcaagagcgtcactgactacggtcgaagcggtatgtcggcccttggcaacgcgcgaatggagaccgggtctcgcacgcgccctggaactctcactacggccgtcaaggcgttggtcgcgcctttgcaggatgtgctgcgcacgacgcgtaaggaggagtacctcgattcggcgcctgtggtgaaccttgtaggatctcacggcgtttccaagctcacggtgtacgactcgcaggatgtcgcgcaaacgacgctcaaggatgttctccttgattcggcgcctgtgttgaaccttgtaggatctcaaggcgttcccaagctcacggtgtacgactcgcaggatgtcacgcaaacgacgctcaaggatgttctcctcgattcggcgcctgtattgaaccttgtagggcctcacggcgttcccaagctcacggtgtacgactcgcaggatgtcacgcgaacgacgcgcaaggaggtgggtatccacgacggacatcagactggcaactttgcgggcggctctgtgtcacgccgcggtcctgtggtggatcctgattctggagcgcgccacacgcttcgcgaggcgaccgctgtcaaccctgacggtcaccaacgcaatttgtatgcgaagaacgttggtggcgttgtttactctgctgatgacgcggcgcccgatgcaactcgtaaggacgttgcggtgggtcaggatcgtggtggtggcttgccaacgatgacacctggacgcggagctaacagtgtttcagtgttggaccctcctcgagcgactatgcgtgagacggcgactgatacgggaacacggttcggtgtgtctcggcttgcagagagttctggtgtgtacgttgtggccaagcccgacagtttagaggcgacgatgcgcagcacgacgactgacgggtctgagtactatggtacttctgagtctgctgtgaccggaccggtttcgcatgccgacgtcggttcggtggagcccgcactgtctcgtgaggcgcttgtgatgactgggcgtgaatttctggttgacaggagggggtgtgacgctccggctggggcgcggttcggtgccggcgtagctgagatggttgttgttggcgacgaacgtggcggggaccctgctttgcgtgacggtgggtggcagagtaggtacttgaattctagtgtagctgggggcggtgacatgttgttgccttacaacactgtcgagcctgatcctgagccgcggtacacggtggaccgtttgatgggtgacatagagggcagacgtgcacaacaagaccaccaacaataaaaaatatcatatgtatgaagtttgtattgtgtttgctgttgttgtagcagttaatgggcgttccagcctccccggtcgatttttactggttgcgaaacatggtctggagcggaattgtgattcctcagtgctgatatctcaggctcaataacttgttataacaaaaattgaatgcgtgtggcaaacttattaaagtgcacacaacagcacaacagctctatctctcacaaatggcacgtattaagcaaaccgctcgtaagtccacatgtagcaagtctcccagaaagcagctagccataaaggcgtctaagtatgcttcaaaagtacctgccacaggtggcgtgaagaaacctcaccggtaccgccccggcaccgtcgccctgcgcgagatccgcaagtaccagaagtctacggaccttctgattagaaagttgcctttccagaggctggtgcgagagatcgcacaggacttcaagaccgaccttaggttccagtcttcggctgtccttgccctccaggaggcctcagaggcctacctgattggcctctttgaggactgcaacttggcggctatccacgctaagagagtgacaataatgcccaaagatattaagctagcaagaagaatccgaggagaacgtgcctaagttaattagttgttgtgtacatttttttgaattcgtttgcatggagaagtcacaattttgtaatgcaatagagattgaattcgtgtgggaaacccatacagttgttctcaaataattgttggacactatcccctgaaaccagatacaggtccgtggatcatcgaccttacccaagatcgtatctgatttaatcaatgatctggtttaccataaacgtcataccggtttaactctggtttaactctggttttgaaaacagtaggtgagaggatcgaacatctacagtcggcggaacagtaaaatgaaacatatatcagatggaaataaatgtacgacattgccgttagaaaattggcgttaagaatggtcgctgacttgggtgtgttaaaaacttctgtgtttacgaacatcagtcgttctactctgtggaggtggaaacgctttggtgtaaatcgaaaacgacgtgaatttggaagcaaactttttgagacgaacaaagatttgttgaaattgtttttattgtcaactcaatgcacaaccgcaagaggtgttgttgcatttttcaaaagtactcacaatttacgattatcaactaaaacagtgtatcatttcataaaacacattggctttacaagaaaaaggagcaaactccgtggacagtgtaaaggggacttagttccacctgtcactgaattttgtagtagatacaaggatacaatcaatgctgggaaaattttagtatcagttgacgaatgtgggtttagtgagcgtctcaagccacattatgggtattcccctgtaggaaaacctgttatcgttaaaactactggtgggtgggtacaccatagtttgttgatggcagttttttcagatggtaggaaggagttcgttgttaagaaaggatctgtgaagaagatggacttcgctgcatttattgactcattgagtttgtgcaataattcagtagtaataatggacaacgccagtatccataagaacttggtcctcagaagccccgtcaatatttgttacactcctccttacagtccagaattcaatgctattgagctgtgcttcgctaaggtgaagaaggactttcgtcgattgaactatataccaaacgatacaaagacgcacgtgtctgatgtgatttccttagcattcagcaacctcactgataaaatcattatgggttgttttgaccacatatggaacacgtatgtgatgtttgtataaagagttctgtgatgtacaaattatgtaagatggcaacgaaacctccgacagtcgcgaaattgaaggagctactaaaattggccgaagtagcatactcctcaaaggacaagaaggacaatattgtccgtttatgcgaagacaatggtctcatcgccagaccccctccagagtacaagacggtggaaaagatgtgcgtcgtgaaatgcgccctgaagaaggcaatgagtcttgacgatgaagaattcggtaagttcagggggcatgtggatcagctcgtcaatgtggtgagccgcatgttacggcgttccagtctggtgctgactttccatgtcacgaggctcatggagggcgacctgccgattcctaatatgtacgatatgaaggatacctactggaaggattggctaaggatcggagttgacggcgtctttccagatgaagagagtagaatatcatacgaagccgtgaaagacgtaatcggaaaggtgcttggtagcgatgaccctgactacatcaactcctaccctatctatttcgaccaggttttgaactatgccggtcacacattgagcactgtcgtgtcgaacaacgcatgggttcctttggtacctcgtctgacccgcctcactaaggctactttgaaggcactgggagctccgaagaccatccgtgtgtacgacgtgatgagggtcatccaacaagaaatacaggagatggaatcttggccagagtctgttcaggagtacgtccgtgaagttcgagtcaggctgaaagttccagatggaagtcgactttatgatgactatggcaaagacatggacttcccgaccatggtccggttcaattattggatgcagacacggttggaggctatgggtgcacgtcgtatccggttgatgcccatcttcaatgtccaacgggcgcatgtccgccttgacatgaagaccctcgtgaacctgttcaggaacgtgttccccaaagacccaaacatcgtcgagctttcaaagtgggaaaatgtaaaggatcccgaccgcttcatgttgcctctgaagcctgcagttaagaagaaaaaatcatgtggtcctggtaaatgggaggcatacaagttggcccaacagaagtacgatgctgacgttaaggatatcaaggctactgacgagtacatacatgcaaagggtaggtatgacacgctcgtgaacgcccgaaaaacagtcgcaggttccttcttcaagaaaccacctgtcaagacggggtgggtgttcgattgtagcatctgtactgacggagtctcattgagcatgcagtacagcaagacagtacaggttcgtgtgtccgatctgaagaagaccagtaagaggtctcgtgacgaggaaggtatgagcgtcgcagaacagtatgaccataaactcaaaacgacatttcccgatatgggtatcgtcgttctgggtgtggtaggagcaacatcgctacagtcacgtatctggcagacgacaaaggcaagacatggaagcttacacgcggagctttttatcacaagtctggtatcaagaagcagaaacggcagcaggaaaaacgttttactgacatgattcctatgtgggcgtgtctgcgtgaaaatggagcagcgttgagtacatccaggatggacgacatctcggtttacttgtcaaattacgctacgttttccgatgagtggtggaggctggcactgcgtcgcagagagtcccgagacaaccttcggcggtacattggcaagcgcaaggccatggactcattttgggcagggatcaagcgcaacatgatgatggatcatcctgacctgagggttcgcgtagcatatggttctgcaatcacgaagctgaaggctaccggaccaggagaggtagctgtgcctacgggatctatgttcgcttcctgcaagcgcatcttcaaagaggaggttcgtgtgacagatgagttcaagactactctcatgtcgtgggagacaggtgccaagaaggaatgtgtttacaagattccaagtgtttctctaaacgctgaaggtcagatcagtatcggtgatgagtggttgttgtgtcacactctcttgaagaagcctcccaaggtagctgagcgcgacctgtcggcggtgagggtgtactgcacccgtaaaaaaatccaagaaaaacaccggaggggtggcttagccacctctcttgtcgatgtcaacaaatcgatcaagcgataccctgaggtacgaggactgcgattctctccagaaaccagcacttactcggaccgggaccgctcctctgctctcacaatagcaaggctgcactgcatggaactgttgggtctagggagaccgcttccattttcccggtgcaaggctgcgtgttgttgacgggctacaacaaacatgatggtgttccactgccccgtggatttctagaccataaggcacacactccggtgtggccgtacactccagaaagcggtttcatttatatgttccgtcgagtgtaatacacgagatggattctttgcatgaagcgacaggcgtggattatttcaaagcccaggcatcagcatggtccggatgggtgtggatgctacaagatagcaagcgccgagagtggaagattacattccctggggatgctcagggaatggattgattgatcatgcaaacacacgcacgcagagtgataggcgaacggaggatagagagatagagagataggatttacatcacaggatcacgcacgcacgcgcacgaaggtgataggcgacattaactagaaagccagacgacaagctgaatgaatacatacaaacaggatcgaatgacacatccatcgaccgaatgcatgcatgcaagcaagcaagcaagcacgcacacgcatgacctaacttctttggcggaatttgacaccttcgcggtcaacctgacacctctgtcagacctatctgcgtttacgcacttggacatttcggaaatcgaagagctcgaagacctgacacctctgtccggtctaacttcgttggttcacttggacatgtcgagcacctacgtgtgcgacatatcaccgttgtcctgtctaacttcattgattcacctggacatgtcgagcacctacgtgtacgacatatcacctctgtccggcctcacttccttggttcacctgaacatggcgcacaccttcttggtcaacgacatatcaccgctgtccggcctcacttcgttggttcacctcgacatttcggaaatcgaatacaggctcgaagacatatcaccgctgtccggcctcacttcgttggtccacctggacatcaattacaccgacgtgttcgacatatcacatctgtccggcctcactgcgttggttcacctgaacatgtagtacacctgcgtgaccgatatatcacctctgtccggcctcactgcgttgcttcacctgaacatggcgcacacctacttgagcgacatatcacatctgtccggcctcacttcgttgcttcacctcgacatttcgaacacacttgtggacgacatatcaccactttccggactcacttcgttgaagtacttgaaaaatggagtgtagtcatccaaatcttgccagccacgcattatttcttgtaaaagtatttgttgaaattgcagagaaacattcttgcttcaaacattccccattcaaaattgtaaaatgtaggtgaggaaggtttgtaatctatacaacgtgtccaagagctcactacatagatgggtcaatgctgatcaggtgggtaaaatcaagcgtttaaaacggaaaaggaaagaattgtccatgcttttacgttccacgatatccaataatattgcagagaaccttcataacatgcaaggatttggtaggtataatttgcaagagttgtaatgtgagattatcgatcagtacggcatcgagacacataaaacaatgtggattttctaggaagaaggcgtttcccacagttctctacggacattcaaaagaaaatgtagaaatgttctgtgacaagtacagagaaagctctaacgttgtttgtatcgacgaagcaggattttacgctggcgaacacagcaaatatggatacagcaagatcggttctagattaactacgaagacaatgagtaacctccgtcgtgtgaagttcactttattactcgctatttcatcagggaataatagattatcagttattggagcacaattgtaaaaaataggtttttattaaattctttaaaactttggtcatcccaaagaacaccacgatcgtcatggataatattcggtttcaccattcttcagaaataaaggatatatccgaatgcaaagggtggaagcttttgtacacccctccttattgacccagagctaatgcgattgaacaaatatttggaagcatgaagagagactacagggcatccagactgcagatcgttgcttttgggcaacgttggggggtgcagcaggttgaagaggttctcgaagatattccgagtagcctctttggtaaaccgttcaaccgtctgtatctggtttcaggggatatcattcaaattatactgagtgtcccaaaattatttgagaacaactgtatgcacctacgaggagcgcatgcacgccgttgttgcggtaggatgccttgcccctccacttagggtctagtagaacactctcccatgcggggatgtgatcagagaacaagtcgattctgaattggggcatttgtaaatggggcgggaaaaaaatggtgcatcgctgttaatgcaactagaccttgttcttctgctcaaacaattccaggaccgcatcaagggtcttgggttgagcaacgcttttggtagacgcttctgaaggtacatacaccagaaatgttttgtctttacgggcgagcaagtattcggaatcttgttccgaaatcgattttatcatatcatgatatttcgacttgataacctccaagaaatgatccgcaattctagagttgaaccggtaggttcccttcaagacagttgtcttaccagggctcatggcagattccataccaagtttggttctgcagtcccttgcgaaaccattatttttgttgtcatggcctccaagactcttgtagagaccggtattctgagaggtgttgggccgtaagtttaaccagataccctccatacccttgctcttcagagtgatgtacacgctgatgtaagccacaatcgacttgagccaaagagcaaacttagatgcatcagcagcaagagcagtacgggtagagggggtcgcaggagcagcatacgcagcaggagcagcatacgcagcaggagcagcatacgcaacaaaagcagcaggagcatgaggagcatcagcaggggtagagggaggcgcagtagcagcatacgcagcagaagcaacagaagtatcacaattgaatgtattcaacaaccaatccatttcgtcctcaatctccatattctcagcaggagcaggagcaggagcaggagcaggagcaggagcaggagcaggagcaggagcaggagcaggagcaggagcatcagagttaccagggaggacctggttatccgacacttgcacctcatcatggtcgcaaagaacgctttccgcttctgagggtccaacccggtatgggtttccattactgaaaaggcttctcaaacttcccaaacttcccaaacttcccaaactgagatgtaggcttccggggggtccccaactggaattggtgttaaaatcagacatcgttgtggtgaacttgagtaacttgtggtgaacttgattaactcgattttcattcaattttttttacaaaaccccaaaaacgacgtagtctttgcatgttttgggtgtttcttgttgcaaaaatatgcggtcacataatgtttccaataatgggggggggggggggggcgatacatgtatgggattcatagaattatttgcgagcggttggacgttcttttcgaactccccttgtacatttccttgtgggatgaagtggaagacgagtgagtacctgttcgtggttgtgtctacagcgtaagcgaatgtcattgttttggaccccttccacacgatttgcgtaaagtggccggtgactcctccgttacgcgaatagtaatttttaatttcttcgtcataaaatagacggaatgcctcctttatgacgtccctctccggggagggcgacgatacattgccgtacacgaacgctatgttctctcctaggtccgggtacgagctgtgcgcgagtatcggatcaaacctcagatagtctgcccattgttgcgtgaacttgctctctatgcttatggaaccgtatgtcagcgggggtgtatccacatggcgctttcgatactcgttggtaatgtcgagtgccgcctgtctcattgaaggggacgtgagggtcatgcgggcgcgtcctgctaaggaggatggtggcgaggacaatgttagtaacattcccaatattgatgtgaacacattgagtatcatcattcttttcgaatgcggtgtattgtgtttgtttgttgtacacttgatggaataataaaatacaccaaaatgcgagtgtaaaggtcttcgaacatgaacaaaatgtattatatttgagaatgaatatccttctcctgatcagcactctttcggtgtccctattgcatgttgcgacgggatccttccctggtggaagttgttcgatgcgttcgtgtgcttcctcgccatacgcaattcgttggatcaacgagtcgtcgaactcggatggaagcggtactatgtgcttcgaggtttctaaggcactcgcttgtgaggaaacgtctcccgattggtgctgcacatcgctgaagaacatggcgaacaagatcgtgatgacgtcccctatcgagtgcattcgcacggtcaccgaggttacttggaacaacgagcgtcgtggaggcggcatctattttgatttgtttgataatgatacaagaggggaattcaggattaccaacatgagatcaaacttttggaccatgttcggatcgatcttttgcgtcactgctcgtcctccttgcaatcaaattgatagcttctgtaccgatcctacaaatgataacgaccctacatgcaaggcggccttctatgatgtggacacgcacaaatgttgtccaacttgcgacgtccaaccacttgtccaatctctcgttggaacattggtcccatgcatgaacaacgatccaccatcaccggacaccaccaatggcatgcctccacacatggacaatgacgtgcctccacctccaccaatggacaatgacatgcctctacccatggacaatgacgtgcctccacctccacccatggacaatgacatgcctctacccctggacaatgacgtgcctccacctccaccaatggacaatgacatgcctctacccagggacaatgacgtgcctccacctccacctatggataatggtggtcgcaattgggagggagggtacgattactatgtcgattacaatgacatctttcccccgacgcaaaccgactacctagaaacccctgtaaatcctggaaggtttggaaacccaggaaacccaggaactccaggaaacccaggaactccaggaaacccaggaactccaggaaaccctggaagttgcagagttattgttccttcatcttgtgtgtgtagctgtgatacccccactatcgatcagtgccaagttgctgcatctgatacagctacagctaagctcaccatttcgggctgtgtctgcgagtgtcttcttcattaaatgattaaaatagtaaacaaactgactgttttacgtgaatctcgatgtaattgtgctactttctgcaatgatctccagaacatggtcttgattctgaaagtcgacaagcgatccgtcgtcgtttttgagtgtgatgccgatacgtcggatcgatgacagaggagggttacaagtctttggtgtccccatgatggtccgtatcccgctagatagacttccgcaatgctcggacgtggaagtgttcgtgggatactcgatcactgcgaatgcggtgttcacgttagcgttggggctaacaagtacttcagcgctcggctgccacatctctacaacgatgaaacgtctgaacgctagtaggccgatacggaacggggcctccagtagccagacgttagcgtccgtgtcgaaggtcgctgaccaaatcgaatcagactcgaatcctatgagccgcgccggacatgaggattcgttgccgaaccaaataccgaacgcggcatccggacttgagaacacgatccggctgtctacgtccctaaaagacgcagtgatagaatgggatcccaactgtgtattcaaagcaatagctagagctgcaccagacatgtaatcgccgctttgaagcgcaagtgttttgggagggggggtgcccaccacgataccaaagtcgctatttcgatgtcctggtaacgtgaaggctgcgttgggaagaatagctcctgcaagatgcaccgaccggatgtccctgatttccgtgtcgagagttacggcgtagtggttcggactggggtaggtcgaatggtcacgcgaccgactatcgatcaagatcttgcgttcgacacggtacggagacgacgacgcatagctgctccgatccattgtttattgcattgtatttaccacaaaagaataatcgtaaagaaacgcaacacaaatgcctgcgtcatcgcaaccactcactcctctacagtcggtggaacagtacaatgcggcaacttacattgatggtattgtaccagcggtcggtcccgactccgaaaccggtcgaaatcgaccgggcggcaggaacgccgcccatcatttgtaaaccatacagttttttctcaaataattttgggacactcagtataatttgaatgatatcccctgaaaccagatacaggtccgtggttcactacaaatattttttgaggaaggtttgtaatatatacaacgtgtccaagagctcactacatgctgatcaggtgggtacaagtaagcgtttaaaacgaaaaaggaaagaattgtccatgcttttacattccacgatatccaatttgcaagagttgtaatgtgagattacaaaccttcctcaaaaaatatttgtagtgaaccatggacctgtatctggtttcaggggatatcattcaaattatactgagtgtcccaaaattatttgagaaaaaactgtgcttagtattgtacacatcgacacatgtccctcttcaacgtcaattttgtaaaaaatcttaaattgacattcgcatgttgtcgtgatgagacagcgaaggaggtagaagaagatgtatgactcaaaaagccctcaccatctccctacaatcattcgacgacatccaacaacaacaacaatctttccatcattcccgtgtccgactcataccacatcgacaacctgtaccccctaacggaccacgtggagttctggaacatcttcgtcgtgggcaacgacaagacgtacatccttgcgaacgtgaaagacccgcacatatttctcccccaggtagaccaaatgaccaacgagcgggggaacaggattctgccccccgctctaatgaagatgttcgacaatatatggacgaagacgcatgcaggagtcaaactccagttctacatggtgtgggacggaaaactgttctttgtgaacacgtacccctttctcaacggaaatcagttggtcataggcgcgatcatgttcatgcgcgcattcgacaatgcgtacatcaaagatgcttccccctcgcaataagtactggacataatttgatttctacgtcctcctacggtttcttcatgcgccataggcggccgtcatactggtaaccgcgcatgcacaagaactcggggcgtctggctatgtcacgagaagacgcgccgccgacaacccagtcttcaggaggcacgctgttaacgtccgcatcaggacgtttgaacacgacggggtcaaacgtgtcccatcgtcgctcagccaagcggtccacgatgcgtccggactcacatacagtggttggaatggagcaaacgcgacccgtggatcgaccgtcatcaacgttacgctccatgaggtgggtgtcacagaacgtcgcaagggcgtcgtctatcgtgaacaacctcccggatcggcgaccgccgtagataccgtgaaatcgaaatagcgatgcatccccgccaccgcggcgcgtggtcatacacccctcttggtggcgctgcgcgcaaccggcgatgatcaaaggcgtcggttcgtgcgccccaatgtgcggcgcagcaacaaacgtccgaggcagcagtagtactaccgttcgcatcatcatcatcatcatcatcatcatcatcatcattccatccaggggaagggacgcaggcacccacgccgtacccgtcccacacgcgcaggttcgggaatcgcgaagtgacatcctcagggtcccgcattttatccgacgcgagagaacgcttcttctgctcaccagaccctggatcgcaacaatctccgtcactgtcactttcactttcactgtcactgtcaccgactagacactggttcctagatgtgttgttggccatatcgaagtgacgccgagtcaccaaaaggaacgtctcgtcatccgcattgtagtcgtcgtcagaattcctgttttttttgccattgttgctgggatcacattccttagtagtagtagtagcagcagcagcagcagcagttgcaccgtcgtctttctttccggtgatgtaatcgcgtatgcggctatcacaaacaatgttccgctgcctatcgcgcatacgcaggtccgtcagagtcatgtcggcaaggttgcgcttgtcagagtcgcgaagtgcctggaagcatcggtcgcttctcaaacggttggccgtgtcgtacaagggcattttgtagaaacgtacaaaaaattgtaggcgcgcagaactcccgtaaaaaaaatctatggtattattatacaaactcaataatctcacaaaatggctggaggactcatgcagctcgtcgctttcggtgcacaggatgtgtacctctcatccaacccccaggttaccttcttcaaggtcgtgcaccgcaggcacacatccttcgccatggagtccattgaacaggtcttcaacggaagcgcagacttcggacgcaaggtcaccgcaaacatctcccgaaatggagacctcatccacaaggcatacctaagggtcgagctgccagccatatccgtcccagagggaaccgcattcaggtggctcaactggatcggacacattctcatcaagaccgtcgacatcgacatcggaggacagcgcatcgatcgccactacggagactggatgcacatctggaacgagctcacccagacaccaggacatcaactaggatacgcgtccatgctaggaaacacacccgaactcacccagatatacgacaactgcttcggaacagcaggaaggggggccatgaccgtgccatccaagaccctatggatccccctggagttctggtggtgcaataaccca

SEQ ID NO: 188 - DNA, 21362 bp, unidentified
  misc_feature 1..21362: note = Fanzor polypeptide
  source 1..21362: mol_type = other DNA
gtgcacaccaccccctttcccttttctcctttcttttaacttgttccacgctgtgcagcaatagctaaattaaaacaacaactttccaatccctctcatctcacaccggttaaataactaataatgtcaactatcgtcccttttgtcgtgatcctcttcttttggataaagtatcgttgcaatcttgataatgctgatccccagacacatcacatagatccgtccctgattccatcttttttccaacacggaattagagcgtgttgttcaaatttcggagcacagtctatttttctttcccaggtcgatctccagtttgtgggtcattcagatctatggacttccccccctatcatggacacgtctgaatgcgctttgactccatattgtataggacaaaaggaacagacacaagttgtgtgcgctgaacgccttggtgggtccgaagaatcaaacattctaagcataatggagaaggatgtacacatcacccgacctggatccgttggacgcaacatcgaacttatttggctccgatacactgcgatctcttacttgatacaggaaatcaggaggcgtattcttcttcgagaacgatttttgcatgtgtgtggcgtctcgtaggccagttcgaggtgatagcagaggggtacctgcgaacactcccagaggagaaggaattcacatggtcagtcacgggacggggctagtgccctcttcatcgggcgaacgaaaccacgtttttgttccaaaacactagacgtggcacactttaaaaaacacgtgaaaatgagaaaccgttacgagggtgagggtggatatgaatgaatacggggggctctgctgtcaccaccattggtatcgacacagcgcttcgaagtgtagttatttttggaaggcaaatcgacactctttactctctcttgctttccttcaggcaaactactgtggaaaactccttccttctctccaagaatattgtattaagattttttcgggttaagacactacacaatgattttgatgcgtcatgctgcctgcagaatgaaacggatcatcccctttcctaaggatctgttttgtgtaatggcgcgcgagaaggcgatccaccttctctatcggagctttttggtgcactcctccacccgtctgtgcacacatccaggcgcgaacactcacagttccatcttataaggcggggtacggggggtatcgtgcaagccttgcatgggcaactggatataaagcagactggccaattgtacctgctcgctcacgtttgcatgctcgtctacttctcaccactgcaaggcacgatcaaacgtgcggtgttttgtccagcttaagtaacacgtcgtagcgcacaaactgaagtttggcagcgcgatttttctattcccgtgggggaggggggagctgaattgcggatgcttggtgtgggttagcgtgattgtgagggcgagatagatacatgccatggtgtgagaagccattgggccacccccgcgtatcatacacaattgtggtctcccgtggcgtttaaggttcgaaaagccagagctggttgtggcaccacggtgtttgttggggccaaagacccatggacagcaacttggtctccagcaatgtgcataacaataacgagccatcctgcggctgtgaacaacggcagccaaatttggccctggcagtgaggtgattgcagatctccattggcagcggggtgtaaaaggctctctgactgtctgtattgtcaaacgttgaagacatacggtgtggaaggatcctgctccatgcattaacatgctaaatgttcggtctctcatagttgattagatgaggacgaccgatgagggttttctattttgggctacggatgaggggtttctattgttccaggttcagtggaagctcaggtgaggttgaatgaggactcgtatcttatgtcgttcacttttttgccattccaaaatgacacagctggctgcatgattggacaaacaggattcttgtaccggcttacagttcgatgaggatcggtagtcgctcacatcaatggttttggtcgaatattttttttatcgatgttagtgttgccttttcgtctatgcatcgtttgcatacaacggattcaagggacaaggaacgcatgattaccttcatgctgcaggcgaatccaaagtttgcacaactgtggtacatgtgacaccttgcgcgtgcaaccacagccacattcacggtccccattgcctgcccttgcagcaattcatggttggtagctgctcagaacacttcgtttaagtttggtgtgtattacaaccattttacaagtgtgggggaccagttcgttatgccgccatcggccgatgttgtcctttagtgcgctaaagcaatttgtcatggcagccaacaaaaagaaagttaaatagcccattggtgatgcccccaagtcaaatgcattaagtcgtgcagaacctacccctcagtattcaacagcagcctatgcaataggggcaagggttccttgcgtgctgcccagtcgcccctgttggcatactcttttgggttaggaactccgtttggcgcaagctcgttggaatggctacctgcttgcagtgcacatgcgacagaatggtccatgcacctcgcaatgacagttctgttacggtccaaaaccgcaagctggattatattgcgcattgtagtacttcctagcagcattgcatgtcaaggattcaatacatacatgtagacccgcatatagatgatggccagctcgtgccacaacgaagcattgtctcgccaaaatgaatgaaaccacaccaattatataaaaagtttgcaaatttttttctattattctctcctcctcgcccgcgcaatggggacaaacactcggctgccactctttccaatgcagaaggattcaggcaggtgtgcgacccaacaggttggccatccacaccttctcactgcacctggccaaaacttcggcacatttcagacgcggaagctaccgaggttgcgaccactctcatcacggcggccctgttcggcacaggtgccgctatggccatccccatcaaaaaaataacgcaagtaacaaaacttccgggaaacatcatttacatcacggttgttctcatctcaaggcaaccaacctccttaaaacaactgcttgtcaatggatgagaacaaccgtaccgccttcaccaaagtggtcaagaagcacccgtttcatacttattccccacagcggagagcgacgggggcggacggaggggaagcactcaccaaaaaggatttggtagcgaggaacagaagcgcgtcacggccaccgtggagaccggagggggaggaggggagagccacaggggtcttgtaacataaacagcagacaccacacaaaaacacaaaacaccagcggggatgtagagcagaaatcgttgtgtagaagaaagaaatcgtgatagtcgggcgcggcgaaacaagcaacgccgaactccatcttgagggcatccgcagtcctgaaggcatcttcgaaaaggcaattcgaactaaaatcctgttgtaaaggacagcagccacggaggaagggagtcacccctgatggattgaacgggttttttacaaaatcggccccccccacccctctcataccaaaagcgcttgaaatgcgcatgaaaagagagtgcgagcaaaaattgacgtaagtacgtcggatgtcaggctgaggagagaacaagcagcagatcccgggtacctcagcccggcggcaggcagagtgttatcgatcgcatcatcagcttgaggggtgccgagcatcgccctggctcgatacggtctttgtttcattttgtattacaactgtttcaagatatttgatgttgcaatgcgtcatgtcaatatgctgattgtcaccggcattttataccgtttttggggatgtttcatttctactgtcccgcccgactgtggatatagagggtagcttaaattcaacggttttttttttttacaaagataacacggtatccaaacaatgagacttgaattaactggcaatggggaaaatgaaaagagagttgcgaagaaaaaattgcctgataagtaagtcggtggtaggctgaggaggcaaagcagcagatgccgcggccttgcctcggctttgcctcggcgcatcggtggttacctcagccggcgtggcaggagttcgaagaaagaaaaagaacacatcatcagctctcgatagcatcagcgagcatcatcgctacgagctcagattacacgacggtctttgtggtgtacactcctgtatggattacacaactatttatatctatttttaacgctatctatattaccgcctaataccgtttttggatgtgtcatttacgtccgatgccggaatgtagttctcaaataacgtggtggggacacagccgcataatatccagactgcatatcgttgcttttgggaaactctttgggggttttttggggtgcgaaggtgcagaaggttgagcttgaaagaggttctcgaagattattccgagtagtcctctttggttacaagccaagctccctctctctgcctgatgacgactgccggtgttgatatgttgaaacaaaggtacctccgccatcttttgttagcccccaccagatgcagacggatccgttgaacacacgcaggtgacagcgaatcggaccgtcctcaatcccagagtagtattaaacaagaacaaacaacatcccttcaggtatatccagattctgacgatcgctttcacaaaaatgcattcagtgttgcgagtttcaaagacaggtcatcggttgcaaagatgaacatgcaccgtcgaatttgttttgtaatatccaggacgctttgagagcagacatacgaattggcttgcggagttcaccaggttcactcgcgattctgagccgggatgatcgcggggaaaacgcattttaataggtggggtttgcatatgggagacgcgttttggaatcgttaaattctgatcccaagccaagaaagttaggggaagaaagttaaagaaagtaggggcactaaaaggcgaggtttggtggacttctttccattgcaattgctaagcgcagtatagattagcattcatctagcacgatcaatccccacgtctcgcgacaacatcgcggaccagagctcgtcaaaggaaggtggtgatagtctcgcgggggcggcccacttccgtcgggagagatctctgtctccttagcgggtggcggggttgggcggtctggatgggggtgtgcactcaggttgcggtggtggggacctgcacagcaagcttatagggtgctgcaatttgtggtcttggggtttccatgaatccacgaatatgatcccaatcaatctggtgtcaactcgaaagtcctcattttccgttttccatctcaggagttgccggttgtctgagaggcgcgttggccaggacagagaatcctgattctcaggcatgtcagttatgccagccaaattgtaaccgatgtctaagtcgtcatcgatatagccggctatttgtcccccattccccatgacatgccaaaatgagtcttccacagttcgaatactgaaaatgaaacctgatatcggactacgtcggcgtgtatactgaacgggggtgactgtgtacggttggtgggcatttgtttgtattgggctttatttgtaaataaagaacgcctatacctaaaaaaatggagatgttgatttttgggaaaacttgttgagtggtggttgtgtggtgtaaagtaccccatgtatcgtactcacctccttatattcaagcctggtgtgattttggcccggcatttggtcacgctcactctcagttaatccagcggacagtaaagtaaatatttccgtttgtttcgcaatacgcgtcagcggaacaggttgaaaggaaaaatagagcaaggtaatctaagcgagcctctttttacaggcgtccatgccagttccttctgcctccttcttgcttgagtcgcttttcgtttttcaaggtacaaagcatcatgactctgacccttgacggaccccacaaaacttcatgaatgttctgattattaaaaatttgacagatggaatcattcagcagcactctatgtctattattttatggtccactggtagtcgccggcgtttcctcacgcctcgcccacattccctgcgaagaaagagagtcaaccacacatgaagacgatgtgttgggactcacgatctcgtattgcaggtcgaaaatgcagaacgtctcaaacgcatcaacaccggccaccatgcagtcatgtttctctgaaaaagagcggcgtccagcggaagacagaaagtctgtgttgtataagattaattacgatgttgtgtttgttgaatgaagacgtttagcgacggtcaagacaagatctaacgaccttcattcccatctgtcggcaatcgaaggtaaacaaaggcattggacacgaaggtgaatttctcaaccggtctgtcggcccaaaggccccaaggaattgaatggaatggagccactgccaaggtctgcaggacggggatatgtatggacaaagggaggacgtcgccaattcaaggccgcattcgttcaattacagctcagaaagaagaaacacacgcccgctaaggcccggtcgctcaattacagcagaaaccactcgtaaggcctcgtctcaacaatggcagcagaaagaagaaaaccactcgctacggcgcggttctcacaattacagcataaacatcgatgtgggcctcttggtgtacggcgccaaacctggcttttgctacacttgtaacgatgtgttgtcaacacgtgcatacaaagcgaaaggatgggtctaacaatgagaatgattttgacacagcagtgcaggaaacaaggtataaaaacacttgttgtggggaccagtgtaaatgcaaggggatgaatcgcgaggactatatctatcggaatcttgcatcccaaaaaactctatcgtcttagatgagaggagcctgccttgtacaacataaactgtttcgggagttggtggtactttacagcggcggaacagtaaactgacaaaatcccactaaacggatgttacggtttaaggcccgtccccgacaagacaggaacccagctcagccctaacagagaaggtcccaccctcgccgctccagcaaaggagaagcaaagagaacacctcctttcatgacgcattgccaattcaacaaaatgatcaacgtgttcgtgtgggccacttggttaccgggggagagagtgtcgatcgcttagaagtgcaggtatggtcctttaatggacatctccgaaagtaccgacatcatcggagcaacggtccggcgtctgcaggatggaggctgtgtgactctcaaaaacgaacacgattgcgactcttctcggttaacatctcagacatttgtttgattccaccacctcgatcttggttgtccactccctgtgggttgtaacaaccttaggtttacaccgtagaaggtgatgtgccgtacacgaagcgggtttcattttagtattgtccgttggtgactgtatgctcctccattgtcaagttgtagcatccatagtggaaccgttgcaccaccaaaccatctagcttgctgctgcgctgcaaatcctttagaatttgaatgccgcagtaatcgatgacattatgaccgattattaattttcggattgtaggtgttctcacgcgcgggcgcagccttttcagcattaatggtagttgacatcgttgtatcatgcaacactcatctcaggtgtgaacaatgtgactgacatggcattctctgtccaaaagcggtccgttggtggtttgacaagctttgacgcttgatgactctgtctggcgccatgtactcggaaagccagcacgtggacggctttgcgcttcatttccttagcttctccactggggggaacactcttgctttcgatatgccacccggttgtcttaccccaccccccccccacctcgtcgcttatcttcatcctgcggcctcgcccccacccccccccccggccagcttgctgctcatggatcgcgtgggccggcgcccgctccgcatattggagcattcgaatgcagaaaaattaacaaatgcaacgaggaaagaagtatcggatggggtgacgcgttgacaaaacttcacagcccgtcatcctcacgcaaagcggcccgcggaaccactgtgtcgtccgtaccagcattacttaaaaaagtggcggaagaccccttttaccttccccccagcggatgcacggattcgccccgggggcggctaacggaggggagcccccacaaaggagtgccgcgaagggaaaaagagcgggtatctaatttctcggtgggcgatcggagtgcaacatcaaaccagcacgtgtaaccatcaaccagcagacacaacttacatcgtgaatcttctggctggcgtggcttttcactttagcgcaatctgaacccaccccccaacccgggaaacagtccgatacagccaggtctagtttactcgaaatcctggctggcgtagagatacgtgtttggcagtttttgttttattgtcaattaagagtttttaccaaacattgactttgaagtgtgcttgcgcgggccatagtgtcgatgtgtaaattactacagtcggcgggcacagtactggactgcccaagctatatcagatggaaataaatgtccggacaacatcgccgtgctttagaaatggcctgttatagaaagagttcgcgacagagggtgtgttttaaaccaactttctgtgtgatacgaacaacagtcgccctactctgttggactggatggtggaaaccgctttggtgtaggtggtaaatcgaaaacgacgtgaatttgtaagcaaacgtttttttggcgacgaaacaaaggttggttgataatgttgtcaactcaatgcaccaaccacagaggtgttgttgcatttttccaaaaagtactcacaatttacgatattcaacgaaaacagttgttgattgtcagttatgcgttcataaatgttcattggtttacagagaaaacggagcaaactcgtggacagttttgtaacgggggactgagtccctgtcatggattttgtagtagatacaaggataaaatccaatgtggggaaaattttagtatcgttgtatcagttgacgcatgtgggtttagtggcgtatcaagccacattaggcggtatttcccctgtaggcacaacctttatcttaaaactactgtggtgggtacaccctagtttgttgattggcagtttttttcaggtcagatggtaggaaaggaaggacgtgcgttctgtgaagaaggatctgttgaagaaaagacggacttcgcttgcatttattattgatcatgccagtgtggcaatttattcagtaagtaatcaatggaaaacgctagtatcataaggaactgggtctcagacgaaaaacgcccagttaaatatttgttaacatctcctacacagttctagagtcaatgctattgagccctgttctcgcttaaggtgaagaagggactttcgtcgatgaactaatataccaacgatacacattacaaagacgcacggttgtctgattatgattttccttagccttcagcaacctcactgataaaatcattatgggttgttttgaccacgtatggaacacgtatgtgatgtttgtataaagagttctgtgatgtataaattatgtaagatggcaacgaaacctccgacagtcgcgaaatttgaaggagctactaaaattggccgaagtagcatactcatcaaaggacaagaaggacgatattgtccgtttatgcgaagaccaatggtctcatcgccagaccccctccagagtacaagacggtggaaaagatgtgcgtcgtgaaatgcgccctgaagaaggcaatgagtcttgacgatggaagaattcggtaagttccagggggcatgtggatcagctcgtcaatgtggtgagccgcatgttgcggcgttccagtctggtgctgactttccatgtcacgaggctcatggagggcgacctgccgattcctaatatgtacgatatgaaggatacctactggaaggattggctaaggatcggagttgacggtgtctttccagatgaagagagtagaatatcatacgaatccgtgaaagacgtaatcggaaaggtgcttggtagcgatgaccctgactacatcaactcctaccctatctatttcgaccaggtcttgaactatgccggtcacacattgagcactgtcgtgtcgaacaacgcatgggttcctttggtacctcgtctgacccgcctcactaaggctactttgaatgcactgggagctccgaagaccatccgtgtgtacgacgtgatgagggttatccaacaagaaatacaggagatggaatcttggccagagtctgttcaggagtatgtccgtgaagttcgagtcaggctgaaagttccagatggaagtcgactttatgatgactatggcaaagacatggacttcccgaccatggtccggttcaattattggatgcagacacagttggaggctattggtgcacgtcgtatccggttgatgcccatctttaatgtccaacgggcgcatgtccgccttgacatgaagaccctcgtgaacctattcaggcacgtgttccccaaagacccaaacatcgtcgagctttcaaagtggaaaaatgtaaaggatcccgaccgcttcatgttgcctctgaagcctgcagttaagaagaaaaaatcatgtggtcctggtgaatgggaggcatacaagttggcccaacagaagtacgatgctgacgttaatgatatcaaggatactgacgagtacagacatgcaaagggtaggtatgacacgctcgtgaacgcccgaaaaacagtcgcaggttccttcttcaagaaaccacctgtcaagacggggtgggtgttcgattgtagcatctgtactgacggagtctcattgagcatgcagtacagcaagacagtacaggttcgtgtatccgatctgaagaagacaagtaagaggtcttgtgacgatgaaggtatgagcgtctcagaacagtatgaccataaactcaaaacgacattgcccgatatgggtatcgttgttctgggtgtggatcctggtaggagcaacatcgctacagtcacgtatctggcagacgacaaaagcaagacatggaagcttacacgcggagctttttaccacaagtctggtatcaagaaacagaaaaacagcaagaaaaacgtttctcagacatgattcctagatgggagtctcttcgtgaaaatggagcagcgttgagtacatccaggacggatgatatctcggcttacttgaaaaattacgctacgttttccgacgagtggtggaggatggcactccgtcgcagagaatcccgagacaaatttcagaggtacattggcaagcgcaaggctatggactcattttgggcagggatcaagcgcaacatgaagttggatcatcctgacctgagggttcgcgtagcatatggttctgcaatcacgactctgaaggctaccggaccaggagaggtagctgtgcctacgggatctatgttcgcttcctgcgagcgcctcttcaaagaggaggttcatgtgacagatgagttcaagacgactctcatgtcttgggaaaccggtgccaagaaggaatgtgtttacaaaattccaagtgtccaaataaccacggaagggcagattcgtctaggttacgagttgttgggtcacaccccattgaaggagactccaaaggtctcttatcgcgaccagttggcggtgagggtgtactgcacacgcaaacaaatccaagaaaaacacaggaggggtggcttagccccctctcttgtcgacaacaactcgatcaagcggtaccctgaggtacgaggactgcgattctctccagaaaccagcacttactcggaccgggaccgctcctctgctctcacaatcgcaaggctgcactgcatggaactgttgggtcaagggagaccgcttccattttgcagggatgcgtgttgttgatgggctacaaaaaacatgatgttgttccactgccccgtgggttgctacaccataaggttacaccataaggtgtaccgtacacaatgggcgttcctgcttccgaacggattttttattttactgaaatcttacgataaatattgtaagatcgttttcgcaaattaattggttttgcttttttggtgtattttacgaaaatatcttacaatttattttgtaagatcgttttcgcaaattgattgattttgcttttttggtgtattttacgaaaatatcttacaatttattatgtaagattgttttgttgcattccggagaaagagactattcccttcaatttcaattgtaacattgatttgctcgtttggagagagagaaagttccttcgaagtattccaatacaaaatcaattgtagaggacagtcaagaggaaggtgaaagctgtttacaaagtcttgaacgcattgctcataattatttatctcacaactcacaactcaacagttcgaaagtacaacttagtacttctgacaggctatcacgttgtagaaagagggccaatgctaacttgttgggtaacaacagcgcctgcacaatcgctgcactagaatctcctcctccatgcccccatccccatcttcctcctcctccatctcctcctccttagcaatgtctacattgtctccatccgattgcacagcctctgccttggtgtccttctcaatggattggcagcttgacccctttgcatgactccttgctgtgcattgattgccatgcccagcaccttctgtggcagcttgacccctttgcatgacctggcagcttgacccctttgcatgaccccttgatgtgcattgattgaccccccttgccgggcccccccttgctgcgcatgcatgaaagactgttttgataagtcggtaaggctttgcttcatgccttgcgctttcacctcttttcatgccttgcgctttcacctcctttcatgccttgcgcaaattgcctttcccatcctgcattgctttgctgcgcatccgcattagcaccgggtggccctgcatggtcccgagttgcacctaattctcgccccttttgcgcaattttttttttgggaattcacttcagctctgttctcatgatctgctgctttgcctttcgctttctgcatcgccttgctgcgcatctgcattagcaccgggtggttgtgaataacccccgagttgcttctaattctcgcaccctttgcgcaatgcatttcactgtcactgtcctgcctagcaccttctctggtggatgctgggcagatagccaggagcactggcgctcggagcactggataggtctgcctacctgcatggcggttacccgcctgcacctgccagaccagaccaggacacgcgccgggccagcacctgcgccggagtactggcgaacagctctgcacccgcctgcaccttcctgaggcctgcctacctgcatgatggttacccgcttgcacctgcgtcagagtaatggcggacagtactgcatacccatatggcatgcatccttagctaccgttccaagatttccatagcgtctggtttggttatgaattgcattgtagtggtagactgcaattgtagcccagacttagctgccttgtgcctgtgttgaccaagttactgcttgccaacaggttgccttgtttattggttaatctttgccgggagtgtggttgggtgtttatgttgtgattggtactttacatgacactgacatatggatcatgtacacctgcagttcttctattttactgtgttcttgcccacctcggccacctacctatttactaggtttgttttagtggcccagtactgcaataggtaaagcaaagatgtgtagttgaggcctgcttgacttgcatagcatgactgatgaaatgtcacagcccagaagaatttagcccttttgcctgttccctctaggcattcggtggatcaagttttctttgacaggttttaggattgatttttttatgatcgggaggactgtgtattccgagtttggttttctcaatcattcgcgcgttgggtttgacaatgctcccgattatgatcgggaggactgtgggtattccgagtttggtttttctcaatcattcgctcgttgggtttgacaatgctcccgattatgatcaagaggactgtgggtattctgagtttgatttttgtcaatcattcgttcgttgggtttgacaatgatcccgattatgatagggaggactatgggtatgccgagtacaaaaaaaaaaaaaaaaaaaaattccgagtacatgttttctcaatcattcgctcgttaggtttgtcagtgctcccgattatgatcgggaggactgtgtgtattccgaatttagttttgtcaatcattcgctcgttgggtttgacaatgctcccaattatgatcgggaggactgtgtgtattccgaatttggttttctcaatcattcgctcgttgggtttgtcaatgctcccgattatgatcaggaggactgtgggtattctgagtttggtttttctcaatcattcgctcgttgggtttgacaatgctcccgattacgatagggaagactttgggtatgccgagtcaaaaaaaaaaaaaaaaaatgacgagtacatgttttctgaatcattcgctcgttaggtttgtaagtgctcccgattatgatcgggaggactgtgtgtattccgaatttggttttctcaatcattcgctcgttgggtttgacaattctcccgattatgatcgggaggactctgtgtattccgaatttggttttctcaatcattcgctcgttgggtttgtcaatgctcccaattatgatcgggaggactctgtgtattccgaatttggttttgtcaatcattcgctcgttgggtttgtcaatgctcccgattatgatcgggaggactgtgggtattctgagtttggtttttctcaatcattcgttcgttgggtttgacaatgctcccgattatgatagggaggactatgggtatgccgagtcaaaaaaaaaaaaaaaaaaaaatgccaagtacatgttttatgaatcattcgctcgttaggtttgtaagtgctcccgattatgatcgggaggactgtgtgtattccgaatttggttttctcaatcattcgctcgttgggtttgacaatgctcccgattatgatcgggaggactctgtgtattccgaatttggttttctcaatcattcgctcgttgggtttgtcaatgctcccaattatgatcgggaggactgtggttattctgagtttggtttttctcaatcattcgctcgttaggaatgacaatgctcccgattatgatagggaggactatgggtatgccgagtacaaaaaaaaaaaaaaaaattccgagtacatgttttctcaatcattcgctcgttaggtttgtcagtgctcccgattatgatcgggaggactgtgtgtattccgaatttagttttctcaatcattcgctcgttgggtttgacaatgctcccaattatgatcgggaggactctgtgtattccgaatttggttttctcaatcattcgctcgttgggtttgtcaatgctcccgattatgatcaggaggactgtgggtattctgagtttggttttctcaatcattcgttcgttgggtttgacaatgctcccgattacgattgggaagactttgggtatgccgagtcaaaaaaaaaaaaaaaaaaaatgccaagtacatgttttctgaatcattcgctcgttaggtttgtaagtgctcccgattatgatcgggaggactgtgtgtattccgaatttggttttctcaatcattcgctcgttgggtttgacaatgctcccgattatgatcgggaggactctgtgtattccgaatttggttttctcaatcattcgctcgttgggtttgtcaatgctcccaattatgatcgggaggactctgtgtattccgaatttggttttgtcaatcattcgctcgttgggtttgtcaatgctcccgattatgatcgggaggactgtgggtattctgagtttggtttttctcaatcattcgttcgttgggtttgacaatgctcccgattatgatagggaggactatgggtatgccgagtcaaaaaaaaaaaaaaaaaaaatgccaagtacatgttttctgaatcattcgctcgttaggtttgtaagtgctcccgattatgatcgggaggactgtgggtattccgaatttggttttctcaatcatttgctcgttgggtttgacaatgctcccgattatgttcgggaggaccctgtgtattccgaatttggttttctcaatcattcgctcgttgggtttgacaatgctcccgattatgatcgggaggactgtggttattctgagtttggtttttctcaatcattcgctcgttaggaatgacaatgctcccgattatgatagggaggactatgggtatgccgagtacaaaaaaaaaaaaaaaaatgccgagtacatgttttctgaatcattcgctcgttgggtttgtcagtgctcccgattatgatcgggaggactgtgtatattccgaatttggttttctcaatcatttcctcgttgggtttgataatgctcccgattatgatcgggaggactatgggtatgccgagtacaaaaaaaaaaaaaaaaaaaaaaaatgccgtttatatgttttctgaatcattcactcgttgggtttgacaatgctcccgattatgatcgggaggactgtgggtattctgagtttggttattctcaatcattcgttccgttgggtctgacaatgctcccgattatgatcaggaggactatgggtatgccgagtaaaaaaaaaaaaaaaaaaggccgagtacatgtcttctgaatcattcgcacgttgggtttgtcagtgctcccgattatgatcgggaggactgtgggtattccgaatttggttttctcaatcattcgctcgttgggtttgacaatgctcccgattatgatcgggaggactatgggtatgccgagcacatgttgtctgaatcattcgctcgatgggtttgtcagtgctcccgattatgatcgggaggactgtgtgtattccgagttttgttctctcaatcgttcgctcgttgggtttgtcaatgctcccgattatgatcgggaggactgtgtgtattccgaatttggttttctcaatcatttgctcgttgggtttgacaatgctcccgattatgatcgggaggactatgggtattctgagtttggtttttctctatatctgaatctgattttgaatctgaatctgaatctcaatcatttgctttaccaacctatttgtcttccgcagggtctacaatgacagtacagtggaagttaaactccaatcggacgggaaggatttgggatgcggcgtcatggacgaatggaccaaggagcgccaagtgccaatgaacatcgaagtcgttgttggtggaccagacttctatgttacggctacgcacgctcactggttgaggtttcacggcgaatggagcattctggtcgacactcacccttgcggaagtcaagacagcccagttgcttgaagtcactagcattcggaggcccatgtcaggagctgggctataaggagataccaatttgaatacgatgaccttacaaagttgtcggcgatctgtcctcttcgttgattgtaggaagctgacctcgtcgcgcctttcctgacttcttcgcggaggctgtaggaaatgtaaagagtgcagaagttacgcaatatcctatcgaaattgaaagcggcaagtgcggtcagcacataatggttgtttcgaacggtgtacatcccaccgcgtacgtaacattcgaaatgtacctgtcagatttgaaaatttaacctgagccacggtgcagcagtacagtccgttcgattgctctcttaccggcgtcaggttttttttgtactcggcatacccatagtcctcccgatcataatcgggagcattgtcaaacccaacgaacgaatgattgagaaaaaccaaactcagaatacccacggtcctcccgatcataatcgggagcattgacaaacccaacgagcgaatgattgagaaaaccaaattcggaatacacagagtcctcccgatcataatcgggagcattgtcaacccaacgagcgaatgatgattgagaaaaccaaattcggaatacacacatttcctcccgatcataatcgggaagcagtgacaacccaacgagcgaatgattatcaaaaccaaatttggaatacacagagtcctcccgatcataattgggagcattgtcaaaccaacgagcgaatgattgagaaaaccaaattcggaatacacacagtcctcccgatcataatcgggagcactgacaaacccaacgagcgaatgaatcagaaaacatgtactcggcatttttttttttttttttgtactcggtatacccatagtcctcccgatcataatcgggagcatgtcaaacccaacgaacgaatgattgagaaaaaccaaactcagagagaccgacagtcctactgatcataatcgggagtgagcattgccaaaccccaacgagcgaatgattgagaaaccaaatcggaatacacagagtactctcttggttgttattttttttccgatcataacggagcattgtcaaccccaacgagcgaatgatttgagaaaaaccaacttcggggaaacacacagtccttccgtcataatcgggagcactgacaaaccttaacgagaaatgattcagaaaaacatgtacttagcatttttttttttttgttttgttttgttactcgggcataacccatagtcctccctatcataatcggggcattgtcaaaccaacgaacgcaatgagtgcagaaaaaacctaaactcagaatacactgctcttgatctatcgggagcattgtccaaaccaaaagagcgaaatgattgagaaaccaaactaagaatacccacagtcctccgataataatcgggagcatgttcaaaccaacggatgcgaagattgagaaaccaaactcggaataacaaatttctcccgatcataatcgggagcattgacaaaacccaacgaccctattcgcttgagtccacctaatacactgctagctggaggcagattgcctggcaccagctgctagcgtgggtgtcggaccaaagccccgcaccgtgactgtacagctataggctgtatcataacattccccccaatcccggttctggtaccagaattcctgggattccacaacccaaagtattaaggagtagccagacaaatattcccggtgagagaaaagtagggccgggaccccggaaaggcactcctaaaaccagctcaagggcgtaggtatgacatctgtgaaaaacttgtctgaaacagtacccaccaccccagaagctttcttgcactatcgctgatgcaatggacaacacgaagcctaatcgtcccagctaacgccacccatcaccattaaaagaaggactgcaggaggtgatctctaaaagacacgcatctgtgtgagtaaactaaagcggcacgtaggacatgtcctccagatataatggggagcaacaagtattgaaaacctttgcaatgattacttaacaaaataatgcaatttcgacttcattgtttcctttctaggttaactcaggattattctccccagggaagaggcttaattggttggggctttgcattctactcgcagtccatcaatgactatatcaagcttccaacatttcttcaaacgggtctattgaaaagaggggcagcttgccaccgtattgcttctttggcaatggacaaacgcggcaaaggacaacaagaacgcttccgttcgcatacgtgtacttgctggttgagaggaatggtttgaggaggtgtagtccatttcctccctcccggaccactccacatagcaatcgtgaccaaacgactctgtgatcgtgcaagggttttaaagaacatggagtgacaccggaccatctgatggcattgtttggtcacctttcaagagaatgggcccttaacaaggcaaagacgtcggtgaactctaaggggatttctccgctgtttcatcctagacaagttgtacacagttgttcggacatggcacgatgcaccgtaaaggaggttaatcgccgtgacacgcattcaagataaacgacaggtcccaacgggagagtcggtaagatctgttatatatgatagttacaaaattaaaggataccgtgggttgtgtggatgtaatcggtctgcacaatgccccgattatgctcgggagaatatgggtgtgccatgtctcatgtttactacagtcttaaagaaactaaatgatacaaaggaaaagttgtacctaggaccgagatgtaagggatgctcccgagtatagtcgggagaagaggggtggcctaaatgctcactaatataacaatacttttgcacaccaacattgcagggtcctattacaaggaagtatgacgagtcaggatcttggtgtgtacaagtgggacatgagcgctgaaccgatttacgacgtccttccaaggcttcccactgggggaacaccataacgtattgaaggaagcccccaatatccaagattgacgagctcgagaatatccgagggcaaactgggcgggctgttgaagactattcataacgagaagcccggaggtgacgtcttgcatgccacaagggacgatggtcctgtacaaaccgccggtgacgaccgtgcaggacccgtaactgatgtccccgtgtacgtcacgagcggaggaccttctggttctattcgaaccacagccatgaccagcagccgatggagaacccagccgatggcccatcccatgaccgtccttcaaacatattttgccattgccgagatacttcgtgaaacttgggaagccagcaaacaagtggtggactgattttcttcaagttgagaagagttagtggagcactcaaccagatgatactgttacctgtgaactgggagtacccggaagaccaactttttgtcgacttcccatcgagttgtcagcaaccggtcgtgttctgacacagtctgagaaatcaatggccaaggctatgatagcatcattggatgacttgtccatggaatgtgtcagacctttttaa

SEQ ID NO: 189 - DNA, 22439 bp, unidentified
  misc_feature 1..22439: note = Fanzor polypeptide
  source 1..22439: mol_type = other DNA
atgcacagaattttgtttgagttcgcaactcagcgtcgtgagatcactctcggtcaagcgatactcagacttggcattcgacacaccgatgcgtgcgtcgcgcatagccctcatttcggaacggaatttggcagacaggatgcacgctcgaggggtgcgagcgacaacttccgcctccatcagcctcctccacaatacggatttggaaccgtaaaccatcaggccacgatcgcgacacgccttcttgagaacatccgctttgcttgcctctgaaagaccctcgggaatacgcatcctctcgaactctgcatcgttcacaaggtgtccatcaggctccagcttctcttgcaccgcaagaccaagctcggagaaaaaaacgtttcccaccaacatgaggttcgcggcgtcctctgagacgtcgcataatcgatggtatttatcatcactggttgataaatgaaacgcgatgatgtggagtgggactgcagaaagaagttccatgatttgttacaatatgctacacttaaacattatgctacagtcagagatgtttgagagatgttggtcttacagttgttctcaaataaagtgggacactttataatcatccagactgcagatcgttgcttttgggcaacgttggggggtgcagaaggttgaagaggttctcgaagatattccgagtagcctctttggtaaaccgttcaaccgtctgtgtccccatatcagtatcagggggtgggggtggggttgtcgaggaacttctcggcgcgtctcggcgaaacgcgagaggacgctctctcccaaagacttggtgaagtgtaagcatcaggatgtttctggaagcgttcacatcgcggtcccaagtcttcccgcagtgaagcataccaccgctctgttggcgtggcgctccgctttgactgcttttgcagtggagaatcttatgaatccgcttgcgtccttctgtacattcccaacctgtaccgtcttgcttcttacgatgagtgagtgccaccatgttgcaaaggtggttctcacagcagctgcatcgttgagatgttctgaactcatcgatgtcctccatgatgacgttttctcggctacgaagctcgaaacgaatagcttggagagggccacaagtccgcctagagattggcgtcgcccccagacctttccaatcaccaaacccgacgagtaccttagcgctcttctttctcggagctacgaagtcagcaatctcaacaataagtttctgtttcttgcagtaccttcgaaagcggaggtttcggtaccccctggaagcacgatgggctagaaggattggggcggcacccatgtagaatctggcgtacgcaccaatctgttcagaactcgaagagtctctatccggaatgataccaccgacgatatcagccgtctcgaggttccaaacgtcagtttgacgctgagacttgaagatcagacccttgcgataatatttcgccgagctgtacgatctggtacctccgttgagtcctgttacagtcacgatatcagtaacacccgggtctaccgcagccacgaccacattgtcaaggaaggatacaatgccaccctcgtctgttgtcacgtactcatgcgcccgcgtagagaacgcgtctgcaggcatcgaacatgtcagacacgtaggcttattcatcaagatgctgactgcaaagccgtctgtcacaatgcggtaaccgaacttccgagaaactgtctccactttcttgaggtttgcgaagcgctcccatattccttgatggtttttggaagcaacgtctgccttgcatgaatcaaagtggcactcgttgaccatatagaaaaaggccattttcgaaatcggaatgtgcgacagagtgaatccagatttgtaaggcaacaacgagaatgtgcgatgtttttcgtttttagtttttcgtttttcttcgatggtctccgacaatatcttgtggtacagaggcagggtcatgtgagcccgagacgcaaaagtgtttccggatggtaaaggtagaacccccctgagacagaatgccacttcgcgtgcaaagaagcgtttcgcgttatctgcgtccaccctaaggttcttcgaggagagccaagcttcgctcaacttttcaagcctctcttgaagtttagtcaacctaacacgcaaaggggatccttctggttccttcctaccgaccctcttcttcgcaagagcaattgcactttttgccgatcgaagtctagatgttggaagcttggttggcagctttgttgtatgagggctcatcttgaagatgacgtcgagattctttgtagggcacttgatcaatgcagccacgatgtccgaccgccaggcgctttgcaatctgtgggtacttccacttcaagtaagtcgttatgcgtcgctcaaggttggtccaaagatggttagaggccattgtggccatgagaatagacaggtctgcaatgatctggttcttcacgctcccccgaatgtcaactttggattgccccggctctcttaacaagtcgaacagaagccgactactctcgaagtcttcgccaagagtcgaccccttacatttgttggtactgactgcaataaggcaccggtagaagaagttgcgatttacgggagggacagcgataccattctcaaaaagacgagcaatgtggaaatttgcgaaaatataaccctctccaagcaacttgttcatgtccagtaccagtgtgtctatcttgttacgaagccaatcatggggaataaaggtactcaatttcatcttgaccacacaaatcgctcgcccaggtgcacactccccgtcttcctccccttcataatcgacaagttctgcaacgtcatcatgttggtcagcctcatgtaccaacgatgatgactcgccgatcccattctccatcacaaattgtaccccgaaaacgttttgatgtaatctggatctgcagacaggctctctcgaacattcctaacccaatctctcgtattaatcatatattttgacaagccgaagcacttccttcagcgcgagcaatgtccaaggcaagcatcgtccgcgagtggacccgcacggatggctccaaatgcgtattaattgagcggattattttagagcttcagaacaatggtgccagaatcatgcaaatacgattctcagtacatgaagaagaattatcatattttgcccccgaggtcgtggtcgaaattcttgtttgatggggcagcagcactgtacttggacttggacaagttgtcccagtgtattactgtccaaagagttaatttgatacactcaaatgctgatgcggtgagttcagttgaaagcgttccattgaatgctcacagtgtctgggagttgtttccgcgtatcgcccaagcggctccgtgtaggttgtgggaggcgtgcattcatgatgggcgggagatcttatccgttgcgcagctcgttgaggccaaagaagtactggtggccgatgctttggactacgcgacgaatatgacagagttcaggagggtacaagaggtgttgcatgctgcccggacagaatcaggggcacatgtcagacgacggttccttcccgacttgcttcgcgctcttttcatgaagcatgcccatgtacatggtattcgtctcgccgacgcagtgaaactgtggctgccaaaactgcgtgagttgtacggggaatatgccatcgtgcatgtgcatgagcttttagaagttgcagaatgggagtgggagtgaaatctaagctcttggcgttccgttgaatctacaagctgctaactgacccaggtgggtcggttggttgagcgcccacatttgcctctccggaagctggggggttagggggggggggcgagggaacacagaattcacagttcacatcaagcatcagacacactaatggattgattcattgatcatgcaaacacacgtgaagaagagtgataggcggcgaacgcacacaagagacataataacgcatggcacacgcaaaacggaggagacgcgtccatcatgcatggaagaccaggggataagagtagaatacatggatcatactattaattactattccactgactgtaggctacaacatggatcccaaggtggagcaaatcgaacacccagaccccctcgtcgaattgatcgagtcggttggcccctggctcaaggagacgttcccgtactgggatatgccagacttcactccgaaagtcaacggcgaggccattgcgaatcgtcccacgtgtcctctgcaactggccgaaatggccgaagtcggcgaccacatcgcggtgaaggcaaagtcaggttactggcatcatggtatttttgtcggtcgtgtggaaaaaggcccttacatggtgatcgacgtctacggagatgacaaggcattatcgaccatctgtaatcggacgctgaccgcattcacgaacgggggtaccgactacgcaattataccgtatgacgagaccatctccaaggagcactcagctttgattgcgttgcatctgcagcagaccgcagaaaaacaacgctggcactacaatgccatcagcaacaactgcgagcactttgcgaccctctgccgatgtggcaggtgggtgggtgatttgttcttgaaagtgcagaaagagctggatgcattaccttctcccctgttgcgtccttgcaaatggaaaatttgtttcataatatgacgtccgttttgttctttatcgcaggaaactatcgctgcaagtcatggagctgtacatgtccatcttgaacgcgttggatctatcgaatctatcttcatattgttttgtcttctgtatgtcttctcctcttcttcttttatattattttccatgctaaaaaaaaattgacgcctttttccttcctttgaaacaacaacaataacaacaacaacaacaacaacaataacaacaacaacttgatatcatgtctaccaacaacatgtctaccgatttcacatcattcgtgaatgattccggtatatttacagttgtcctagtgaatgacaaaacgaagatcaacactaaactcagtgtccctcacttgaaggacatgtgcaacaagataatttcatttcccctcgttcctgcgtgcctcgcagaccctgtctgcgcaatgaaaaatgcgtacgctaagttgctcgaagagaaacccaaagcggagaaaaagcctttacaggacatgcttctccctattgccttagctgccaccgctgctaagtctgctgctgctgctcctgctccttccgccttgcttgccctcgccagtgcccttgccctcccagaggacgaatgcatgtcgaagagttccagcagtggcggtaaaaggcgccgcgccaatggttcaccctctgtggctcctactcctgctgctgctgctgctgcttctacttctactgctgctgctcctgctgttgcttttacgtttactgctactgctcctgctgctgctccttctgctgctgctgctcctgctcctgctcctgctcctgctcctgctcctgctcctgctcctgctggctcgtttgcaacgtgctccctgtcctcctcattggcctccggtcgtgttggtcgcgccgttctaaagaacgagcttcctgttggatctaacataggtgcatttaccatcgtggggtattcccccaccctgggctgcactgctgtcaccattaacggcaacccgtgtggtagaaaacagatgctcttaagcaaccccaatggtgggaccttcaccactggcaagtgcgcgcacatagcgtgcatgaaacagactcccgccaagcgtgaggcgtacctcgccaccaagcgagctacgcttgacgagctctcaattgagattagctccctgaccctcagccagctttagtcagtcagtaagttagttatttagttactcagttatttagatactaaaaactcttttttttgatacaattttttagagacgagacgggatagtctgcatcgccagcgtcacgccgactgcgccctgcatggactggcaggcgacaatcaatgtgtagagttccctatacagttgttctcaaataattttgggacactcatcacatcacatcacatggcgaccgacctctcgcattacatgacggcggaacctgtgtcgagtcgaggcaaagataacaaacaacacttggatgagaaccgtctcacattaacatataacaagcggcggagcccctttcacctccccacagcggagcgactgggggcgaccggaggggagcccccacaaagggtccgaggaaccgagcgggtgggcgaccggaggggtgcccacagttcacatcaagcttggaagaagcgagatcgtcagcggtatcggaggacacaagcaaacgtcggaacattgtcgaatgtatcggaggacacaagcaaacggcggaacactgtcgcatccacaccgtcagtccgtccgtccgtccagagctaatgcgattgaacaaatatttggaagcatgaagagagactacagggcatcatgtccattgacgtcaacctgtaatttcgattacttaatgcaaatatgttgtgttctagaaatgtggacaactgtatggtaggatggacaaatgctggcgtgaactccctaaggacatcattttttcccacatcattccaaaatgtgatattgatacgaggctggcatttaaaagccctccttcgaagatgtgctcgcaacgatacaaatcatctgacttcgtagagaccttgcgacacagatatgtgccagaccggatacaacaagttgtgggtgttcagtatgtattgatcccaatgcacacaattgccggttggtatgacaacatcgatgaagaaagcaggcatgcaatggttaatctaggcatctattatgattttgctgggtaccgtcggaacaagatatacaaggattccattcaaatcacggtgatctgtatagattacagagatgccaataaatatcccatatcagatacagttgctcaactatggattaagccccgttgcctctgatgtcgaaacattgtctgtgaaggtgcgcgttcccttgatccattcattcattcattatcgtgcccagggtcggctgagtcagcttcctcgtcggacatctctgcaaccacctccagctgacgcgtcccgtcgcccggcttgcgttcgaagacgtgcagcgtcgtcccgtgatccgtggattcgttctggcaggcacagatcaccgccatgaccgcctggtagtcgacgcagtgggggtcgactcccacgaatgacagggtatccaagccgtcggtgaagatgcggctcgtgttgccgcaggacttgccacaggacttgccacaggacttgccacaggacttgccacaggacttgccggggaacgcgtcgtcgatgccctcgtaccgcatgaccctgtcccagagcagcgggtggtggaggacctcgggcgagaagccggacatcaggttcgggtggatacggatgcggtagcgacggcccgggacgaggaccaccgacgtctccatgagaaaatccgaatatacatactggtacgacagggtctctttacacgaaatgggtagaggacacgaaaagcatggacaattcatttttacatgtaaatgatgcaattcttgcattctgagcatgtgtacatggattctgaaggacagcatttgatcactcttatctttgtaggttcgcattctccacagaatacgcgtaggtcagggtctactatttcgtattcatcgcctcccatgtattgctcgagacgcacacccatggctttcaatgtgtattgaattctgcgggcctttttcagccatttggacattgcagagtgcggatgctttccgttaatccagtatggcatcaagtagtccacgaacaattcttctccccgcttcactttccttgaggtgcataggtatacttcttccgtctcccccttcttcttctgtatgaattcgcagttgtttgagaatcccgtcacttctggatggatggcatcgtttgcgatatgtgccactcccttgctcagatcgaatgggtctggttggagcgtgagaacgtttggggtgcacgcgatctcaaatgcgtacgcatgtacacgtttactttttcgctttcccgatcgtgtacgcgaggacacattcgattcgttgatgacaggtcctgggtactctgtgagtggtgttccagtgggtagcgaacggatagcaaagaggcccctccctgctccgggtattttggatttactgatgcgtatataggatggtatctttcctgtatcgctgaatgctacgcgctcaaatgaaaatgggcgaacgtgttctcgcatgttgttacagttgttctcactgaaagatctattattccatttacaccataaaattgtaatgttgttacagttgttctcaaataaagtgggacacacccactaccgcatcaaggcggcacctgtcgagtcgagtcacagagcgaccgacctctcgcgtttcgccgataagttcatcgaaaaccccaccaccccctgatactgatatgagtgaacacggccgaatagttcgtataagaagatctttcttacaaacaggtatggaggattttaaacggagagtacgtgtgtggcacgaaaacattcggatattcgaggatcatgtccctcctcgtgcttctttgaaagtttcgtacgatccttccttcgagtttgatcgcacgaaatatacgatgcggaccgatatccgtgtcatagacatggacacattagatgcgaccctagaccttatagagcaaggtatgcacccgctcgtcttgaacatggcggacatacataatcctggggggtgcgtgtcttgtggaggtgggatgcaggaagagtcgttgttccggaggacgaactaccatcgtcatctctcgaggtcgttttacccgatcggagaaagggaagccgttgtatcgttcgacgtcgacatcatcagggagtgcgagagagacggattcgagttcctgaagttttctaaatcggcatccttcttggcatgtccgtgcatttccatgccacagctggtggacaacaggttctcagagaaagacagtcaattgtttcgcgaaaaggtgagactcgtattgagtgtagctcacaagtacggacatgacagcatcgtattaggagcttggggatgcggggcgttcgggtgtccacctaaacacgttgccgagataatgtttgccgagatcgaacaggtagaagggtgcttcaagaagatcgttttcgcgattctaggtaaaaatatcgatttctttcatctcgcagaaaatgaaaaaaaaagtaggaaactttcggagggtacatcaccaaagtagcacagatgtcgtgatagcatacacgtcaacagtttatccacatttttcccccatttttgctttatccattcaatgatattaatcttttgctgtttatgctaaggaaatcatatcagacacgtgcgtctttgtttcattcggtatgtagttcaaacgacgaaagtctctcttcaccttagcgaagcatagctcaatagcattgaattctggactgtaaggatgtgtgtaacaaatattgacggggtgactgaggaccaatttcttatggatactggcattgtccattattgctactgaattattgaacaaactcaatgattcaataaatgcaacgaagtccttcttcttcacagatcctttcttcacaacgaattgtacaggagcagctctacagttggcggaacagtaaaatgaaacatatatcagatggaaatgtacgatagaaaattggcgttaagaatggtcgctgacttgtgtgtgttcaaaacttctgtgtttacgaatgaatgaatcgatacaaagacgcacgtgtctgatatgatttccttagcattcagcaacctcactgataaaatcattatgggttgttttgaccacgtatggaacacgtatgtgatgtttgtataaagagttctgtgatgtataaattatgtaagatggcaacgaaacctccgacagtcgctaaattgaaggagctactaaaattggccgaagtagcatactcatcaaaggacaagaaggacgatattgtccgtttatgcgaagacaatggtctcatcgccagaccccctccagaatacaagacggtggaaaagatgtgtgtcgtgaaatgcgccctgaagaaggcaatgagtcttgacgatgaagaattcggtaagtttagggagcatgtggaccagctcgtcaatgtggtgagccgcatgttacggcggtccagtcttgtgctgactttccacatcacgagtctattagagaaaggtctggatattccagacctgtacaacatgaaagatacctactggaaggattggctccgtatcggggtagacggaatcttccctgatgaggaaagcaagatatcgtacgaagctgtgaaggactccatcggcgatgtaattggtaatgacgacgctgactacatcaagtcttatccgatctatttcgatcaggtattgaactatgcaggtcacacattgagcactgtcgtgtcaaacaacgcatgggttcctttgataccacgtctggccagactcacttccaccactttaaataaattaaatgccccgaagacgctggacacatcgaagatcattcggggatacgacgtgatgcaggctattcagcaagaagtccaaaacatggagggatggccagagtctgttcaagagtacgtcaatgaagttagggagatgctgagtgttccagatggaagtcgagtttatgataactatggcaaagacatggactttccgaccatggtccggtttaattattggatacagacacggttggaggatatggatgcacgtcgtatccgattgatgcccatcttcaatgtccaacgggtgcatgttcgccttgacctgaagaccctcgtgaacctgttcaggcacatgttccccaatgaccagaacatcgttgagctttccaagtgggaacatgtaaagaatcccgaaagcttcatgttgccccagaggcctgcacagaagaagaaaaaatcatgtggtcctggtgaatgggatgcatacaagtcggtcctgaagcagtacgatgatgatgttaaggatatcaaggctactgacgagtacagacatgcaaagggtttgtatgacacgcttgtgaacgcccgaaaaacagtcgcaggttccttcttcagaaaaccacctgtcaagaatgggtgggttttcgactgcagcatctgtactgacggagtctctttgagcatgcagtacagcaagacagtacaggtccttgtctcagatttgaagaagacctgtaagaagcctcgtaaagaagaaggtatcaagatcgcagaaaaatacgacggctcacttaaaacgatattgcccgatatgggtattgtcgtcctgggtgtggacccaggacggagcaacatcgctacggtaacgtatttggcagacgataaaaataagacatggaagctgacacgtggtgcattttaccacaagtcgggtatcaagaagcagacaaggcagaaggaactgcgttttgctgacatgattcctatgtgggagtctctgcgtgaaaatggagcagctttgagtacatcgaggacggataagatctccgcgtacttgtcaaattacgctaagttttctgacgagtggtggagattggctttgcgacgccgagaatcccgtgacaacttgcagcgttacatcggaaaacgaaaggtcaaagactctttctgggcgggtatcaagcggtgcatgatgaaagaacttcctggtatgaaggtttgcgtggcctacggatctgccatcacgaaactgaagcctactggacctggagaagttgcagttcccactggggccatgttcgcatcgtgtaaaagaattttcaaagaggacgtttctgtgacagatgagttcaaaacgactcttatgtcgtgggagacgggtaaagaaaaagaacgtgtttacaagatcccaagtgtttgttcagcagacgtgaatcttaggttgggtggtgaacgttttggtcacactaaatcgaaaacgatgccaaaggtcgctgattgcgaccacttaggggtaaggttgtacaataaacgtaaaggcgcacaagagaagcacaggaggggtggcttcgccacttcccttgtcgattctcaaaaatcgatcgagcggtacccagaggtacgaggactgcgattctctccagaaacatgcatttactcggaccgggatcgctcttctgctctcacaatcgcaaggctgcactgcatggaattgatgggtctaggacgacctcttccatttgcccacagcagctctgttgttgttgatgaataaaaactcgtattgttgtagacaccactcggtccccctccggtggtcgcgacaacattaggttacaccgcaaggtgtaccgtacactccggtttcattttagtattccgtcgagtgtacagagatcatggtgcacaagttggtcgtgtacgcgttggttgagaacaagttcattcagaaaaatgagatcgtcgtcaaggttggctggacgtcgaagccctttggtaagcgactttctcagtacccgaagaactcaaagatgatcttcgaaatccacgtacttaatccgcttgcttgtgtggagtctgagactgtcctgatccggtaccttcgaggagaccctagagtcaagccccgtcgcgacgttgggtacgagtactaccaacttgacgcaggtgattcaggtgccgtctttcaggagatggccgatgtcgtattacagtacgtggggacaggtggcgtcgacatgtctatcaagtctgtctcagaatacgacagccttgattgcggcaccgaggacgtgcctccagacccccccagctttgccgttgttgagcgagagaaggaacgcgagaatgagcgagagaaggaatatctattatgtgccctgagctgcttcttccccattcgacactacgaccatcatcccaaatctgatgacggtgttcgacgaaaagctcaagggaacacagatgttctgcggctacaacatgatgtgaacaacaccgctaggctgttcagccatgcatcgtgcggcgttcgcgacgggtgggacctgcgaaaggtgtccaaggctgtgaagatgatcctgaacgccgtgggtctggatatggtgagcgtgaacaagcgggtgcaggtcaagggaaagagaacttaggaggagaggaactacctcctgtgccctgagagtgtctgccgtatgctcgagctcgtgaaacttcgtcttctgagcactgacctcacgccgcagctgccctttcgtgacaagagatgtccatgtacagtctcccggccgatttttttaaatttctaatcaggatttagagcctccggaaagactagctagcttgagacataagcaccatggaatcacaattccgctcccaagtcagcgaccattcttaacgccaattttataaaggcgatgtcgtacatttatttccatctgatatatgtttcattttactgttccgccgactgtagaagagaactgttggaactgagtttattataacttttccaatttcttagctttattaaaagtcatggtcatacaaatgatcctcgcgtgcaacgggagtcataacgagatcgcgcgcatcgcgaaaaaaataattggaaaccgcatcgctgccgccaagagcacgaacggaaagctattatggtacgtattcgacgggcgatggaagacggacgtcgacgcgatccacgtcaagcacgagctgtccaccgttgttctagagcacttcattatcgctatgaacagggagagagcgtcccaaagcgattacgacatgcagagaaacgatgagagcacaaaggacgactccgccgacctagcgcacatcaccacgcgcctccaggacgcgaccttcaagaataacgtactgcaagagatgctcgagtgcttttacgaaccggaatttattaagaaactcgacgccgaccggctagcgcacataaccgcgcgactccaggacgcgaccttcaagaataacgtactgcaagagatgctcgagtacttttacgacccggacttcatgaagaaactcgacgccgacccaaacctcttagggttcaacaacggcgtgtgggacctcaaaaacggcgtcttccgtcaagggcatccggaggacatggtctccatgtccgtgggattcgattacaatggcgcagtgtgcgcggaatcagcagaccgcgtgaggaaatactgggacacgatgcacccagatatataccaacgagaatacctcatccacacatttgctagacagctgtacggagacagcggacaagagctctttcacatacacgccggcgccaacgcgtccgcctctaacgggaagaccaagttcttcgaagtcatggagatcgcattgggcgactacatccgaaaattcggcgtggaaatgctgacaagcaagcaacgcaacgatccaggtcgcccgatgccagagtttgcgacgtggaagggggtccgcattatgtattgcacagagccaaaccacgacgaagtcttaaattccggagtcctcaaggatatgacgaccggtggggaagccatcaccaccggtgcatttcactccagcgacatcgtaagcttcatccgctcgcaacacaagaccggtggggaaggcatcacccaccgcctcttgcactccaccgacatcgtacacttccgcccgcaacacaatatacacatcatgtgcaacgccccgccgatggtcgacggttctgacaagggagtccaacgacggatacgaaaactcgactacatcagtaggtttgtggacgcggatgaggcggacgccgcaaaattcctcttcccacgagacgcagggcttgtagaggcattcaaggcagacgacggagcgatgcgcatggagttcctacgcacccttctacacgcgtttgtatacgagtacaagttcgatatgcccgattcgttaaagaagaccagtgcgatgtacttgaacgcgaacgacgacgccttggctatgttcgtcgaagagcacgtctctgcggccatcccggccacgggaatggacctggaacgtcacctaagagaagagacggacacggacctggtccttctcctacagcaagagacggacctggaacgtcacctgattaaacgaaaaactttgagagggatggtgtaatcgataggggggatctctgccctcgcggagtgggtcaggagaatttagttgcagaaacctgtcaagtcatcatacagctagggacatttgattgtgggacaccttttattttgaaaagttgattatgggtataaggaaatgtgagtgcaataaaaaacccacctggtcagttagcagcttacaattgttattctctgggccagcttaaatgctgaaatacgggatgaaggacacgaaggattgggaccttgatacaaaacctttagctgacctacccaatcaattaggttcaagggtcaccgttaagggtgtcccacaaattctgtctctgactgtacacgtacaaactgtcgcatccacaccgtccgtccattaatgacacacggatgcggtggcggattatcgtcctcgaatgaagtgtaaacaaccattcttcagtataaacaaccatcagcacagcacacttcacaaacaaatgagttcctttgacgaaatcaatgaagatgtattggagatcattatagccaatgcgatttcgaacgaatcccacctcaaacaagtgcctctcgtttgcaaacagtggagatgcgccgcaccccggtgtgtcacaaggatccacttaagacattataacagtttggaatacgcattatcacgcatttgcaggctcaaagagttgaaaatcggtatcaatcgggggaaagacgtaccctaccaatcaatgtcggctatcgaagacaagatccaagacatatcgccgctgtccggcctcacttcgttggttcacctggacatatcgaacacctacgtgaccgacatatcgccactgtacggactcacttcgttgacgcacctgaacatggcgcacacctacgtggacgaagacctattatcaccgctttccggactcacttcgttgacgcacctagacatttcgcacacacttgtgaccgacatatcatcgctgtccggtctcacttcgttgattcacctagatatttcgcacctcacgtacgtggacgaacacccattatcatcgatttcaggactcaatgcgttggttcacctcaacatttcgcatatcggaaacagactagaagacatatcaacgctttccggactcaccgagttggttcatctgaacatggcgtacacacgggtgggcgaacaggacctatcaccgctggcaggactcacttcgttgattcacctcaacatggagggcaccgaagtggaatacctatcatctctgtccgccctcaattcgttgattcacctcgacatttcgcatctcaaatacaagctcgaagacatctcaccggtgtccggtatcactgcgttgcttcacctgaacatggagggcacacgtgtaccctctatatcagtactgtccggcctcacttcgttggttcatctgaacatggcgtacacatgtgtggtcgaagaccgagtaccgatgtccggctccatttcgtcttgtcgccggagcaaggtgctcgacatatcgccgctggcaggactcgcttcgttgattcacctgaacatgaagggcacacgtgtgaaagacatatcaaccactggcaggactcgctttgttgattcacctggacatgaagggcaccgacgtggaagacatatcaccactggcaggactcgcttcgttgattcacctgaactgaagggcaccgacgtggaagacatatcaccactggcaggactcaattcattggtgcacctggacatttcgaaaaccgacgtggacgacatatcaccgctggcaggactcacttcgttggttcatctgaacatggagggaaccgacgtggacgacatatcacctctggaaggactcacttcgttgacgtacaatggatggaatgatgtgtaaaattgtttcaacggggggtgtcatgatacagtccagccaaagcaggaccaaatgcaatgggatgattctccccacaccctatcagcatcccttttggtctggttgatattgcccagctgctaacagaaacctcggcagggagtcgaacattacataatatcgatcccaaaaatttccctcttgtatgtgttgtcttctgctacaggcattcgctcgacacgtactgctagcaggcgggcgaagcgggtacgcttgagggggagtgcgcgtgcggtgattgaagtcaactatcgagcttggaaccatttgcgtcctaggccacaacctggaatccagttttgtcaatatgctttggccgacttgaagcgcaagaattcggggagtggcgggttggggacatgtaaacaatgtggattttgatagtagctgcatttaggtcacggtttacaaacagacttgcggcgtgttgctgcctggtggaatgcaccatatcaatcgcgaagccgtgcgcccttagttttcgggttgatgcacctctggagacggttctgtccgtgtggccagatctttgtacggaattcgtcaatgacggcacactcgccccttgaggcgaacgggtctctaacgctttgaaccgcttcgttgtaggggacagaaatcagatatatagtttcacagacaggcccgctgggaggactgacgtgctttattttctgggttgctggcccaagcctgttctatgctacacgcaacgtgaatcattctttgatacctcaaatccgaagcagctttaccttatgacgaagaacagcaaggctgcatggagtggggacgtctatttttaatagtcggagggagcggcggcgtaagaaactcttgaaccctacatccgatgtggtaggtttatgccgttgtccaacttgtttttagtggtgtttatgagacaacagggcgtcgagagcgttgtcattggcttactgaccggcagtagtccacgtctacgctgcgagcggggcttgtggggccaagtgttagcatgtgctactccccggcacgacaatcgaccgtcggtgtccaagttgtacatagagattgtattgtgattcttatactgtacagattgactggcgcggggggtctttgtgtacgggctgctggtgctcgtgcgtctgatgccacaactgccagtgtcgatgagctgggatatctcttcgttggtggcgcgttgtcggcagggggtcgggtggcggtgggacaggcttcaacgtgggcaggtgccacgctaacctacggttcactccttcaggtggaaaatagtatatggtgagggaaaatggctttattacagctaagcgaaatcaagaactatttgaagaacatagaaagtggcgacgcatcacaagagcacacgcttgatggacttatctcacagcaacatgggtattggaatcaggtgcgtggaagatgcactggtgagggcaatacaaagagtcggaacaaaaggggatcctggttcaacattcagatgcatggtgggggactgaccgattccatgaaagctctcgaaaacttgctagaccgaactgatgcaaaggagctgaatacaccctgtcacaaatgtggacgatagtttacatccgtactacacaccatggcgtacatgtgtgttttgaaaaagacgttccgctcgggaagtggtcttcaagttttgccattaaactggcggagtgtggggcagtgacagatatccctaattggtggagtactgacatgaaaagagttgcgcatacctgtcaggaaccaggtacacaatagatgcggtggtcctgtcaaataattgagtgcgagtcacatggcgaccgacctctcgcatcacggcggaacatgtcggagtcgactcacagagagagaccattacagtcggcggaacgatgtcgacttacgggggacgatcgctcgctcgcatcgcaaagaagtcgatactctatccgattttataaaatttctaatcaggatttagagtctcctgaaagactcgctagctcggagacatcagcacatgaagttcatttgtagttcagagaactcgcggacgaggcgccttcggcacaacacatacgtgggatcgtagatgcttttttccgaaattgggttggatgagttggatagcgtttttacgcctaatatggtgggcacgccacgcttgtttggatctttttagcatatttcgtaagtgtgacattctcaacgatataatttatttgtaattgttggtggtatgtctcgcttgtgcgtatacacttctacaccggtcagatagccttgctggcacaatccagaagctccacatgtaatcatggcttccttcatattgctgaagatgacgatgaggttggatctcatatgtgtcgcatatgaatccgtccagtatcattaaacacggttttgtggatatccaactggggtcgattgtggactgttctcaaaatatttgtgtttactccagaacttcacgcaggtgtcgtctaggtctgaaaagacaaaattctcccagccatgcatttatgaaacatttgtttcatggtcgagttgttttcttatacagtcgagctccatctacagttgttctcaaataaagtgggacaccttataatccagactgcagatcgttgcttttgggtaacgttggggggtgcagcaggttgagaggttctcgaagatattccgagtagcctctttggtaaaccgttcaaccgtcgaatgtcgacaatggatccactttcatcgaagactcgttcaaatacagtcgacggaatgtacatgtgactgtcatgtattcaaagcggtatttttaatgataactgactcctgcctgcaacacgtcatgcctcaaagttggcagcggacgacccgcatcctcacacacgcacggcggcgggtcttacgcaaccgcatgtactcaaacgaaagccgtgtgtataagcaggcttggaaatggaaaaacgttgggtgcatgagctcacctacgtgcgatgagatttagcttcgtaactagcatggatcgatacagaatactatacaactgcacgaaaaacataacagcaagcagctccagaatgcccttttcctgagcggaagatacccgaatacccttacgtaatcgtccataatcaatattggatccatgtattcccacgcgtttgccgtgtacgtcttttctatctctacaatcttcttcaatcgagcagcattctggtcgtactcaattttggcaccagataataggtggattgtcgtgccgtcaaacgtgaacatagtcttattcatcacgttcgatgtacgcctgaagtagaatgtctctttgtacaggtcgagtatttctaaacatttattggcgtcgtcctcattatcgaataccaccgttccatgtaaaatattttttttgccattccacgtactgcctgaaactgtgaaacacgcatacatgcttgtatccaacttcttgaagttatccattgaagtttagggtttaggatcaaacaagaatgaaagacaagccatttgcccaccgtgcagctgcatgaagggcgacacactcacacacgcgtcgcggcggctgctgtcgagatgatgttgttgcccaccaaccactcactcactcactctcactcattacactcgacggaatactaaaatgaaaccgtttctggagtgtacggcacaccttacggtgtaccaaatggtgtagcaacccacggggcagtggaacaccaatacgattttgaatcaacaaattgcaggatgttaacgagaatatcgtggttctttttagatcacggctctccatcctgcagactccgtatcgttcttattgtcggtactttcgagagtgtccattgaaggaccagccgcacttaagcgatcgactcttccccggtaccgtggcccaaaagaacacggggtcttttgttgatgtgcaattgcgtcatgaaaggagggtttctttgctggacgggccattttgtaggaccatccactcgtacactataatgtctgtcgacgcattataccgtttattgggatgtttcattttactgttccgccgactgtaggttacaccgcaaggtgtgccgtacacgaagactgtatgttgattagcttgtgcagtacacgaagactgtatgtttattatcttgtgccgtacacgaagactgtatgttgattatctttgcttgctggctttcgtagtaggacattggttgctgccacgaaaccggtgcgcaacaataagctaaagccaaagacacaacaacaatggacagcgctgtacacaccaatgctctggaatacctcagcgaggtcatcttgtttatacattatcagctattaagcacttctaagaggtggacaggagatgtatgcagcggagacagacgcgccaatctatacaattgttctcaaataattttgggacactcagtataatttgaatgatatcccctgaaaccaggtacaggtccgtggttcactacaaatattttttgaggagtctcaggaaggtttgtaatatataatgggcgttcctgcctcccggccgatttttttaaatttctaatcaggatttagagcctcctgaacgactcgttagcttgagacatcagcacaaaggaatcacaaatccgctccatacaatgtttcgcaaccagtcaaaatcggccgggaggcaggaacgcccattatatacaacgtgtccaagagctcactacatagatgggtcaatgctgatcaggtgggtaaaagtaagcgtttaaaacgaaaaaggaaagaattgtccatgcttttacgttccacgatatccaataatattgcagagaaccccttcataacatgcaaggatttggtcggtataatttgcaagagttgtaatgtgagattatcgatcagtactgcatcgagacacataaaaaaatgtggattttctaggaagaaggcgtttccacagttctctacggacattcaaaagaaaatgtagaaatgttttgtgacaagtacagagaaagctctaacgttgtttgtatcgacgaagcaggattttacgctggagaacacatgctgtcaccagattttcgattatatgccctggttgctgtatcatatgccctggttgcacgaaactatagctatatcggatacagataagggtgttggatttgtccttgttaatctctttg

SEQ ID NO: 190 - DNA, 22439 bp, unidentified
  misc_feature 1..22439: note = Fanzor polypeptide
  source 1..22439: mol_type = other DNA
tttaaagattctcagaccacgcgatcgaggactcggggatgataccggcactcacctgccatagctggtacttagccaactgcttcaccaacttaattccgttcttgcgggtctcatatgaagtctcaatcgtgtctacgaaacggtcaacaagaacgtcacttgtaaaagcacactgacgcaggcaactgaacttttcgaaagaaagaatatcctcgatgttcttgctactacacaactgagctagggcaatggacaaattacccttcgtagtgctcataaccacttgaaacccctcgcgactgatgttcatatgcaaaagggggatgatacccttcacataatcactcgagtgaaagaagccctccttctcggaaaaatgaatgtcgtgtgattgagcattcaacatgaacacagccagcttagctgcaaaagtcgcatctccagaattcttcttacgttttgaagtagaagaggaattgcggggtgttgaagacattttacatacacatgtatacatgtataaaaaaataggaacgactcgctacagtcggcggaacagtaaagttgtatacaggatggacacaaagaccgtatcgtagtacgcgccttttcatgcgctccggcgtgatccagagtttgtgatcaactcgttcactaccgccgtgatgcattcgcattcgaacaccaagctgtgatatgaatcgtcagcatggcaaaccgtatgtttgccgaaactacgcagtgtggcatacaatccgatgcggtctccgacatgcaacggcgtgtccccagtggtgcatgacaggctgcatgtgccctcgccagcatcactcgtgtcatagatggtggtgtaacgaggcacggacactgtgatggtccgtggtggcaggaacaccgcctcgtccacatcaaaccatttcttgatcatgtcccttcgtagggcgtctaccgcatgccatgtgtgttcgtcacctattttgagttgcagggtggcaccggtcttgaatgtgccgttgcctgacggactgaatatctcaacgatttctcccataggaatggtgacaaaggcgcacgggacatgactggggaacttctcacaggcaccggtggcatctgccccgatcacgatcatattggtaaacccttacagttgttctcaaataaagtgggacacaccttatactcatccagactgcagatcgttgcttttgggcaacgttggggggtgcagcaggttgaagaggttctcgaagatgatattccgtgtagactctttggtaaaaaccgttcaaacgtctgtgtccccatatcagtatcagggggcgggggtgggggtggggttgtcgaggaacttctcggcgcgtctcggagaaacgcgagaggacgctctctctcaaagacttggtgaagtgtaagcatcaggatgttcctggaagcgttcacatcgcggtcccaagtcttccagcagtgaagcataccaccgctctgttggcgtggcgctccgctttgactgcttttgcagtggagaatcttatgaatccgcttgcgtcattctgtacattcccaacctgtaccgtcttgtttcttacgatgagtgagtgccaccgtgttgcaaaggtggtccactcatcgtaagaaacagaatcgagcctcgagtgcaatttgtggctcacgcccgactgcaggtcaagctgttgcagctgtcgcgcacacgcagtataccagcagacgtatgtgtacgaacgcgggtgtcagtgccatctcttggagcatcacgacatcatcgcatgcacagctcagagaaattccatgcagcaagaaagccgccgtgtcgtgggtgagaatgaatggacggatggggggcatgcgaaagccgcatgtgacaaaaaaattgactgaattgtcataaaagaaaccgataaccaccacaaacacccacaaacacaatggcaaactttactgaattatacaacgatgttgccaatgacacttcgggcgttccgtcggatccattttgcgatcgcgcaagagaactcattccgcccatggcgcgcgtttgggaggtacttgcaaagctcgccgttcaatcgtgggacaacgaaatacaaaaggtctgctacggagaatttttgactgccaacgactacacaaacggaaaccacgccaagctgtttatcctcaatctgatgacagtctcgccggataatatcatatgcgatccccgcttccaaggcatgcttcttggtttggaagccgtcttccagtacaatcctttttgttccgatcaccctcacatcacacgcaagattgtaagcagtctgttcattgagatggatgacgagatgatcgattgggtgtcatctgatggattcgtcaatatggattgggactttgtacagaacatagcgtcccagtggttgcgagcgtggtgctcggcgcgcaagatccagcgcatgtaccgcaagtacatcgagcacaaaaagatccagcgccaaaagcgcctcctcatcacaatccccaggatcgtgacattgctcaaggattgcaagggtcgcgaataagtaattattcgagaacaactttttttttacctttttcctcaaagtccagacactgcatcacccggctcggatgccaggtccgccgaatgagctcctccctgatgacgtccagtgacgctttcttcatccggaccatgacgcgccagtctgtattccgatgagcaaactccagtgttgccaagttgctgcagctctgcaattgtcaggttgcatttcatgcatcggtatggttgtaattctgccatttctagcagaccacatttccaaatgtgtttgcccctattgcggtttagaaggtcttcgctgagtttgaactcgggatgttgcattcttgtcctcccacgcgggtgttgcattctggggatgatatccatttagttgtagagattcttatattatttatcaattctgagatgattcgcattcggaagagaattttttacctcaagaaagagtttagggaccagacaacaaatttcttggccgcttgctacgatgtgttgttggtaactcaattggagacggcaaagatgacaatcagtgctgaacgggagctgacaaccaaggttgcccgtcagatgctgactttgagccactctgtgctgttcaatcggctgaaggagaagtaatgggcgttcctgcctcccggccgattttgactggttgcgaaacatggtatggagcggaattgtgattccttgcttatgtctcaagctagcgagtcgttcaagaggctctaaatcctgattataaatttaaaaaaatcggccgggaggcaggaacgcccattacatgcaagaacactgtcccgtactcttcacacttaatgggcgttcctgcctcccggccgatttttttaaatttataatcaggatttagagcctcctgaacgactcgctagcttgagacatcagcacaaaggaatcacaaatccgctccataccatgtttcgcaaccagtcagaatcggccgggaggcaggaacgcccattatgtgcttgagcattacctatgtgcggtttcttaaacaagtggagagacatacacctgtcaattcacctgcgacagagacattttggggggagctggcatcttcctgaagtcagttcgaacagaaaatccctgttcgtaaaggacagcatcccagggggagttgacccctatgatacccctatggagaattcattgtctttcttaccctggacccccggatgggtaataagaaattcataggttagaggatatacgggtagattaaattcaacggaacagaaacaatgcactcgatcaatgcgtgtgtccatcgagagagtgtatgttgacctcagcatcatgcagttcgccgtcccaacaggagcagttctgcgcttgtatctgttatgatggccttggccagctcccaccagggactctggtagcaccacagcccggtgcccagatgcaccgaccggcccggaaccctccagtggttggcgtcccccatgaaattcatgtactgctggtgcatagcgccacctgccgcccattccgcgcactggcacaggaaccggtgacattcgtacagctcctccgagctgttcatggtcatccccgcgttgatgccgagcactatgaactgctccgcaggccgcagcgcatgctgtcgctgcaagaatgttgtcaggtccttgaatgaaaacaacaacgctggtcggggctgctgatcactcagcccgtccgcatagcacttcacattctgtaacgaccgcgtggtaaagcatgtgtccagaaaagctacctgttgcttccgcaccccgtcagtgcataaacacccgcccacattccccatagcgtgcagcagcgccacctcgttctctgcgctcccagcccctatgaacgctatacatgacaccgccttgccgggcactagagcacccctaacctctctcgccaccgcatcccagtctagtgcaggacagatcacctcgcgctgaccctccgacagcactagcactttgttctcccactgcattcttccgatccattatctcattcagctcccccttaacctcgtttgacctgaatcttgaattggtcaactatggaagcttcgagagcagaccaactacgacttggcttgtgagtttcgcacagttcactcgcgattctgagaccggagatcgcggaaacacattcaataggtgagtttgcatcggggatctcaaagtttgtttggtgtgactttctttccatttgatgcgcagacattctcattcattcgcacgcatccccccctcgcaactaaatcgaggacaactaaacagcaatctggtccagaacgacgaacatcttcctaatcttcgtcggcacatactgagcgtcgattgtaggagatgctgcgcgtagcgcattcgcgtctggctcccctaccatacttattatgttctctatcacgtcaggtggaattgatgacaatagggttgggtccaactgtctggcaagacaagtggtttcgtttgggcagaagcggattacggaatcgcccacaacagcgtcggatgcaatgatgcgggttagtctcctttctaatacattccactccacataaatctcaacaatgcatgccctccgtctaggtccatccttattgttctcccatgctcgcatgtgctccaacggtgtcagtctcctcataagcgcacagacgagtccgttgagattgcatttgcggatatgaatattctcatgccacattttttgagggtctaagggtatgctatcgtccttgacgtacgcctcgaacgcattgcgttgtagaaacaaaacctgcaaacggtcaggaaatccaaacaattgacgcacatcggcataccttgcacattgcactccaatgttcaacgatttaaaacccaccttgaaaggcatacttgattatacatgcacagctttttactccttatgttgagcagtcgtcagtaccaacatccaggagtcattcctcgaatccgcgattcacctttcattaaataccgtctcaagcaggcgtctgcttaacaaactattccggtatcatgaaagggaatcgcgggacccacggagtggggcaggggaattcagctgcggactcgcggaaacacgtgtcctaggatctgacttgtccatcggaggaggacacatgcaaacggcggaacactgccgaatgtatcggaggacgcacgcaaacggcagatggacaatatactgtaacattattcaccggtctgagtgtaacagtgtcaaaaagtgcccggttaaaatctcgaatttagcgcaaccgccgcacaggtcaatgtcctaacaccgcacctgtgctccagcgcccgcactgcgtcgcgcacgtcgttgatctgttgttgcatgtgcatgttggctgcgatgagctcagcgcgcatatcattaatgtcgttcaaatgttgctgcatgcgttgcatgatgcggagctcgcatgcaacgaactgctcttgggtgacgtagaagggtagttggttttgcagggggggcggctccatgttcatgtccctaaaggcgcagcagacaagaaaacgctatatataaacgtacagagacaaagtgctgacgattgaatgcaatctcatgcatctcacctcaatgcatatcatctcaatgtcaaagcaatccaaagaatccatgcacgccggcggatcctcgtccagactcatcacgcacacgcacggaactgatgcggcggcggcggcttatcgcccagccccatcatgcacggcagagtcagcgtctcgtccatccttatcacacatcatgccacgcggcggcttgagaaggacacactggaaatcgatcgtcattgattgcagcataacaacaacacggcgttaaaaaggaaattacagcgtgtcccactttatttgagagtaggagcacatgatggcgtccgtgaagactcgtcgcgccttgttcatttttccaagttactagacggtttgggacccgtgcttatgcacacattgcaagagtgtggtacgctgccaagggacttgaaggggtacagatgtggcggagccatgaaggaccatgatgtttttgtcaacaaggttttgggttctggtatggagatcaatgttctcgaaggcaccgtgtgccggaggaccgtcatggaccaattggcttggttgttggagccctcagtggacgttgctcttttgttattctgtgggcatggcatgaatgaggggtcgccacgtcacggtacattggtatgttcttacaaacagctggtgtcagctgaggccatcgatgcggtggtggcagctcaacgtttttgcggcacactcatccgcgtgctcaacatgtgcgaagaaaatgccattgcccccggccctggtctgccgttccagcacggaagatctctgcttgacgcatcaagagcagatcatgatgcacagttccatctcgttgcacacaaggacgtgatgttgttggcaactgggacttttgaagaaacggcaggtggcaaggcaggcacacccttcatcgctgccctgggcagaatgtttgacgcagagtcgatcttaacctacgagcgccttgatgagctcttgcagaggcactggcctggtggcagtgggagggcactgctgtatcctgcaaggttgaaagggatcttcggatggccggctaatggttcacaggtgagtggcgattctgcttgacaatatgtgggtatttacatggaatcgttttcaccccataatatagggaccctatcccagacaaggccctttgttaaaggggaactaaaaaaggtttagtagatttgtgtgtttttgtgtttccgtgttttgaatgagccaccgcatcttacgcaatcgcatttacggtaggtccgtaggactgtcatccaaagaaaaccgaatggtcccaagcaggcttctgcttgacaataagtgtatttacatggaatcgttttcaccccataacacatatacactaatacacaatttttaaggatattagaatagtaatatagggacccagtcctagacaaggccctttgttaacggggaactaaaaaaggtttagtagatttgtgtgtttttgtgtttccgtgttttgaatgagccaccgcatcttacgcaatcgcatttacggtaggtccgtaggactgtcacccaaagaaaaccgaatggtcccaagcaggcttctgcttgacaataagtgtatttacatggaatcgttttcaccccataaaacatatacactaatacacaatttttaaggatattagaatagtaatatagggacccagtcctagacaaggccctttgttaaaggggaactaaaaaaggtttagtagatttgtgtgtttttgtgtttccatgttttgaatgagccaccgcatcttacgcaatcgcatttacggtaggtccgtaggactgtcatccaaagaaaaccgaatggtcccaagcaggcttctgcttgacaataagtgtatttacatggaatcgttttcaccccataacacatatacactaatacacaatttttaaggatattagaatagtaatatagggacccagtcctagacaaggccctttgttaaaggggaactaaaaaaggtttagtagatttgtgtgtttttgtgtttccgtgttttgaatgagccaccgcatcttacgcaatcgcatttacggtaggtccgtaggactgtcatccaaagaaaaccgaatggtcccaagcaggcttctgcttgacaataagtgtatttacatggaatcgttttcaccccataacacatatacactaatacactatttttaaggatattagaatagtaatatagggacccagtcctagacaaggccctttgttaaaggggaactaaaaaaggtttagtagatttgtgtgtttttgtgtttccgtgttttgaatgagccaccgcatcttacgcaatcgcatttacggtaggtccgtaggactgtcatccaaagaaaaccgaatggtcccaagcaggcttctgcttgacaataagtgtatttacatggaatcgttttcaccccataacacatatacactaatacacaatttttaaggatattagaatagtaatatagggacccagtcctagacaaggccctttgttaaaggggaactaaaaaaggtttagtagatttgtgtgtttttgtgtttccgtgtttgaatgagccaccgcatcttacgcaatcgcatttacggtaggtccgtaggactgtcatccaaagaaaaccgaatggtcccaagcaggcttctgcttgacaataagtgtatttacatggaatcgttttcaccccataacacatatacactaatacacaatttttaaggatattagaatagtaatatagggacccagtcctagacaaggccctttgttaaaggggaactaaaaaaggtttagtagatttgtgtgtttttgtgtttccgtgttttgaatgagccaccgcatcttacgcaatcgcatttacggtaggtccgtaggactgtcatccaaagaaaaccgaatggtcccaagcaggcttctgcttgacaataagtgtatttacatggaatcgttttcaccccataacacatatacactaatacactatttttaaggatattagaatagtaatatagggacccagtcctagacaaggccctttgttaaaggggaactaaaaaaggtttagtagatttgtgtgtttttgtgtttccatgttttgaatgagccaccgcatcttacgcaatcgcatttacggtaggtccgtaggactgtcatccaaagaaaaccgaatggtcccaagcaggcttctgcttgacaataagtgtatttacatggaatcgttttcaccccataacacatatacactaatacacaatttttaaggatattagaatagtaatatagggacccagtcctagacaaggccctttgttaaaggggaactaaaaaaggtttagtagatttgtgtgtttttgtgtttccgtgttttgaatgagccaccgcatcttacgcaatcgcatttacggtaggtccgtaggactgtcatccaaagaaaaccgaatggtcccaagcaggcttctgcttgacaataagtgtatttacagttcgttgtgaagaaaggatctgtgaagaagacggacttcgctgcatttattgactctttgagtttgtgcaataattcagtagtaataatggacaacgccagtatccataagaacttggtcctcagaagccccgtaaatatttgttacactcctccttacagtccagaattcaatgctattgagctatgcttcgctaaagtgaagaaggactttcgtcgattgaactatataccaaacgatacaaagacgcacgtgtctgatatgatttccttagcattcagcaacctcactgataaaatcattatgggttgttttgaccacgtatggaacacgtatgtgatgtttgtataaagagttctgtgatgtataaattatgtaagatggcaacgaaacctccgacagtcgcgaaattgaaggagctactaaaattggccgaagtagcatactcatcaaaggacaagaaggacgatattgtccgtttatgcgaagacaatggtctcatcgccagaccccctccagaatacaagacggtggaaaagatgtgtgtcgtgaaatgcgccctgaagaaggcaatgagtcttgacgatgaagaattcggtaagtttagggagcatgtggaccagctcgtcaatgtggtgagccgcatgttacggcggtccagtcttgtgctgactttccacatcacgagtctattagagaaaggtctggatattccagacctgtacaacatgaaagatacctactggaaggattggctccgtatcggggtagacggaatcttctctgatgaggaaagcaagatatcgtacgaagctgtgaaggactccatcggcgatgtaattggtaatgacgacgctgactacatcaagtcttatccgatctatttcgatcaggtattgaactatgcaggtcacacattgagcactgtcgtgtcaaacaacgcatgggttcctttgataccacgtctggccagactcacttccaccactttaaataaattaaatgccccgaagacgctggacacatcgaagatcattcggggatacgacgtgatgcaggctattcagcaagaagtccaaaacatggagggatggccagagtctgttcaagagtacgtcaatgaagttagggagatgctgagtgttccagatggaagtcgagtttatgataactatggcaaagacatggactttccgaccatggtccggtttaattattggatacagacacggttggaggatatggatgcacgtcgtatccgattgatgcccatcttcaatgtccaacgggtgcatgttcgccttgacctgaagaccctcgtgaacctgttcaggcacatgttccccaatgaccagaacatcgttgagctttccaagtgggaacatgtaaagaatcccgacagcttcatgttgtcccagaggcctgcacagaagaagaaaaaatcatgtggtcctggtgaatgggaggcatacaagtcggtcatgaagcagtacgatgatgatgttaaggatatcaaggctactgacgagtacagacatgcaaagggtttgtatgacacgcttgtgaacgcccgaaaaacagtcgcaggttccttcttcagaaaaccacctgtcaagaatgggtgggttttcgagtgcagcatctgtactgacggagtctccttgagcatgcagtacagcaagacagtacaggtccttgtctcagatctgaagaagacctgtaagaaccctcgtaaagaagaaggtatcaagatcgcagaaaaatacgacggctcacttaaaacgatatttcccgatatgggtatcgtcgtcctgggtgtggacccaggacggagcaacatcgctacggtaacgtatttggcagacgataaaaataagacatggaagctgacacgtggtgcattttaccacaagtcgggtatcaagaagcagacaaggcagaaggaactgcgttttgctgacatgattcctatgtgggagtctctgcgtgaaaatggagcagctttgagtacatcgaggacggataatatctcggcgtacttgtcaaattacgctaagttttctgacgagtggtggagattggctttgcgacgccgagaatcccgtgacaacttgcagcgttacatcggaaaacgaaaggtcaaagactctttctgggcgggtatcaagcggtgcatgatgaaagaacttcctgatatgaaggtttgcgtggcctacggatctgccatcacgaaactgaagcctactggaccgggagaagttgcagttcccactggggccatgttcgcatcgtgtaaaagaattttcaaagaggacgtttctgtgacagatgagttcaaaacgactcttatgtcgtgggagacgggtaaagaaaaagaacgtgtttacaagatcccaagtgtttgttcagcagacgtgaagcttaggttgggtggtgaacgttttggtcacacgaaatcgaaaacgatgccaaaggtcgctgattgcgaccacttaggggtaaggttgtacaataaacgtaaaggcgcacaagagaagcacaggaggggtggcttcgccacttcccttgtcgattctcaaaaatcgatcgagcggtacccagaggtacgaggactgcgattctctccagaaacatgcatttactcggaccgggatcgctcttctgctctcacaatcgcaaggctgcactgcatggaattgatgggtctaggacgacctcttccatttgcccacagcagctctgttgttgttgatgaataaaaactcgtattgttgtagacaccactcggtccccctccggtggtcgcgacaacattaggttacaccgcaaggtgtaccgtacactcccaaaagcggtttcattttagtattccgtcgagtgtaaaggtaacgcttttgcttttatggttcggaatcgggggtgaagaagacaaggttcttgaaacctcgaccacccctcacaccggcgacgctgcagttagtgtcaggaatagcccccattttcttgagtcttgtttgcagagtctttttgttcattttgaaatcccgggcaaatgcattgatatccttcagaagaacgatgtctgtggcggagtctgtgactgaaaagtactgattgacgagcacaagctcgtcgccctcatctactcggagtctgtaggtttcacgctgcacgtcagaagacatttgcacgggagaggagcggtgagcgtcgagaacgagccacgtgaaggcatcgatcacgtcagctcgaccgcagtataccttcatgcttggatcgctctctctgtagaatggaagccaagggatgctaccgccctgccccggagtcacgaacttgaacgggaattcgaaaacgatcgcctgttcgagaacgtccactgcagaaatttgaggcatctcgttcagattcatgaacagacgtgatgcagtacggacttctctttcgttttcgtagtttcgtctagccttgatgacgtccccaccagactgaaacttttttatcagacccccgtcgagcttgactcgagagttacccgcgtcgatcttgacttcgttagtgtaagtctgacgggagaactcacagtcgatcacccatgactgagctttgacgtccgttgcactggcgttcagcatgagctgagaagaatcgatagtgttcacatacggaccgaatgcgttctggttgatcgtctgaagcagacccttaccagagttcctctcaccgatcatgacagcccagttcttgtccttgtactcaccggccatcgcgcgggcgatcatctgaaggtacgtgtcaaccttgccggcagtgcccaacgtgctattcagaagcttatccatgacgtcctgtaaaacgtcgggggaggggcgacaggaggggaagtcacggttcacacagagctcctggagggggatcacatctggtttgccttcatatggggtgaacgatttgtcaaggaagtcgtacacaccgttgttgaagcagagcacgccgatgttcgactcccatatcttgtctctgaacgagttgtccttaggggagaagtgacggatgttcttagcgatcgcagtggacttggatatgatgcagctgtattttctagcgttgccaccgtcgtcgatgaacttgatgttcgagctcatgcaagcttggaaaacaaaagattcaacgtcatccttgttgctcgtccacttaccgtactctttcacgaacaacgtgttgttgcatttaaggatggtaccctccaggtcctgcaacacaagatgaatggcagaatcctcgcctccaacgtgcctgagaggttttaagatagaattgtactccgcgagggggacgtccagcatttcgcaagtcatgtctttaatcttcacgagtatacgataaccagttcgatcaaagatgtaatgcgatatgtcttagcagcatctccgccgttattccaccggactctatgtcaaccttcttctcaaccattgctccgtcaaacatcagtacgcccaccacaaagtggtgctggtgcaggtaatccttcatggacatcaagcactcgttctctatatcacacaacatgatgtttagagcagacgcacgcgtgttaccatcttttttagcgatatccatgtacgcgttcgaggggcccgtaggacccaacaggtcggcggatattgtttttatctcattgtagaacttgcccagccactgggaagagtaattttcgacgacggccttatgcccaccgttgaggacagacaacacggccaacttactgcatgcataatcaccagaaatggtctgcaacacatcggctcggtggtcgcagtaatgctgcaacagggggcatgggataccgacgcgatggcacttctgagacagcaacgaagggtggcagttcacgaaatccaggtccacgtaaaaggggtgagcgatggcgttcctgatctctctggcgatatactgcatggacacaccacgtttggcaaacagccggccatgtccatggggctgcttagaatacttcacagtcacaacctcgccatcggccgcagcaatgtaacgctcaagccagattgtacatgcaagacttgtctgtgtcggggcggaaattccaagagtcccagtgggacaagatgtacttcagagccccaacagaaaacttctcgctcaaaacaatgtcggacattagtatgtgagtctgtgatgatacagtcaaacagcatgttctcattatacttgttgtaaattgttcttcgaaccaaaccaagtttagtaaattggcgtgtttttgtgtttccgtgttttgcattagccaccgcatcttacgcaaccgcattcactgtggtactggggtcatccaaagaaaccgcacgatcacaagcaggctctatttgtttctgaagggggagcgccggcagattggattcattttgatgactcgcgtacaccattcactgtaacgcttgggcttctcactgtaacacttgggcttctcaccttacatcaggcagaggcctcaatcaagcaccctttgttcatgcttcaagtacttggctgcagtctgagttggacaattatttttacatggcagaccacaagacgaggactgactgaccaagacgtcttcagacgatccaccgcgcacaaaatcatcttatatcaaacggcggaacgatgtcgatactcttgggggagcacttattggatgtgattcggtgatgattggtgtctccttggtggattggatgtgacggcctcgtccatcattataaagggtgtcccgctttatttgagaataactatagaatgacagattacgcttcggacatcactgtgtcgggtacgtccgacttgatttgcactggggtccaagatgttaatcttgatacaattgaaaagcaaaaaacattggaattggcccgcctcatgagaggcctcgtgcctgaatggggtagtgattacatcgaacgatacattcctaacgagctcctgtgccagttgcacaacaagagaacatggatggatgaagatggattttggtggggatttgacaaagtttgtgccaggaagtataagcagattgacgtcattattcttgctacgaagtatcacggaattgggacatatgaacataaagtactggtcactctaaataattcggtacaagtggtgtgggaagacgatttatggtgattctgatgctctttgaatcatacggaacatcgcatgttttgcatggcagccaatggccccaaatagcaatggggtactcaaagaacagcagtagaaaccacagtgaatgcggttgcgtaagactcaatgcggctttaatcgacgacaagtgtttcgtgtgcgtttctaaaaaacgagtctaaacaactcaacatacatacctgataaaaaccgttgagcgattgcgcgaagaaaaagagtattcatcgacgcgatgccgaccgatatatatatcccaccttgtcagcccatttcaaaaccagtccgcaaactaggaaaggcgttgtcgctggacatggacattctcggcacaaccaagtttcttgatcgcctccactgccagaatgtcagacgtctccatgcactgcgggcgtcatcggctgtttccggtgatccacgcatcttgaagtatgacgcattgcttcaccttattaaacaaagacaccacacatccccaccgtcacgtttgttcctcgtcgctgtggagtacttcttcgatgacggctgctacaagatctccaacggaagcgcccttgtattctcacatgctatcaacacccttttcgttgtggagccgaaaatcctcaaacccccccctgcccagtatggacatgccaaggtgtcgaaagccatacagcaggccactatgggcgcgactagacttttgtcctggctaccgcatctcataaacatggacctgaaagacggaacctcacttggatatgtgaaaatttctcgtatgatcgtgaccgctgtgaatcgcggtggacgcgtcttctgtcaagatatccacagccaggaaatttactaagaattggaggaggaagacccatacagctagggacatttgatattgggacaccttatatttggggattctgaaaagttgaccaattcaagatttgtaaccgagtacagtgatcagttccaagtaccagtctgagtcattgatgttcaagcctcctcatgtgattgtgttcagcaacaggacttgagttcctttagttgagcggatttgtgattccttggtgctgatgtctcaagctaacgagtcgttcaggaagctctaaatcctgattagaaatttaaaaaaaatcggccgggaggcaggaacgcccattatgttcaaagtaccctgaaaagtcaaactgatggctaacatcgtgcgcatcaataatcctttagcagaaacggcagcaattagtgtcaatttggacattcgcaatgtcctagaaatttggatatttaaggaggacacgcaaacggcggaacactgtcgaatgtataggatgagtgtacacaagaggccgaacacggtcgaatggcacacgcaggccctcattgacacacgcaaacgtacattcatgacacacggatgcggtggcggattctcgtcctctactgaagtgtaaacaaccattcttcagtataaacaaccatcagcaagcacagcacagcacagcacagcacagcacagcacagcacagcacagcacagcacagcacagcacagcacagcacagcacagcacagcacagcacagcacagcacagcacagcacagcacagcacagcacagcacagcacagcacagcacagcacagcacagcacagcacagcacagcacagcacagcacagcacagcacagcacagcacagcacagcacagcacagcacagcacagcacagcacacttcacaaactaatgagttcctttgacgaaatcaatgaagatgtattggagatcattctatccaatgcgatttcgaacgaatcccacctcaaacaagtgcctctcgtttgcaaacagtggagatgcgtcgcaccccggtgtgtcaaaagtatccacttaagacattataacagtttggaatacgcattatcacgcatttgcaggctcgaagagttgaaaatcggtatcaatcgggggaaagacgtaccctaccaatcaatgtcggatatcgaaggcaagatccaagacatatcgccgctgtccggcctcacttcgttggttcacctggacatatcgaacacctacgtgaccgacatatcgccactgtacggactcacttcgttgacgcagctgaacatgtcgcacacacctctgtacaacatgcaagctctgtacggactcacttcgttgattcacctgaacatggcgcacacacttgttaccgacatatcaccactggccgccctcacttctttgattcacctagacatttcgctatcacagctttccggactcaccgctttggttcatctgaacatggcgtacacacgggacctattatcaccgctttccggcctcacttcgttgattcacctgaacatggcgtccacacgtgtggacgaaatatcaccactggcaggactcacttcattggtgcacctcgacatttcgaacaccgacgtggacgacatatcaccactggcaggactcacttcattggtgcacctcgacatttcgaacaccgacgtggacgacatatcaccactggaaggactcacttcattggtgcacctcgacatttcgaacaccgacgtggacgacatatcaccactggcaggactcacttcattggtgcacctcgacatttcgaacaccgacgtggacgacatatcaccgctttccggcctcacttcgttgacgtacttgaaaaatggatggaatgatgtgtaaaattgttcaacgggtccttagtaatattattgttcattttccgtttaaaatagggattgatttgagcctccggcattcaatgggcgttcctgcctcccggccgattttgactggttgcgaaacatggtatggagcggaattgtgattccttggtgcttatgtctcaaatgattattgttccagagatggagagtctttttagaggtgttcatgtggtaagggccataaactgagccgtctactgcgattcttaggccaaacggttatgggattgttaatgattgttgatgattcattcagatacctacaaaaccgcggggaggcagatgtgatgcagggaatgtattcagttcagcaaactgtgcgtcaatgatgagatggcatgccttccatgcatacctgaggcagcgacacattgttgcaaagtgctcgcagttgttaaatgcggcgttgtagacaaatggggttttctcagcatctttgaccagagcgagggcaaggcttgccgagagggtctgatccagagcagccccttcggggtacaaagcctccgcaaagatagagccgttggcaacgaagtcttcgtaggatcgcaatgagacgttggcctgctccttagaaattccccacacatcaacgactgtcgggacttcgatatcccctggtgccaccacttgctgcccgacaaagatgccatggtgcctgtaaccggatgcgtctttgaccatgatctgggcgccaggcttaagcttgccgaacatagcatagccgctcttgtacggcgtcagggcagcatatgggtgcccgaggtctggggttgaccaatctggaagcattcgcttgatgtgggcgattgccgatgtgaggatgtcggtaaggggatcttcccgagatgccatgtttgtctcaaattgagctgctgactcgtgttaagcttcgagatagataattatatagggatcttttttatgcgaacgtcattttctcattgcaacaccgggggggacatgggttttaattcagtacttttattgattgggtacaaggatacctggtacagatgggatttgtaaatgaggaatccgtattgtcgaagccgacagtgtgtgtgcttacagggttcaatactgtccaagacgcatttaagattgtccctcacaaacacattccatttgtcatacctctgaaaagactctccatcttgggaacaacaactatttcaacaaaaaataagaatcatccatcaatcaatccctatttttaacgtgttcacatgaacacctctgaaaagactctccatcttgggaacaacaactatttcgacaaaaaataagaatcatccatcaatcaatccctattttaaacgtgttcacatgaacacctctgaaaagactctccatcttgggaagaagaattatttcaacaaaaaataagaatcatcaatccatcaatcaatcaatcaatcatccctattttaaacgtgttcacatgaacacctctgaaaagaatatgttttagaggttgtttgtgtgtgaaattattctctctatttgaaaggcattttgaagagtccgcacatgcagacagccattaacatccacaattgctttacaatgtaccccacccgccccggaattcttgcgaggcccgagcaatattgcaaactggaagttaaggtaggccgcatgattgattacatgctgacaggttctttacagaacgcagtgtcgagcgaagtgtagaagataaacacatacaagaggacattgggaggacttgggattatgatgtaacataattcacttgtctgagtgtataagagaactgtgggaaacgccttcttcctagaaaatccacattgttttatgtgtcttcgatgccgtactgatcataatctcacattacaactcttgcaaattataccgaccgaatccttgcatgttatgaaggggttcctgtttgcgatcatgcaaagacctgtgttctcgtgcattgtacacatccccttcaatccaacgatgaagactgtgtccctacacgaccgatgcgggctccagaaaacgcccagaatacaaattgttacccatgcatatggtaggtggaccacgccacttccccaggctctggcgcggatcgcgcgtctccacccacaactcatccgagcgttgctgtaactctacgtacgtcggacgctcagaaaatagcctgcctaacaaacgcgcaaagtgcgtggcatgggacacattctgaacttcctgcggcccgctggagtaaataagcacccaggggaacggcgaacacgcgttccaaccatgggccactgctgatggctcgctcgcagacggctccgcgttgcagacgttgatggtgcataccacagtgcctttgtagcgcgcggcatgcaatgcagcagcgatgtctgacagcgcgatgcaactgccatcagccagaatcaactcagctcccttaccaccgtgaccacacagctgaatgagcaacaccgatgcttgctgtgatgcacgtgcctcgatctcctgcatgatgtactgccgtgtgaggctgctgcctgtgagcgtgtgtacgctgttgatctggtctgcgcctagcaccttgaggtgctctgtgcacattccagcctgtaggggccgtggcaaccgccccagacgctgcaagtatgcatgcactgcctgctccatcgcagctgttgtgccttcggcatccgtattgtttcccgagggcttcacccactcgtagttagggtacacagcaagcagctctagcgacagccccatgtctgtcacggaaacctcttcttcggtgcatgcgtcgcaaaaacacggtggatcaggccccatgccccttgccacatgatgcgacattgcttttaagcattgtgatgaacgcaacatcactgcacgccacaatgcatcttgcacgtgattagagaggttgagctcctttgcaaaacaaaagcggcaaaacgacgcccttgatggtgttggcacatcagaggggcaagcaagttcatccaatacaaagccgcgccaggcccaagacaccgccatgccacgccaggcatgtccctgtacccttttccctttatattgacaaggggtcctgtttaggcaatgcatgtgcagtgactgatcatggccgaaatgtacacgaaagcccaactcgatgatgccgtggctgcagagcgcgtgcgtactgacgttgttcagcgagcttacaaaacgctactggctcagacgcatgagcaacatcgtctactgaaccaggcgctgagcttggtttccaagcaggacgaggagatcgagaacctcaagtgcgtgattcttgctcgtgcactcatgaatagacgcggtgcgcgttgtgccccacaatgcatgcaatacaattttagcagtttcacatccattcagtatcccatctgatggcgatgggataattatacaacttagtgaatacaaagactcatgtggattgcaatgcctaaacaatttaaaatccaagtatgaattccgggtatgaatgactgtgtaagaatgctttgtttttgacaaaactcttgaaaaatcacatgcaagggtggacatgctgcatgctcgcggtgtgcatccacatgagaatgaatgaatgtacgtacaggggggggatgcgcaagccgcatccttggcatgtgtgaggatgaatggatgactcaacatgataaggaactctaaagaaaaacgttacaccgcaaccaacaagtcttacatcatttttttatttaaactatatacactttcattcattcattgaatgccaaaactacctaaagcgaaaaaagaaacgaagagtcgatc

SEQ ID NO: 191 - DNA, 20220 bp, unidentified
  misc_feature 1..20220: note = Fanzor polypeptide
  source 1..20220: mol_type = other DNA
ccaatccttccagtaggtatccttcatatcgtacatattaggaatcggcaggtcgccctccatgagcctcgtgacatggaaagtcagcaccagactggaacgccgcaacatgcggctcaccacattgacgagctgatccacatgctccctaaacttaccgaattcttcatcgtcaagactcattgccttcttcagggcgcatttcacgacacacatcttttccaccgtcttgtattctggagggggtctggcgatgagaccattgtcttcgcataaacggacaatatcgtccttcttgtcctttgatgagtatgctacttcggccaattttagtagccccttcaatttcgcgactgtcggaggtttcgttgccatcttacataatttatacatcacagaactctttatatcaacccccaaccccatgcctgccttccaatccagagcggcatggccacttggttgaagtttttatctgcataccgtttgcaattatatgtttcataatgtcgccagtcaaatcgagactgtcatgtggcttacattcgcaagtatagccactctcctcaaactttgcagcaatgtgtacatgtgtaccacaatcgaccgtctgtccaagttgtacatagagaattgtaattgattcaatatactgtaacattattgaccggtctgagtgtaacaaagggtttttgaggccattggaagtctgatcaaaaagacacagacgttggttgtctcaactcagctgtactcggtgccagccgcatctgaatccatgagcagcttgcagacatctgcgtgacctgccttggcagcctcacgcaaggcccagctgtctctagagttcgcccgggccctgaactcaattccagcaaccttcggatccatcagcagcttgcagacatctgagtgacctgccttggcagccgcccacaatgctctgctgtcgaaagtgtacgccctggccctgaactcaattccagccaccgctggatccatcagcagcttgcagagatctgcgtgacctaccttcgcagccagccgcaatgcccagctgttgacagagttcgcgcgggccctgaactcaagtccagccacctctggatccatgagcagcttgcagacatctgcgtgacctgccttggcagcctcacgcaaggccctgctgtcggtagagttcgccctagccctgaactcaattccagccacctctggatccatcagcagcttgcagacatctgcgtgacctgccttggcagcctcacgcaaggccctgctgtcggtagagttcgccctagccctgaactcaattccagccacctctggatccatcagcagcttgcagacatctgcgtgacctgccttggcagcctcacgcaaggccctgctgtcggtagagttcgccctagccctgaactcaattccagccaccactggatccatcagcagattgcagacatctgcgtgaccgtccttagcagcggcccacaatgccatgctatcgctagagttagcaagtgccctgaactcaattccagccacctctggatccatcagcagcttgcagacatctgcgtgaccagccatggcagccgcccacaaggccatgctgttgctagagttcgccctggccctgtactcaagtccagccacctctggatccatcagcatcttgcagacatctgtgtgacctgccttggcagccgcccacaaggcactgctggcggtagagttcgcccgggccctgaactcaagtccagccaccgctggatccatgagcagcttgcagacatctgcgtgaccttctctagcagcggcccacaatgccaagctgtcgctgttgttcgccctggccctgaactcaattccagccacctctggatccatcagcagcttgcagacatctgtgtgacctgccttggcagccgcccacaaggcactgctgtcgctagagttcgcccgggccctgaactcaagtccagccaccgctggatccatgagaagcttgcagacatctgcgtgaccttcatcggcagcctcacgcaatgccaagctgttgacagagttagcccgggccctgaactcaattccagccaccgctggatccatgagcagcttgcagacatctgcgtgaccggccttggcagccacatagagaagcttgttttcattttggttcgccctcaattgtagggccccctttacctgtacaagaggattggacaccaagcatactgctagaaggtcggcgcgcccccctttcgccatcatctctccaactcgctgtggtggttggatcagtccggtaaggggccatccagaaaatcttttgcacagagttttacacactaatacaatcttggggttggaagataatagggcaatacgatcaagaatgtcatggggaagcgttaggattaacgatgatcgcgtgtgcgaatgcatgttctataaacatgtgtgtacaatgcatgcaagcgcacaggatggtttatagttattataattttattataaaatggtctatagccttttataaaatcccaactcattatttatttatactaccgaggcccatgcacctcccttgtgacgcttgcgcaagtatttattcccccacttattgcagttcctagacctcggtgttgtcctcctgctccatcattttagtacgcacatggctggcggcttctactaagatgcccgcgccatcccaattgcaatgatccctacaatactgaccaccaggccgaaactggtgcctatgacgccgtacttgaacacctctctagaaaaagccgcaccctcatagcaccagctaccgaagtgctgacagttccttcccaacacattgtaatccgccctgccgagctgcgagcgtgcccttttgaccacctccaacggtgagaaacgacacctcgcattcacaacccgtgcagagctgccaactaccaggaactctgccagagtagtctcgctgatcaatcgctttccatggggctctgaccccgcatagtggatgaccttgatgtctgctgcagaggaataccattccgggggggcgctcacaatgccatcgtgctcgaacttgatgccgatggggttgacgcaatccacatgcatccacatgccagcctcgatgctcgccattttcttagtacccatggcagactttttctgcgaggggtgacatacgcaaccaggggaaacatgtcagcatatctgacacgtgtgttcgcgcgcccatgaaaatacgagtgtaaacgtggcatttctgccacgtttttcgcgctcctcgaagtcagcgaaagccgccttggtgtgtgtgaggatggtacgggtctgcgaaatcacagtgtgctgtgactcgactcgacagtttccgccgtgatgcgagaggtcgccatgtgatgtgatgtgactcgactcgacagatgccgccgtccttgatgagagtggtctgtcggtctccgatcctcgaaacacgagtgtaaacgttgttgtgaaacatgtacgtaattcccttgtccgattgtacaaaaagcaaccatgcaggagtcggaaccatccgagcaagtgaagaactactacatcgatttaaaacgcgaagatgcaattgctggattgaatggcctgttcggagtgtcacgcgaggactcaggtgcacgcctggtagagtacatgccatcccatgaccaaccaggtcccccgcatgcaaaacacaaatacacaaaaacaaaaaaaatggcgaaactttgactggttctcttttcacagagtgagtgtgtggacgagaaagaggctataggtttccgccgttgcgtttgcatgtgaactgtcaaggatctctcggaagtacagtcggagacgcaatttgtgaatgcaacgtgagcgagcagtcaacattgccagtctgcttatccagttgccccatgcaagcttgcacgagtaccgccttatcagatggaaatgtgagtggatcgccatgcttacggatcgtcagaaagacactctcacgattctatcttttggtattgtaagcatcatattaattgtcaatataggaaatgctctgttttatcgcacgaattggagcaatcacacacgaagaaataaaaacataacaaataatcaacctaaccacacttgccaagccatagatcccgtaagtgaaccagaatacaacatgagggaaatagcaaaacagtcaattctgcttgaggaacatctactcgtcagagacaaatactgcgcagactgtatcaagaaacatttcctacactgcattggtcttgctgaagaagcggcgatgctggtgtgtgggaaaaagcaagggaaccatttaccatacttaaacgaagcaggaccgttttacaaagccaaattcaatgaatggctaaacaaatgccccatgtggactcaggaaagcgcgaacacgagagtgaagattgcaggagaaataagggatttcaggaaagctatagtgaacgtgtacgcatcatgagcgtgattttttcaagaacctgtccaactcgaagcggtttcattttagtatttcgatgtctgatcgcacactcgaggttggcttacctctcgaatcgatgacatgacattggagtgagatgcgagatggtctatcttggctgcatcctgtacagcttgggctgacatgacattggagtgagatccgagatggtctatcctggctgcatcctgtacagcttgggctgacatgacattggagtgagatgcgagatggtctatcctggctgcatcctgtacagcttgggctgacatgacattggagtgagatgccagatggtctatcctggctgcatcctgtacagcttgggctgacatgacaacgacctgggcctccacttcttttttcgccttatccagtctttccaagtaagcgatgctgtcacctgcacaggttggaatgtgagcaagatggcggggacatttattggaatatggttggcaagggattccgtatttacgtcgagtgcagtccatgtaattcgctcacaatttatgtacactcaatcacaactatgactgtagaagtcgccagtatacagttgcgacccttcaacccattgcattgtactcacctacgggagtgtaatgaattctttcaggagtctgcgtcggcacacaacataactcgggtttgtattcacgtgtctccatgtttcctgaatagtcgctgcggctctgcgtcttcgcactaaacggcacgcgtcttggacggataccaacatgttgcggtttctactcaatacatgccagtcccatggtttgtccgggttactcgagacagtgtcccaagtggctactccgggattcgcactcaatccacaccaatcccacggcttgtccgggttactcgagacaatgtcctaagtggctactccgggattctcactcaatccacaccaatcccacggcttgtccgggttactcgagacaatgtcccaagtggctactccgggattcgcactcaaataataccaatcccacggcttgtccgggttactcgagacaatatcccaggtggctacactggggtttgtgctcaacaaataccaatcccatggtttgtccatgttactcgagacaatgtcccatgtggctacactggggtttgtgctcaaccaataccaatcccatggtttgtccgggttactcgagacaatatcccatgtggctaccccgggattcacactcaatccacaccaatcccacggcttgtccgggttactcgagacaatgtcccacgaggctacactggggtttttgctcaaacaataccaatcccatggtttgtccgggttactggagaaaatgtcccaggtggctactccgggattcgcactcaatccacgccagttccacggcttgtccaggttactgaacacgatgtcccatgtgacattggggtttgtgctcaaccaattccaatcccatggtttgtccaggttactcgacacgatttccattgtggctacacaggtgtttgtgctcaaataataccaattccatggtttgtccaggctagtcgacacgatgtcccaattggctactccgggattcgcacttaatccccgccaatcccatggtttgtccatgttactcgagacaatgtcccaggtggctacactggggtttgtgctcaatccacaccagtcccatggtttgtccgggttactcgagacaatgtcccatgaggctacactggtgtttgtgctcaaccaataccaatcccatggtttgtccgggttactcgagacaatgtcccacgtgacgacactggggtttaagcacaatttaccccaatcccacggtttgtctgggttactcgacacgacgtcccatgtcaggtatggattatcactcaattgaccccaatcccatttgcattctccggatttgactcgatccagtatgtgactcttaatttcgatgtcgagcattatataaattctcacggttgtgttgttctcaaataaagtaaagtgggaccattcttttacattacataaaggagtttcttcatttatctaataataattttgacgtgaactgtcaaaatgttgcaagaagaatatgaaagagaattacgtgtgttggtggaaaaaacatcgacccccgtccgaagcctggtaggttccatcaccaatgacttaactgtaacatggtttagcttgaaatggaaaatactcgaaattcttgggtatgacgtccaggtcattcatgcatgcgagtatggttgcggtagagtttcccctgcccactttcgtcaatcacccgcccctctctccccatccgtgttcatgtggttcagcctctgttaattccaccacccatgccatgcattcctttgtgtgtgtgtgtcagtcagtcagtctccctgtgaatcgaggagtcggaaccatcccagcaagtgaagaactactacatcgatgtaaaacgcgaagatgcaattgctggattgaatggcctgttcggagtgtcacgcgaggactcaggtgcacgcctggtggagtacatgccatcccatgaccaaccaggtcccccgcatgcaaaacacaaatacacaaaaacaaaaaaaatggcgaaactttgactggttctcttttcacagagtgagtgtgtggacgagaaagaggctacaggtttctgccgttgcgtttgcatgtgaactgtcaaggatctctcggaagtacagtcggagacgcaatttgtgaatgcaacgtgagcgagcagtcaacattgccagtctgcttatccagttgccccatgcaagcttgcacgagtaccgccttatcagataaaatttaatctaaatttctaaattttaggttgtaacagtagttgcctcgtttgctttccgaaaataactaaacttcgaaacgctgtcaataccaagcagagcccccgtattcatggaaaaaatacagagaactagttgacgtggtttttaagttgccacgtggtttcgcacgatgaaaggcacgagcacgtgactgaccatgtgattccttttcctctggaggtgttcgcggtatcgctctgcgatcactcgaactgccttactgacgcgcagccaagacatgcaaatcttcttgaagaagacctcctggatttctgtatcatagtaagagagatccagtgtatcggagccaaataagtcgatgttgatgtccaatccaggtcgggtgatgtacagcctctccattatgtggtagatggttggatggtcttcggacacaaccaatgctttcagcgcaaacaatttgtgtctgttccttttgtccacatacaatatggagtcatagccttcagacatgtccattccatagatctgattgtccacgaactgagagaacactgggaagaaaccgtctcctaatgtgaacaacaaagctaattcgttgggaaagataagcagagacggatcttgtgatttgtatgcagcattagcaagttgcaaccatattttctcaccgactgttgacattattagttatttaacgttgtggatagagttgggttggttgttttattgctttttgctcagatggaaatggtttcaattttttattcactgccgccgtgatgcgaaacttttgcagtgtacgaaaattattcgtaaaagagcatccaacagtgcatatcgtcgtcgccgtttacccaactgtgttgaggatacacgcatgctaagttaccaatgcccaagttagtcattgtgaccatgtgtgagtagccgaagctgctgctaaaaaggatgcgtattcccatagcggtgctgatacggtcgatacttggcttgaactctacagcaactgtgcagagccatacaaggagttgggcaccaggatggtgcgctccatgttggttgaccatttcacacaacaaatttgtagccgcctgaattttcgctttacttgtatcgcacacatggtcgcaaagtctattttgcagtccatccacgccgtttatgtccactaacctaccaccactatgcgagggcagtgtctgcgtgagtggtagcactgcttccgcagggacatccaaggttatcaattcgcataatatgcgtaccctgtcatgaagagactggcgcatccccaattgtctcagtgcataatcgggtaaatgaatagagcatggattcagaagcagatcacgagcaagcttaagcgttggcgcgacagccatgtgcggttcaagtgctgttgccatggcctgggcgtaagcaggctctgctattgctacacgcagcatcgtttttgaaattgatgcaacagtggcccccgctgtctcattgtctagcaggattgcaatcgcggaccggataaagagatcctccacccctgctggcagatgtgctgtcgctacacattcattggccacatggatgaacacatcgatgcatggtatgggtatcttagctggtagttcagctaaaagtcgaaacagatttccaagaccgtcttgactgagtgcatctatgacggcaagcatctgggactgggaacgagttgcaatgaagagactgaccagtcccaccagatgacagtgttcatgtgtacgctcattacatgtccgaatgaacatgtgggtgtacagctggtggaactgtgggctgaccttgttggtacctatgctgacctgccgaccacacgcattaagcgcagtgctcagaaagacggtgggcatgctggcgatcaagcaagaaacaccgttcatgtccaatgtaagctcagtcgtaatgtcgttgtaaaactgtagcatcctcgcaaccccctttgatgctttgcgcataatcacaggtgaaacagcatacggtgtggctgtctcgagcaaaactagcaatgccctagtagcagtcttgaaatcaccgtgtccagagcagcgtctaatcctagaagaagctagcatcaatctgatactaagtggtagtaagcaaccgcacatccacattgtgcaatgaactacagtgatatgatgacaacacgccttctctgccagcgttgcagcggccgcagttgacatcatgaacttagaacccttttatgcacctgaaaacagttaaactcaatggaatgagacagatcgggaaaaagctacccccgaaaacaactacaaaaagccctgcaaaaatctaccccccgaaaacaactacaacgatacgccaccgcattcccgtgtcatgtggatgatgttggtcagcttaaatgctgaaatgtctatgattgtacgagaggcgttttgggctactactacagttggcggaacagtaaaatgaaacatatatcagatggaaatgtacgatagaaaattggcgttaagaatggtcgctgacttgggtgtgttaaaaacttctgtgtttacgaatgaatgaatcgatacaaagacgcacgtgtctgatatgatttccttagcattcagcaacctcactgataaaatcattatgggttgttttgaccacgtatggaacacgtatgtgatgtttgtataaagagttctgtgatgtataaattatgtaagatggcaacgaaacctccgacagtcgcgaaattgaaggagctactaaaattggccgaagtagcatactcatcaaaggacaagaaggacgatattgtccgtttatgcgaagacaatggtctcatcgccagaccccctccagaatacaagacggtggaaaagatgtgtgtcgtgaaatgcgccctgaagaaggcaatgagtcttgacgatgaagaattcggtaagtttagggagcatgtggaccagctcgtcaatgtggtgagccgcatgttacggcggtccagtcttgtgctgactttccacatcacgagtctattagagaaaggtctggatattccagacctgtacaacatgaaagatacctactggaaggattggctccgtatcggggtagacggaatcttccctgatgaggaaagcaagatatcgtacgaagctgtgaaggactccatcggcgatgtaattggtaatgacgacgctgactacatcaagtcttatccgatctatttcgatcaggtattgaactatgcaggtcacacattgagcactgtcgtgtcaaacaacgcatgggttcctttgataccacgtctggccagactcacttccaccactttaaataaattaaatgccccgaagacgctggacacatcgaagatcattcggggatacgacgtgatgcaggctattcagcaagaagtccaaaacatggagggatggccagagtctgttcaagagtacgtcaatgaagttagggagatgctgagtgttccagatggaagtcgagtttatgataactatggcaaagacatggactttccgaccatggtccggtttaattattggatacagacacggttggaggatatggatgcacgtcgtatccgattgatgcccatcttcaatgtccaacgggtgcatgttcgccttgacctgaagaccctcgtgaacctgttcaggcacatgttccccaatgaccagaacatcgttgagctttccaattgggaacatgtaaagaatcccgaaagcttcatgttgccccagaggcctgcacagaagaagaaaaaatcatgtggtcctggtgaatgggaggcatacaagtcggtcctgaagcagtacgatgatgatgttaaggatatcaaggctactgacgagtacagacatgcaaagggtttgtatgacacgcttgtgaacgcccgaaaaacagtcgcaggttccttcttcagaaaaccacctgtcaagaatgggtgggttttcgactgcagcatctgtactgacggagtctctttgagcatgcagtacagcaagacagtacaggtccttgtctcagatctgaagaagacctgtaagaagcctcgtaaagaagaaggtatcaagatcgcagaaaaatacgacggctcacttaaaacgatattgcccgatatgggtatcgtcgtcctgggtgtggacccaggacggagcaacatcgctacggtaacgtatttggcatacgataaaaataagacatggacgctgacacgtggtgaattttaccacaagtcgggtatcaagaagcagacaaggcagaaggaactgcgttttgctgacatgattcctatgtgggagtctctgcgtgaaaatggagcagctttgagtacatcgaggacggataagatctccgcgtacttgtcaaattacgctaagttttctgacgagtggtggagattggctttgcgacgccgagaatcccgtgacaacttgcagcgttacatcggaaaacgaaaggtcaaagactctttctgggcgggtatcaagcggtgcatgatgaaagaacttcctgatatgaaggtttgcgtggcctacggatctgcgatcacgaaactgaagcctactggaccgggagaagttgcagttcccactgggaccatgttcgcatcgtgtaaaagaattttcaaagaggacgtttctgtgacagatgagttcaaaacgactcttatgtcgtgggagacgggtaaagaaaaagaacgtgtttacaagatcccaagtgtttgttcagcagacgtgaagcttaggttgggtggtgaacgttttggtcacacgaaatcgaaaactatgccaaaggtcgctgattgcgaccacttaggggtaaggttgtacaataaacgtaaaggcgcacaagagaagcacaggaggggtggcttcgccacttcccttgtcgattctcaaaaatcgatcgagcggtacccagaggtacgaggactgcgattctctccagaaacatgcatttactcggaccgggatcgctcttctgctctcacaatcgcaaggctgcactgcatggaattgatgggtctaggacgacctcttccatttgcccacagcagctctgttgttgttgatgaataaaaactcgtattgttgtagacaccactcggtccccctccggtggtcgcgacaacattaggttacaccgcaaggtgtaccgtacactccggtttcattttagtattccgtcgagtgtacttgtacttacattttactcaccaacgggagtgtaatgaattctttcaagagtctgcgtcggcacacaacataactcgggtttgtattcacgtgtctccatgtttcctgaatagtcgctgcggctctgtgtcttcgcactaaacggcacgcgtcttggacggataccaacatgttgcggtttctactcaataaatgccagtcccatggtttgtccgggttactcgagacaatgtcccaagtggctactccgggattcgcactcaatccaagccagttccacggcttgtccgggttactcgagacaatatcccaggtggctacactggggtttgtgctcaaataataccaatcccatggtttgtccatgttactcgacacgatgtcccatgtggctacactggggggtgtgctcaaccaataccaatcccatggtttgtccgggttactcgagacaatatccagggtggctaccccgggattcgcactcaatccacaccaatcccacggcttgtccgggttagtcacgacaatatcccaagtggctacactagggtttgtgctcaaataataccaatcccacggctcgtccgggttcgtcacgacaatatccaatgtgactactccgggattcgcactcaatccacgccagttccacggcttgtccaggttactagacacgatgtcccatgtgacattggggtttgtgctcaaccaataccaatcccatggtttgtccaggttactcgacacgatttcccatgtggctatggtgtttgtgctcaatccactccaataccatggtttgtccaggttactcgagacgatgtcccaagtggctactccgggattcgcactcaatccacgccaattccatggtttgtccaggttactcgatacaatgtcccatgagatgacactggtgtttgcgctcaaccaataccaactcaatggtttctccaggttactcgacacgatgtcccacgaaatactcgcgtttgagctcaatccactccagtcccatggtttgtccgggttactcgacacgatgtcccacgtgacgacactggcgtttgtgctcaaccaataccaatcccatggtttgtctgggttactcgacacgatgtcccacgtgacgacactggggtttaagcacaaattactccaatcccacggtttgtctgggttactcgacacgacgtcccatgtcaggtatggattatcactcaattgaccccaattccatttgcattctccggcttttactcgatccagtatgtgactaattcgatgtcgagcattatataaattctcacggttgtgttgtcctcaaataaagtaaagtgggaccattcttttacattacagtctactgaatactaaaatgaaaccgcttcgtgtacggtgtaacctaaatgtgtagaaatccacggggtagtggaacaccaatacgattgtgaatcaacaaattgcaagatgttaacgagaatatccattgaaggaccagccgcacttaagcgatcgcctcttccccggtaccgtggcccaaaagaacacggggtcttgatcgtgctgagttttccgttgaaatattcgcatgtcttgaagcgttctttggcctcctctagcagaaatgcgctgtccgggccgttcacatttccaaaataattttgagcatgaatggaagggaggatgagtgactttgataatcgtttgcagcagcttgaggcggactacaaagtgttgttcgaggaacaggcaaaccagcgtcaggagatccagcgcctggacaaggagatccaagcagtgcgggatgccacgtccacccagatcgagcgtgagttggaaatggcatgggccgaggcgtaccatgaactgcaagggatgttgaccgatgctcagttgacccaagttaaactggcaacattcggcatgcacaaactcacaccccatcttgcttgttgaaaatccttgcttgccatctcatggagcagcctcctgaacgactagctagcttgagacatcagatcacaaatccgctccataccatgtttcgcaaccagtcaaaatcggccgggaggcaggaacgcccattcattgtcaaagctttgcatggggggagttcatgaatttgcttggtgtgtttgccttgccataaaaataatgagagcggtaggtaatatacctgaaaaatgcatacgtattacgttcgtgctgtatgcacgttgcaatatgatcaattgatagattggtttcgatcgcatcctaaaaacatatgctggcctcagcagatgatggactggggtgatgtgtttccagatctgtacgatgttctagacattgatgagggtgctgttgatcaagaaattctgagggcgtttcgcattcaagtggtcagggttcatcccgacaagctaggtcctttggcatctgaagatgaacgaacagcagctgccctccgcacacgagttattctgcaagcgaagaacgtgttgatgaacaccgacagccgcaaggaatatgacagtgagcggcgaatgagaaggcaaggggatcagcaatccaagtctggttttagtgcgccggaggaggcatctgctggcatggcgcatgtttgggaggtctgggccaatgttgttgtagaagggtttgccaagcagtttgaggcaggacctcgaggcgagcgagtggtgcagcttttggaaacgattctgctgccagccataggggtgggcttgggtggggagagaggcttcaagctagggctgacactgtctactgttttcaataccggatgtatttctgtggtcgtgaaggcgctctctgccgaggaccaaaagttgtttttccaggctctggaagtgttgtgtaccaaaatgccttgagtaatacagttgttgagaaacgtccgcagctgaattcccctgccccactccgtggggtcccgcgattcctctttcatacttgccatttcccgacatatttgagaattcccactttatttcagaacaacataaaggagtttcttcattgatctaataataattttgacgtgaactgtcaaaatgttgcaagaagaatatgaaagagaattacgtgtgttggtggaaaaaacatcgacccccgtccgaagcctggtaggttccatcaccaatgacttaactgtaacatggtttagcttgaaatggaaaatactcgaaattcttgggtatgacgtccaggtcattcatgcatgcgaatatggttgcggtagagtttcccctgcccactttcgtcaatcacccacccctctctccccatccgtgttcatgtggttcagcctctgttaagttcaccacccatgtcatgcattcctttgtgtgtgtgtgtaagtcagtcagtctctctgtgactcgaggagtcggaaccatcccagcaagtgaagaactactacatcgatgtaaaacgcgaagatgcaattgctggattgaatggcctgttcggagtgtcacgcgaggactcaggtgcacgcctggtggagtacatgccatatcatgaccaaccaggtccctctcatctgaacatggccaccagcaagcaaatatttggatgacatgggggcgctcgtgaatggaaggaataaagagagagggaacgttacatactcagcaaaacaatgccgagacctgtattgatcaaagttgtttacactcgtttttattaaaacaattgtttagttgctaatctgtcatcggggttgtagctcagtggtagagcgtgaggttaagacaattttcttcattccttgatcatgtcgcccactaattggttcgaatctcggtacctccagtgtttttccaaagttccaccttcagttaatcaatttcctggcttcggatatcttgactgaagacgcgtccaccgtgatccacagctgtcacgatcatacgacgaattgtcacagatccaagtgttgttccgtctgtcatgtcaatgttgatgagatgctgtatccatgacgaaagtctactcgcgcacatagtggcctgctgtatggctttcaacaccttggcatttccagttttggcaggggctttgaggattttcgtctccaccacgaaaagtgtgttgatagcatgtgagaatacaagggcgtccccgttggcgcgcttgaagcagccgtcatcgaagacgtactccacagcgacgaggaacaaacgtgacgatggggatgtgtggtgtttttgtttaattaagtggcgcaatgcgttatactccaagacgcgtggatcgccggaagtagccgatgacgtccgcagtgcattgagacggctgacattccggcagtggaggcgatcaagaaactttgatgtgtcgagactgtccatgtccagcgcccttcctagttggcggactggctttgaaatgggctgacaaggttgtggcggcatcgcgtcgatgaagactcttttcttcgcgcatacgtggatgtgacaatgactccaatctcaaaagaaggctttacatatccgtctgtgtggcgtggggaaagagcgagagagcgagatagaaagatagagagagagaaagagagagagagggatagatattcgcgtgtgtatgtattttgcgttatttgtagatggaagaaaggaaagagtagggtggtgtgcgaatgacgcgctagtgaagaggatgatgaggagaataaaagaaaaatatgcattctcggggcgaggagggtcttttatgatgcccggctatcgtacctccagcaatacacaaggattgggcatgcctataaattcgacagtgttccgcatcttgcgtgtgtcctccgatacattggacagtgttccgccgtttgcgatgacttgacgcaggcgttccgaatgaatccggtatttgagtattttcccttacaagtctgatgcttgatgtgaactgtgaactgtgaactgtgggctcccctccggtcgcccccggtcgctccgctggggggaagaggtgaaaggggctctgccgcttgtttatacagcccgcaattatgcggcgtttacggatatgtcactagcataacgcccgataagatgcgtacgcgtctagttccttttaatttgcagttgaaaaagcgcatgcacatcgattccgttgacaaaatctcatacatcacatgtttatcgacccaacggatgtcatttgtttcaataatgcaatggtccatgaacgctgtgtgcaatatgtccgactgcagcaccagccttatccgaaacttcacaatgttttccgataaagtttgaaaacaagttctcgatacgctcttgctcgttcatcatttgatgacagattggttgttgactttaatttacttggcattgattgcatctgcatgagagaggcgatttgcagttttctttcctggctcaattcgaagaacgcgtccatgtttataagcgtatacaatgtgttgtatggcacttgtacagtcagagacagaatttgtgggacacccttaccggtgacccttgaacccaattgattgggtaggtcagctaaaggttttgtatcaaggtcccaatccttcgtgtccttcatcccgtatttcagcatttaagctggcccagaggataacaattgtaagctgctaactgacccaggtgggtcggttggttgagcgcccacatttgcctctccggaagctggggttttaggggggggggggcgagggaacacagaatacattcggtcgctccacgttatcagaagcagaagaaggttcagcagagttcacgtctaggttccaggttgcactatagccacattggatgcgcttttgacactgttgtgacagtgcagtacttagtggaccttgacgttatttaccaccatcttctgcttctcaaacgttttagccccttctcctttgtctgacactacttcttcttctcatggtgatacaaattgcacgcacatttccttatacccataatcaacttttcaaaataaaaggtgtcccacaatcaaatgtccctagctgtatcggaacgcaatcgcttttagcaactgttaaattggattccccgctcttccatgcatgatgcggtctcttccatgcacgacgcgtctcctcagtttgtgcaattccactgtcccgctccggtgctttttctttttgtttaagcattcaggtgtaaaaatctccaaccaatgcttggagatgcatgagtataaatgcaattgcaattatcattttaaatgggtcttgtgtagaatttactatcccgcccgacagcaattatgccccaaccacgaccaccatgtgtgttggttgtgcccccggatatggatattgcgccaaccgtcgcagaactggatatcaagggcattgcaaggcacctaacgacaagatgcatggataaaggcattgactatgtacctgtttttttgggatgtggttgtgcacgtcatgaagtggctctgtgcaaggaacttcgttcgctgggctacaaactgcacaatgagatgttcctggacgacgtcgtgacgactgcggcgatctctaacattgctgcgtacacaaagacgacgcacgctgactacgatccgcgtcctgtactggtgttctcatttactgacttaaagtcgcacatgttgaatctatcaaaaactccgcagattaaattcattgtcattggcatccatgcatctcaaaattcaaggttaaagatgaactgtatggattccattcgttctgtgcacaatgcgcacgtctgtcaatccaaggtgtcgtacatctgagtacctcaactacatgtgcaaatcgtctatttcaaacgatgatacatcaaacacggagcgtgcgcctgactccaaacggggggtgtaccacagagtgctgtgggaacaatgccgttgcgtgtgatggcatccacgttacagggcatctcggctccttcaggcaagcacttgaacttacactgtttacactgttttagttgataatcttaaattgtggtacttttgaaaaatgaacaacacctcttgcggttgtgcattgagttgacaataaaaaaaaaattcaacaactctttgttcgtctcaaaaagtttacttacaaattcacgtcgttttgatttacaccaaagcgtttccatctctacgagtagaacgactgatgttcgtaaacacagaagttttgaacacaccgtcagcgacccttctaacgccaattttctaagggcgatgtcgtacattatttccatctgatatatgtttcatcctgcaaatcgttcttgtcaaggacatgctactaattaatctgttcaggcagaataatgatttgttcatgatcatcgtccattgggcgttgtgctgtagtcgccctgcccgatttcccttccgtatccatgcgtttgtagaacgcgtcatgagtgcactgccctgaccaatcttggccgcctccatttcccgcatccgcagagagggaagacaagtacgactgctcgggaacgtattcgatcatacagataagcaccctttggttgatatattggacaagacaacggaatagaacattggggttctcaaataaagtgggcacacttataatcatcctacggtcagatgttgcttttgggcacacgttgggggtgagcagattgaagccctcttcctcatccggtagtc

SEQ ID NO: 192 - DNA, 22439 bp, unidentified
  misc_feature 1..22439: note = Fanzor polypeptide
  source 1..22439: mol_type = other DNA
aggaaaaaaattgtcatcgcgtacagctatgctaagtttgccccaggtggcaaggaaagaggtggatagggttgaggaggagactgtgtgaattagttaacaatgtgttcggtgcgttatttttgaataaaacagtttcattcataatatagtagcaacaatgtcaactgacacttctcaactcaaggacattcaaaatattgtcgcgaatgagctggaaaacatgttcttggcactagagagaatacaagaaatactaatttcttcctctgacactttttctggaacttctgttatgggtgatgcttttcttacagcgctagaaaacttatggaagaaaaatccggatgtagatgcaaaacgattggcaacatttgtcaacaaatgcaaagatttgctcgtgtataagccggtacttgaaggtacccgcgagtaaggatcggttgatgatctgggaaaaagcagttgtcctctgtaaaagaagcaagtaaaagaacctactttaaaactaccagatgttggatgtggtgtttatcacgataaatcccacacaacttgtaccgaactatatatattgtttccaacaattggaggagaaccgtatcacactaaacaagcggcggagcccctttcacctatccccccagcggagcgaccgggggcgaccggaggggagcccccacaaaggagtccgcgaggaaccgagcgggtgggcgaccggaggggagcccacaattcacatgcatgagacacactggattgattgatgggttaaccctaaaccctctcgatgggagtggtgactgacaaacaactgagatgacgacaacatggtggtaaagattcaggggaccgtgaatgaataaaaaatgtaatttaatacttggccatctcaatcgagaaacaaatggcgaagttcaatacagttgttctcaaataaagtgggacaccttataatcatccagactgcagatcgttgcttttgggcaacgttggggggtgcagcaggttgaagaggttctcgaagatattccgagtagcctctttggtaaaccgttcaaccgtctgtgtccccatatcagtatcagggggtgggggtgtcgaggagcttctcggcgcgtctcggcgaaacgcgagaggacgttctctgcaatattattggatatcgtggaacgtaaaagcatggaaaattctttcctttttcgttttaaacccttacttttacccacctgatcagaattgacccatctatgtagtgagctcttggacacgttacaaaccttcctgagactccttaaaaaatatttgtagtgaaccacggacctgtacctggtttcaggggatatcattcaaattatactgagtgtcccaaaattatttgagaacaactgtatggtcgatcctgagatctgaatttcggcgggggcccttcaaacggagtcgtgcgcataatgaaaagcaggagaatttcgctcattgtggtgcgctcctccacgccatcaaacgcaggcaccgagaatacggttttcctccccaaatgtgcggatgtggacgacattgtggacttcgtgtacccgaccattgagtgagtgagtgagtgtgtgtgagtgtgagtgagtgagtgagtgagtgtgtgagagcaacaaacgcgacaagatgtcaacacagtgcgtcaacctgtcccgggattcaatgtcattgactgtatgcagtgaatcatgtacatcacaccaatcatgcgtgctccagaatccttcgaaaaatggtttgcaggaggggcattattatacatcaataaatgcccaacgcaggccatcatggtcagcagccactatgaattgttgggggtggcagcagacactgcaacgacagaggagattcggcgagcataccggcaagcagctctgaaatggcatccggacaaatgggcaacatctcctgacagacaacgggatgctgctcaggagcgtttcaaactgttgtgcgcggcttacgaagcgttgagtgatcctgacaagcgtgaagcgtatgaccgccaacacacgcccccgttaaagccagcatcaatggaggatgcgtgggtggtgttttcccgtgttgtaatagagagtgtaaaagaggaaatgcagatatcggatgatacggcacccacggtgttgaagcttattgctagcctgttgctgccagcatccgggttctatttcggtgggctgtctggggtgtttgccagcaacgccctgagcattttgttgatcaaccctcatggattgaccaacgtctggcgcaacatgacacccgagcagaagagggaatttcaggcagcagtgttctgcctggcaaggcagaggagtgaggggacgtagaggttgttttcatggctcgagggagacgggcaaaactgtggaaaactgtcgcatccacaccgtccgtccggcaaaaaatcagccaccaaacggatcccattggaacgctacaattcatacgcgaggcgttgcagtttggcgggaagacacggaaattcacatggcatattggctactacgacccggcccacgtctcactcctgacacgttacactcagaccggtcaatggggcagagtaggaatatctcatggcgcccatctttgtcagtaccagcccatcccggaaagcccagatcgcggatccgcgtatggatcttaaacacgttggcttgtgtcaatgagatgctaccccaaccgaagcacacgccgtcctatactccgcaatatgtttaggagtcatagcaaaaacgtcatcaggcgagaacgacaacaacttttgcctgagacggtcctcagacgcatgacgggcagtagcttcattgtcggcacggtcctcagcctcacgccgggaagtagtttcattgtcggcacggtcctcagcctcacgccgggcagtagttttattgtcggcacggtcctcagcctcacgccgggcagtagttttattgtcggcacggtcctcagcctcacgccgggcagtagttttattgtcggcacggtcctcagcctcacgccgggcagtagtttcattgtcggcacgacggtggaagtatacagtcagagacagaatttgtgggacacccttaccggtgacccttgaacccaattgattgggtaggtcagctaaaggttttgtatcaaggtcccaatccttcgtgtccttcatcccgtatttcagcatttaagctggcccagaggataacaattgtaagcttctaactgacccaggtgggtcggttggttgagcgcccacatttgcctctccagaagctggggttttagggggggggggcgagggaacacagaatacatccggtcgctccacgttgtcagaagcagaagaaggttcttggcagcgttcacgtctaggttccaggttgcactatagccacattggatgcgcttttgacactgttgtgacagtgcagtacttagtggaccttgacgttatttaccaccatcttctgcttctcaaacgttttagccccttctcctttgtctgacactacttcttcttctcatggtgatacaatattgcacgcacatttccttatacccataatcaacttttcaaaataaaaggtgtcccacaatcaaatgtccctagctgtatgaaaagcgcaatggttgttgcaaccgctataataagggttgggtacatgttgttgacctcttgcgaggaaaagaaaggcaagcaatcgctttccatatatgtgggggaaattatgtggcacagtgaacgcgcaaatgcacttcctttatcaatgtctttaccgatcaacaaatgtttgaagtgttgaacccgctcgactggacaatacaatgccagcagatgtaactgaggtatcccctacacattgtcgcccctttgtatgtcagagacccacccaaggaacgaggcagaggcacagcctcttccagaaaatagggattggttgatgattcttattttttgttgaaataattgttgttcccaagatggagagtcttttcagaggtgttcatgtgaacacgtttaaaatagggattggttgatgattcttattttttgttgaaataattgttgttccaagatggagagtcttttcagaggtgttcatgtgaacacgtttaagatagggattggttgatgattcttattttttgttgaaataattgttgttcccaagatggagagtcttttcagaggtgttcatgtgaacacgttttaaaataggattggttgatgattcttattttttgttgaaataattgttgttccagagatggagagtcttttcataggtgttcatgtgaacacgtttaaaatagggattggttgatgattcttattttttgttgaaataattgttgttcccaagatggagagtcttttcataggtgttcatgtgaacacgtttaaaatagggattggttgatgattcttattttttgttgaaataagccgagcgaaatagccgcgcgcggcattcgctattctgcttacagttgttctcaaataaagtgggacaccataaatgtactccttccttctttccgccgttttcatgtggaggcagatggacaatgaggaggaggcgacagctttccgccgtttcatgtggaggcagatggacaatgaaggaggaggcgacaagctttccccgccgtttttcatgtggagggcagaaaatggaaaatgaagaggaggcggacagcctctttttcccgccgttttccatgtggagggcaagatgggaccatgaggagctttctgagcaaagccgccatgtccatgtgtgtgtgcgggggggtctttggagagccttattgcggtctgatatggacaaggagtgtacctgcgaggaggcgggaggggggggggggtccatccgcccccggtctcttacctctcttgtgagaatgactatggacggacaataattaaactcgtgaacaaatcaaaacacttgactgaatgtcataaaaggaaacatcgataactaaccaccaccaaaactactcgcaatatacccgacaaaatcacaatcgagcaaactcttactgaaagtatacaacattgctggtagccatgacactttgggcattccgttagatcccatctgcgatcgccgctaagaaatctcattcagccatggcgtttcggcgtcgtgtgacgacatggtatcttggatcacacctcgctcgccagttccatcgttgggcacacctaccgaactacctacatgtagacggaggaattgaagtgtgcaccagtgtgcactgacacggagacggaaacaacgcccagtggttatcctcaattgatgactagtctcgcggacaataggatcatcacattgcgatcctacctgccatttccaaggcatgtagtactggttggacgcccattacttcccgttataccgttgattggtttgttacgtagtcgattactagtccccttcccctcgcacaagatttttaagcagcctgttcattgagtggatgagttcagttatcctttgtgtgagatacttgatggaattcgcgccaaatcattgatgggaacattgtacagaagtttatagccgtcccagtggtttgcatgagagctggtgctgctcggcgcgcaacgatccagcgacaagtatccgtgcaagtacatcgagaacaagagcatatccagcgccaaacgcgcctctagcatcacagaatccccaggatcgtttgtcattgctgtcaaagtgattgctatggtcggccgaataagtacttatttcgaacacaaatatgtgtattttttttaagctgtatcgaacaaatcaattgggttcaagggtcaccggtaaacaacggttgtcccacatcaattctgatctcaggactggtaatttaagttgacatcgacggagaattgacgtggatcgattgtgatgatgaggcattcggtgctctcctcagcgtgtggtaacagaaggcaggaagtcatagctttggtaaattgcgcgtaacggaaatgaacaagtattttgaggaagatcgacatgcggtcttcgcggaaacgtaatgcattcatgacatgccctcaatacttcatccacaacatgtaggacaccaagtataacacatgcgtcacacaaacagagagtcgcagctaaacagcccctcaatgggcagtcacaaaaaagacaaacacttgtttttttatgagctgaatgcaattagaaaatcatgtatttgctaaccaccacacccacacacctaccaaccccccacccgccagacacacactactccaccccccgttgccatagaggcacaaccaccacccctccgcccccccgggcaataatccaaccttttaagccatatattaacgccgccacgcgttcccagatccttacatatgcattccgatagctaaacaagacgttgcacaactatgtatgttgacgatgttagaataggatggtgcgaagatcatccggtcaaaaggatcatgaacccgccaacaagcaatcaaggacggaagatgtatcacgggataatctcgatgtgataacatcacatcagaatatgtaccgtattaatgatacgattgagttattgcgcgcattgcttaagcacatggagcatgccaccgaatccagcaggaaacgcaaattagcttgttgcatagccaacctaaacgcacggcgaccgctcccctgcgtgcgctgcctcctcaaagtctcaagtagcgccagggctctggtgggaagtttttaacacacccaagtcagcgaccattcttaacgccaattttctatcggcgatgtcgtacatttatttccatctgatatatgtttcattttactgttccgccgactgtagaattgtgcatcaacaaagtgtgtcttcgcttcccccctcccaagcgtttcagtgaaagtcccaagcgtttcagtcagaccggtcaataatgttacagtatattgaataaattcaagcgagtcatcaaatgaatccaatacatccaatctgcccgcgctcccattctgaaccaatctgagagttgtcatgccgaaaacagtgacgaattacattattacacagtcagcatcatccttgtccattctcacacggcggcacttcttgctgatcactgaaataacattcctaatggtgacatcatcattcctgctggtcttggtggagacatgatcccgagttggaatataaaggaatatcttccttgatattgaaggtcaaaatgttccaagaagaatatgaacgagaattacgtgtgttgatggaaaaaaaacacgaaacccgtccgaagcctgagcctaatagatgccatcaccaatgacttaactgtgacatggttttgctggaatggaaagttctcaaaattattggttatgaagtccaaatcattcatgtatgcgagaaaggttgttgtagagttgtgtcttcctctgatatcggaagcttctcaagaagtgcttgtggcaaaaccaatcaatgaaatacccaatgttgcccatccagtaagagatgttgcgttctgaaacaatcccgacacaagagcacataatgcaataaacagtgccaagaagcggatgtatctatctggactcttcatcttggaggtgccgctcctcaaatcgttttgcaacctccacgtccccccatcagttccttgctgaaaaacgtgacaaaatgggcgttcctgcctcccggccgattttgactggttgcgaaacatggtatggagcggatttgtgattccttcgtgctgatgtctcaagctagcgagtcgttcaggaggctctaaatcctgattagaatttttaaaaaaatcggccgggaggcaggaacgcccattaaaaagcaatcccacaccccctctcacattcagtaacccacagggctcctccgaggattcagtgctgccttgacaaaccctgcgaggagatgtgctgcgggggtgggtgattgtgtgacatgtatgtatttaaaaaaagcattatcacaataccggctgatccaaatgaaatgctgataccccaaccgaggcacacgccgtcatatactccgcagcgtgttcaggagtcatagcagcgacgtcatcaggcgataacgacaacaactcttgcctgagacttggccttagcctccgcagcacgggcctcagcctcacgacgggcagtagcttccgcacaacgggcagtagcttcaattgtccagcacgggtcctcagcctcacgacgggcagtagattcattgtcagcacgggcctcagcctcacgacggcagtatgcatgtcagcacgggcctcagcctcacgacgggcagtatatttcattgtcagcacgggcctcagcctcacgacgggcagtagcttcattgtcagcacggggccttagcacgataggcctcgtcacgataggcctcgtcacgacggtggaggtatatgaaaagagcaatgtttgttgcaaccgctataataagggttgggtacatgttgttgaccatcatcctgcgaggaaaagaaaggcaagcaatcgctttccatgtatgtgggggaaattatgtggcacagtgaacgcgcaaatgcacttcctttatcaatcaatgtcttttaccgatcatcaaatgtttgaagtgttgaacccgctcgactgggacaatacaatgccagcagatgtaactgaggtatcccctacacatgcccctttgtatgtcagagacccacccaaggaacgaggcagaggcacagcctcttccagaaaatagggattgattgatgattcttattttttgttgaaataattgttgttccagagatggagagtcttttcataggtgttcatgtgaacacgtttactgttccgccgactgtagacgtgagcatgatggatgtagtgaatgcacttacatctgctagattggatggtatgttatccagaatggatacaagaacatctatgttggagctggtgatttgtctgccaccaagtgacccacattcgccactacggtatcattcttcgtacgaacttttaccgtctcgtaccatcgacttctacagtcggcggaacagtaaaatgaaacatatatcagatggaaataaatgtacgacatcgccgatagaaaattggcgttaagaatggtcgctgacttgggtgtgttaaaaacttctgtgtttacgaacatcagtcgttctactctgtggagatggaaacgctttggtgtaaatcgaaaacgacgtgaatttgtaagcaaactttttgagacgaacaaaagagttgttgaatttttttttattgtcaactcaatgcacaaccgcaagaggtgttgttgcattttccaaaagtactcacaatttaagattatcaactaaaacagtgtatcgtttcataaaactcattggttttacaagaaaaaggagcaaactccgtggacagtgtaaaggggacttagttccacttgtcactgaattttgtagtagatacaaggatacaatcaatgctggaaaattttagtatcagttgacgaatgtggttttagtgagcgtctcaagccacattatgggtattcccctgtaggaaaacctgttatcgttaaaactactggtgggtgggtacaccatagtttgttgatggcagttttttcagatggtaggaaggagttcgttgtgaagaaaggatctgtgaagaagacggacttcgctgcatttattgactctttgagtttgtgcaataattcagtagtaataatggacaacgccagtatccataagaacttggtcctcagaagccccgtaaatatttgttacactcctccttacagtccagaattcaatgctattgagctgtgcttcgctaaggtgaagaaggactttcgtcgattgaactatataccaaacgatacaaagacgcacgtgtctgatatgatttccttagcatttagcaacctcactgataaaatcattatgggttgttttgaccacgtatggaacacgtatgtgatgtttgtataaagagttctgtgatgtataaattatgtaagatggcaacgaaacctccgacagtcgcgaaattgaaggagctactaaaattggccgaagtagcatactcatcaaaggacaagaaggacgatattgtccgtttatgcgaagacaatggtctcatcgccagaccccctccagaatacaagacggtggaaaagatgtgtgtcgtgaaatgcgccctgaagaaggcaatgagtcttgacgatgaagaattcggtaagtttagggagcatgtggaccagctcgtcaatgtggtgagccgcatgttacggcggtccagtcttgtgctgactttccacatcacgagtctattagagaaaggtctggatattccagacctgtacaacatgaaagatacctactggaaggattggctccgtatcggggtagacggaatcttccctgatgaggaaagcaagatatcgtacgaagctgtgaaggactccatcggcgatgtaattggtaatgacgacgctgactacatcaagtcttatccgatctatttcgatcaggtattgaactatgcaggtcacacattgagcactgtcgtgtcaaacaacgcatgggttcctttgataccacgtctggccagactcacttccaccactttaaataaattaaatgccccgaagacgctggacacatcgaagatcattcggggatacgacgtgatgcaggctattcagcaagaagtccaaaacatggagggatggccagagtctgttcaagagttcgtcaatgaagttagggagatgctgagtgttccagatggaagtcgagtttatgataactatggcaaagacatggactttccgaccatggtccggtttaattattggatacagacacggttggaggatatggatgcacgtcgtatccgattgatgcccatcttcaatgtccaacgggtgcatgttcgccttgacctgaagaccctcgtaaacctgttcaggcacatgttccccaatgaccagaacatcgttgagctttccaagtgggaacatgtaaagaatcccgacagcttcatgttgtcccagaggccagcacagaagaagaaaaaatcatgtggtcctggtgaatgggatgcatacaagtcggtcatgaagcagtacgatgatgatgttaaggatatcaaggctactgacgagtacatacatgcaaagggtttgtatgacacgcttgtgaacgcccgaaaaacagtcgcaggttccttcttcaagaaaccacctgtcaagaatgggtgggttttcgactgcagcatctgtactgacggagtctccttgagcatgcagtacagcaagacagtacaggtccttgtctcagatctgaagaagacctgtaagaaccctcgtaaagaagaaggtatcaagatcgcagaaaaatacgacggctcacttaaaacgatattgcccgatatgggtatcgtcgtcctgggtgtggacccaggacggagcaacatcgctacggtaacgtatttggcagacgataaaaataagacatggaagctgacacgtggtgcattttaccacaattcgggtatcaagaagcagacaaggcagaaggaactgcgttttgctgacatgattcctatgtgggagtctctgcgtgaaaatggagcagctttgagtacatcgaggacggataagatctccgcgtacttgtcaaattacgctaagttttctgacgagtggtggagattggctttgcgacgccgagaatcccgtgacaacttgcagcgttacatcggaaaacgaaaggtaaaagactctttctgggcgggtatcaagcggtgcatgatgaaagaacttcctgatatgaaggtttgcgtggcctacggatctgccatcacgaaactgaagcctactggaccgggagaagttgcagttcccactggggccatgttcgcatcgtgtaaaagaattttcaaagaggacgtttctgtgacagatgagttcaaaacgactcttatgtcttgggagacgggtaaagaaaaagaacgtgtttacaagatcccaagtgtttgttcagcatacgtgaagcttaggttgggtggtgaacgttttggtcacacgaaatcgaaaacgatgccaaaggtcgctgattgcgaccacttaggggtaaggttgtacaataaacgtaaaggcgcacaagagaagcacaggaggggtggcttcgccacttcccttgtcgattctcaaaaatcgatcgagcggtacccagaggtacgaggactgcgattctctccagaaacatgcatttactcggaccgggatcgctcttctgctctcacaatcgcaaggctgcactgcatggaattgatgggtctaggacgacctcttccatttgcccacagcagctctgttgttgttgatgaataaaaactcgtattgttgtagacaccactcggtccccctccggtggtcgcgacaacattaggttacaccgcaaggtgtaccgtacactcccaaaagcggtttcattttagtattccgtcgagtgtagccaggtggtaccgttcctcgtcattgtacagttcatactgtagttgcatccacaacacgtctgtggtttgatgcatacaaatctgtagtgcacaagtgtggtttccaatcgccatcatattgattgctataggaattgttatcggtcggatttttcctacaactgacaagctagctttccatgtccatgcatcaacatctcctatattgatccgcacccactttatatgttggatccccatgccagccaatgtgatgttgcgcaccacatcaccctctctaggcagttcgtattgtagatatgactccccattgctttcccttcggagaaatttgtcgcagctcaagcatacctggtaggacaccaataggtgtggccgcttacccgctaatagcatcattaatgcctggtattcattcatacacaatgtttatacacaatattccgaagatgtatggcaactctttcaggacgtttctgaactgctggatcgggggaaatggaatgaaggccggcattcgactaacatacaggtgtcggtggagccttacagtagttctcaaataaagtgggacacaccttataatcatccagactgcagatcgttgcttttgggcaacgttgaggatttttttaaatttctaatcaggatttagagcctcttggtccaagtggccaagacaaatacaaattagactatagttgtaataccacccattggtattgaacgactcgctaccttgagacataagcaccaaggaatcacaaatccgctccataccatgtttcgcaaccagtcaaaatcggccgggaggcaggaacgcccattacttgtgaaaaataaacatggtatcattctcatcagacagggttcgatttctaccccaggatacagagatggagagtcttttcagatgtgttcatgtgaacacgtttaaaatagggattgatgtgagcctccggcattgtgtacaacaatcgaccgtctgtccaagttgtacatagagaattggaatttattcaatatactgtaacattattgaccggtctgactgtaacttgtgttgacattgttttaatttatcactttgtatgtcttttgccggagtggtggtacactacagtacatggcccagagattgagattgcgtaacacacgacttaagaaacaatcatcagaatttataaacaatgattgacaattctcaactacttatctgcatctctaccttcgctattatttacatggctcgactgaagattgagcttgagactgagcgcgttcgaaagaaggcagatgctgctcgagtgaatagtatggagattgagcttgagaatgctcgagtgaatagtatggagattgagcttgagaatgctcgactgaagattgagcttgagactgagcgcgttcgaaagaaggcagatgctgctcgagtgaatagtatggagattgagcttgagactgagcgcgcagaagcgcttgagaagctactgaggtacgatctgtcaagcatgactatcgagcaatggaattccctgaacgataatgacaggcgtctcaatgaggatctttgcaaacaatacggaatccccctccccaacatgcaggagtcgtcctacccaggttcaaccgaacaggatggcgaacgaatctacgacaagtgttccatgtgcgcctcgaaaaacgagtgtaaacaacgcaaaatccatacagattattacagccatacaaactcgaatctctctctgtagaattcattgtcggggccattcattaatattcagtgcacggatgcggtggcggattctcgtccctcatcgcctcgcctcgtatcgtacgaaatgtcatgattaccaaagcattcgataccaagacggggtcatcaatcatttcaatcatattcggtatcgggttggctgcactgttcagacagagttgcaagggggacaggtgtatcactaaactcaacaactgaggacatacacccgcctgctactgctactgcttgcaagttgcattattgagtataaaaacatcatgcatcatgattgggataagtaatcaaacatgaacgatcactcagcgatcacgatcactcctcattaccttcgtcgtcgttgcatcaaacgaacaccattaaaagatgttggcactgtcgactacgatgcaaagcttcaaaaggagattgaatccatccatgaccatttcatgcacaagaaagaagtacttgaacgcagaatattaaaattggagcaggacagcgaacagcaaatcaaattcgcaacccagcggaacactattgccaaaatggaaggcaaagttgatttggtgcaggtcgctgaaaactatcgtcgtgttgaagcgatcgaggatgagtgctgggcttcgaaagtcaccttgaaagcgcctgtacaagtcgaggaggtgtcgtcacacggggtcgcccctccttgaagcacaagtcgtcgagccagagccacacgttcatttgtgaaatgataaaccgcgcgaagaacggaaaaaacgcccgcaaccatcataaacgtgaccctcgctcatgtgatcatgaacggattcgttctcgccaatacagtcaacggaagcttcgtgtacggcacaccttgcgtgaatccatgtccgtacgagctttacatttgaagagaaaatggaaattcaagcttacaaataatgaacatgtcaggaaatacactcggacaattacttttctgtcaagtgagctcttagttcctctggaatcggcacgcccctctccctgagtgtaacggggttaattttaaaccatttcattatattctctatagagtctgtgttgacatgcattataacttgggttagtattgacatggcgccatattttttgtatagttcttgctgatctgtatctacgtatgagatcacatatgtcttgggaagatagcaacatattggggtttctgctcaactcataccagtcccatggtttatctgggttggtttgtataatctcccacgtgatgttggggttttcgctcattccaccccaattccacggtttgtctgggttggtttcgataatatccatcgttatgacagggtttttgctgatccagttccagttccatggtttatctggattggcttcgatcatttcccacgtgatgtagggttttctgctgataaaataccagtcccatggtatatctggattggcttgtataatatcccatgtgatactggggtttttactgatcaaaaaccagtcccatggtttatctgggttggcttgtataatatcccatgtgatactggggtttttactgataaaaaaccagtcccatggtttatctgggttggtttgtataatatctagtgtgatgttcgggtgtgaactcaatccaccccattcccacggtttgtctgggtttgtaatgacaatatcccatttaatgcatgggtttctgctgatccaataccaattccacggtttgtcggggttggcttcgatcatttcccacgtgatgtagggttttctgctgatataataccagtcccatggtttatctgggttggcttgtataatttcccatgtgatgttggggtttatgctcaacccaccccaatcccaaggtttactgggggttgtaatgacaatatcaatcgttattgtagggtttctgctgatataataccagtcccatggtttatctgggttggcttgtataatctcccatgtgatgttggggtttctgctgaaccagttccaatcccatggtttgttgggattggattcgatgatatcccatgtgatattggggtttgagctcaataaactccaataccacttgtattccatacatttgacccgtcttgagatgtggttatttatttccactgaaatcattattatagatagtaatagatagtaatagatagtaatagatagtaatagatagtaatagatagtaatagatagtaatagatagtaatagatccacaagtatctttatgctccgattattttatgatgatgcatgcatgggcggcttgtgtgctcttgcgcgtgcggggaaaacacatacacgcggacttttggggactcatcatgtaacgtgcgggttcgaggtgcattcacgacagcgtggatgagtgtatacctgcactggacggtcaacagattgaaacatccgggtattagcccagaaaacaacagaacgtcagtggacatcgtgagaggaagtgactctcgcgcggttggtcaacttttcaaaagcctcaaaagacaggggtatattctaaaccctggctacagttgttctcaaataaagtgggacactttataatcatccagactgcagatcgttgcttttgggcaacgttggggggtgcagaaggttgaagaggttctcgaagatattccgagtagcctctttggtaaaccgttcaaccgtctgtgtccccatatcagtatcagggggtgggggtggggttgtcgaggaacttctcggcgcgtctcggcgaaacgcgagaggacgctctctcccaaagacttggtgaagtgtaagcatcaggatgtttctggaagcgttcacatcgcggttccaagtcttcccgcagtgaagcataccaccgctctgttggcgtggcgctccgctttgactgcttttgcagtggagaatcttatgaatccgcttgcgtccttctgtacattcccaacctgtaccgtcttgcttcttacgatgagtgagtgccaccatgttgcaaaggtggttctcacagcagctgcatcgttgagatgttctgaactcatcgatgtcctccatgatgacgttttctcggctacgaagctcgaaacgaatagcttggagagggccacaagtccgcctagagattggcgtcgcccccagacctttccaatcaccaaacccgacgagtaccttagcgctcttctttctcggagctacgaagtcagcaatctcaacaataagtttctgtttcttgcagtaccttcgaaagcggaggtttcggtaccccctggaagcacgatgggcaagaaggattggggcggtacccatgtagaatctggcgtacgcaccaatctgttcagaactcgaagagtctctatccggaatgataccaccgacgatatcagccgtctcgaggttccaaacgtcagtttgacgctgggacttgaagatcagacccttgcgataatatttcgccgagctgtacgatctggtacctccgttgagtcctgttacagtcacgatatcagtaacacccgggtctaccgcagccacgaccacattgtcaaggaaggatacaatgccaccctcgtctgttgtcacgtactcatgcgcccgcgtagagaacgcgtctgcaggcatcgaacatgtcagacacgtaggcttattcatcaagatgctgactgcaaagccgtctgtcacaatgcggtaaccgaacttccgagaaactgtctccactttcttgaggtttgcgaagcgctcccatattccttgatggtttttggaagcaacgtctgccttgcatgaattaaagtggcactcgttgaccatatagaaaaaggccattttcgaaatcggaatgtgcgacagagtgaatccagatttgtaaggcaacaacgagaatgtgcgatgtttttcgtttttcgtttttcgtttttcgtttttcttcgatggtctccgacaatatcttgtggtacagaggcagggtcatgtgagcccgagacgcaaaagtgtttccggatggtaaaggtagaacccccctgagacagaatgccacttcgcgtgcaaagaagcgtttcgcgttatctgcgtccaccctaaggttcttcgaggagagccaagcttcgctcaacttttcaagcctctcttgaagtttagtcaacctaacacgcaaaggggatccttctggttccttcctaccgaccctcttcttcgcaagagcaactgcactttttgccgatcgaagtctagatgttggaagcttggttggcagctttgttgtatgagggctcatcttgaagatgacgtcgagattctttgtagggcacttgatcaatgcagccacgatgtccgaccgcaggcgctttgcaatctgtgggtacttccacttcaagtaagtcgttatgcgtcgctcaaggttggtccaaagatggttagaggccattgtggccatgagaatagacaggtctgcaatgatctggttcttcactctcccccgaatgtcaactttggattgccccggctctcttaacaagtcgaacagaagccgactactctcgaagtcttctccaagagtcgaccccttacatttgttggtactgactgcaataaggcaccggtagaagaagttgtgatttacaggaaggacagcgataccattctcaaaaagacgagcaatgtggaaatttgcgaaaatgtaaccctctccaagcaacttgttcatgtccagtaccagtgtgtctatcttgttacgaagccaatcatggggaataaaggtactcaatttcatcttgaccacacaaatcgctcgcccaggtgcacactccccgtcttcctccccttcataatcgacaagttctgcaacgtcatcatgttggtcagcctcatgtaccaacgatgatgactcgccgatcccattctccatcacaaattgtaccccgaaaacgttttgatgtaatctggatctgcagacaggctctctcgaacattcctaacccaatctctcgtattaatcatatattttgacaagtctttatacctccacatttctagaacacaacatatttgcattaagtaatcgaaattacaggttgacgtcaatggacatgatgccctgtagtctctcttcatgcttccaaatatttgttcaatcgcattagctctggggcaataaggaggggtgtacaaaagcttccaccctttgcattcggatatatccttgatttctgaagaatggtgaaaccgattatccatgacgatcgtggttttctttgggatgaccaaagttttaaagaatttaatgaaatcttcttttttacaattgtgctccaataactgataatctattattccctgagatgaaatagcgagtaataaagtgaacttcacacgacggaggttactcattgtcttcgtagttaatcgagaaccgatcttgctgtatccatatttgctgtgttctccagcgtaaaatcctgcttcgtcgatacaaacaacgttagagctttctctgtacttgtcacaaaacatttctacattttcttttgaatgtccgtagagaactgtgggaaacgccttcttcctagaaaatccacattgttttatgtgtctcgatgcagcactgatcgataatctcacattacaactcttgcaaattataccgaccaaatccttgcatgttatgaaggggttctctgcaatattattggatatcgtggaacgtaaaagcatggacaattctttcctttttcgttttaaacgcttacttttaccaacctgatcagcattgacccatctatgtagtgagctcttggacacgttgtatatattacaaaccttcctgagactcctcaaaaaatatttgtagtgaaccacggacctgtacctggtttcaagggatatcattcaaattatactgagtgtcccaaaattatttgagaacaactgtatacaccgtaaggtgtgccgtacacgaagtggtttcagtttagtattccgttgactgtgtatcaccgcttatgcactctgctacatgggtccaaaataggcatcctgcatcatgccactggtgcttgcaaacatgggcttagatcaagcctggatatcctgattgaagcaggtaggtgtgaaggtcgtagttgggggtgatgccgatgcgcatgattgtggtgccaagtgcgcccttcacgacccccagcaggcggccatgcttgtcgaccactggtccgcctgaaaacccgtcatctgcgtgtgcagtgatggccactgatccaggcatggtgctggatagtgatcccttggagcaactgggcttgttctctgtgcctgtgtaccccagtgcgtacactgacgccatgatttcaagatcagtggaccaaaggctcgtggcagagcgggaacccttcaacagaatgaggtcaggcacattgcctggaggtgagggggccacgacctccaaatcctcctcaaagccgtcggttgggtaccttgccttaaaggccacagccggtgatgtactacctagggtcttgccgcagaacccctgcatgtgtcctgctgccacgatgacttccccatgcatgaagccgctgaactgaccaactaggattccgtcctgactgaatccaatcagcttcactaccaatggtgacaccttggcatacactgcctggtctagcatctccactgcagcaccgacgtccaccgggtcaacaccatcatccaagtttatccgcaacctggtcatgttacagccagaccggtcaataatgttacagtatattgaatcaattccaattctctatgtacaacttggacagacggtcgattgttgtacacatttacacattgctgaaaagtttgaggagagtggctatacttgcgaatgtaagccacgggtgccgccgccgtccttgatgagatgagagaggtctccctgtgagtggctcgactcgacgtgtgccgctgccgtccttgatgagagtgtgactgactcgacagtgctttgtttctgttcctgcttgaccctaacctgttccaacctccggtggtcgcgacaacatttattattgattcttaatgatgttttcgatgtaaaaacaaagtctcagattatgcaaacggtttgccaaatgcaatgccatttcgaagatcgattggttagcatggtatgcatcatgtttcatcaaacaacttacaacgcaatcatgcctatttgatatggcaaacatcaatggaataccatgttgataacatggatccgcaccatcattgagcaaccgtttaactgccattatgtctcctagtccgcattgaagcacaagttcaaaatttagtttcttctgggtacagaatttttgagatttacaaatatgtgtgtgaatatctttcaaataattagctatgaattggttctttttcatctgagctaggaataatgcaagatcaatcatttctgcaacatctggctcttggtagattgtcaggtccgttgtatacgaagaccaaaaacatacaacctttaaaactatgttctggtggtcgtagaatgctgcgtaacataatgcaccacagcctccaacacggtcgaatggttcagcacccgcatggaataatgaatcgacagtgtccaagtttcccaatatgctttgcgcacatagttcatattggagtttcatattattgggagacattctaattacaagacatcggatttctttaagattaaatgggcgttcctgcctcccggccgattttgactggttgcgaaacatggtatgcagcggatttgtgattccttggtgctgatgtctcaagctagcgagtcgttcaggaggctctaaatcctgattagaaatttaaaaaaaatcggccgggaagcaggaacgcccattattagcgatgggtgcgtagaaagaacaggctttgcgttgttgcaatagattcaaatctttgataaatcacatggcaacttttgacaagaaaaatagttacaccgcaaggtgtgccgtacacgaagcggtttcatttaagtattccgttgactgtaggggtccagatacaaagggaagggaaggggcccacttgcgagtacctgatggaatgcaaccattccaattcgtatccacaacgg

SEQ ID NO: 193 - DNA, 22436 bp, unidentified
  misc_feature 1..22436: note = Fanzor polypeptide
  source 1..22436: mol_type = other DNA
gcggtacccagaggtacgaggactgcgattctctccagaaacatgcatttactcggaccgggatcgctcttctgctctcacaatcgcaaggctgcactgcatggaattgatgggtctaggacgacctcttccatttgcccacagcagctctgttgttgttgatgaataaaaactcgtattgttgtagacaccactcggtccccctccggtggtcgcgacaacattaggttacaccgcaaggtgtgccgtacacgaagctgtagttacgccacgcctgggttggatatcaggactcgatacgtgatggagaaaacaggagtgctccccagtgacctgggcaagtacagcactgagggttttgcgcgcgacgcagcagggctacgccgccagttagggccgggtttcagttttgaaacactggagggcgaggtgttgtccagcgctgtattggaccacctgaagtggttgttgtcccacgacacagaggtggctgtgttgttgttctgcggccatggcatgtggcaggggtcgccgcagcacggtagtctcgtgtgttcattcaagcagctggtcccagctgaggcaattgagtgcgtggcggagaagttcaaaggcacatttgtgaggttgctgaacatgtgcgatgccgaagagttgcaacagttgaaggatgggcaaggtaccagggacgcagtaaggctgcgaggtgctcagatgcaagggggggcaggcgcgccaagcacctactacggcatgacagtggcagccacgcagcagtttggcaagaccactggtaacagccggggcagcaagttcggtgtcgcactggggcgcatgtttgatcaggaggtggttgtgacgtacgatgggttcgagacggcattggacaagtattggagtggggcgcaagtacggatgacgcacgctttccggggtgtgttcgggacgcccgctctcccggtgggttcttgttgcatcactaatgatgatgcgggttctgagtctgagtctgatgtggagttctgagtctgaggtaatgggcgttcctgcctcccggcctattttgactggttgagaaacatggtatggagcgggtttgtgattcctcggtgctgatgtctcaagctagcgagtcattccggatgctctaaatcctgattagaaattttaaaaaatcggccgggaggaagtggccgggaggatcgttactgttggatgtaaacctttctagttttaatgcgcaacactgacatgactacgttatgccgtgcagaatgacagccaaggggtgcttctcgtacaagaatgccaccgtcaacggcttcaacatcaccaatcagctccaggtccgagtggaggcgatcgacaacaacgttgcgaagatctataccacagatgagaacggcaacccgatgccgatgcctgtcgacgtctcattgcgcaccggagaggatgaacgtcccagtctacaacaatgagttcctcatcgtgtggattgaaagctacgtgctggctgtcggtggcgtcgacattatgtggctccacaaccagaagaagcaggccttctctgatagcaaaggcataacggctttctcactgtaaagcgtggtgtatccagtgccatgcagccgtaaagcgtggtgtatccagtgccatgcagacgtaaaataacctcgcatcaggcggcagcacatgtgccgctatggccctcccaaacaaaaaataacgaaagtaacaaaattcagggaaacctatcattctacatcacgtttgttctcatcctcaagcaaccaacctcaaaactgcttttcaagtgatatatgtcgccaacacttggatgagaaccaccgtaccacatttaacaagtggcggagcccctttcacctattccccacagcggagcgaccgggggcgaccggaggggagcccccacaaaggagtcctcgaggaaccgagcgggtgggcgaccggaggggagcccacaattcacatcaaacagcagacacacacacgcgacgccgccgcctccatctcggacatggacagcatcagcaaacctggtctcttcgcctcatcatcatcgtgacttggtctcttcccctcccctctaagatttcgccagccaatccgatcaaaacaatatcagaaaagtgataaaagagagttgcttcggttcccaacaggcgctctgatagtatgttagttgcgtgtccatgtcaacgttgttgttagttgctgtatcaaatgtaacacgtttaaaatagggattgatgtgagcctccggtagtcttaagtatttattttttgttgaaataattgttgttcccgggaggagaactgattacccagaggttccacaaatccacagccaagctctcggctatggtcttacgattgggggcaacttagtactgatcagacccgcaccccgcctgtgtacagcgaccttctggggaggatcgaccccccccgtttgagtgttcttttgggccacggtaccggggaagaggcgatcgcttaattgcggatggctggtcctctcgatagtaccgacaaaaggacgataccgagtctgccgtgatctaaaaaagaaccacgatattccagcgggggcgaacggaggggagcccatagtggaacatcaaccagcagacacactactgggtgcacaagcagacacactactgggtgcacaagcagacacactactgggtgcacaagcagacacactactgggtgcacaagcagacacactactgggtgcacaagcagacacacgcacgtgaagaagagtgataggcgaacggaggaaacatgtcggatagatcggataacgcacgcactttatcacgacacataacgcatcctcacacacgcgtcgcggcggatgctgtcgagatcatgcccaccaaacactcactctcactcattctcacgcacgcactctatcacgacacaaacggtggatttcgcatcatactcggtgtccatcctgagtagaacgactgatgttcgtaaacacagaagtttttaacacattttactgttccgcagactgtaggcaccgcgtgtcagcttctatgtattgtttttatgataacagattcctttgtattcgagtaaaaaatatgtgcattgaaagtacaaacccctatatataaaatgatccaattgtctgaaatctatgcgaaatcacagtcgacatcaaacatcttatatagcgataatgcacccattaaaggagtgcgatcgcgaccaggtgttaaagaagcaccatcgatgtcatttgaacaagatacagtcacaggaatgttcaatgaatcaagtaatgtcttaggatttgctgcaggagcatatactacgctcattgcatcatcttccaatttacaagccaatacgcaaatcacaacatcttcaaatatcgtgcctctcaacgacaatgtctcacaattaggaacagtaacaaagaagttcgcaaaactgtatgcaacagatatctatgtaacatctgctacatttaacacactcggaggaacggctatctcaagtatcgtcacttccacaagtagcaatgtcgcagccagttctgcagcggtcaaatcagcatacgatagtgccgtctcagcttccaatcagacgtacggcatcggcgcgctcgatagtaatggtgatatccttctcagtggcaacttgcgcatctccgaaactgccaatatatacaaaggtacagagttatataaaccatggggaaagccggaaatgcccattttccccaagaattcgaaaatgagtaatttcttcattatcatatcaccgacaggtagcattatcacctgtggaggtaacaacagcggccaactaggaaataacacgacatcagaaggtgcgacgacaacattacaaaccatatcgagtttcggatctctgaatcgtaaaacgatcgtggccatttcgggcggcaaatttcacacgcttgcccttgactcgacgggacgcgtgcacgtatggggattcaactccaaaggccagctaggaaataatactaccactcaatcaaatgttccgattgatgtatcgagtttcggatctcttgtcggtcaaacgatcgtggccattgcgggcggcgatttacacacgcttgcccttgactcgacaggacgcgtgcacgcatggggatacaaccaacacggtcagctaggaagaaacaatatcactgattcatcagttctgatcgatgtatcgagtttcggatctcttatcggtaaaacgatcgtggccatttcgggaagcgatttacacacgcttgcccttgactcgacgggacgcgtgcacgcatggggatacaaccaacacggtcagctaggaaatggtaacatcactcaatcaaatgttccgatcgatgtatcgagtttcggatctcttgtcggtaaaacgatcgtgaccattgcgggcggcggcgctcacacacttgccattgactcgacgggacgcgtgcacgtatggggaagaaacaaccaaggccagctaggaaataatactaccactaattcatcagtcgtgccgatcgatgtatcgagtttcggatctcttgtcggtcaaacgatcgtgaccattgcgggcggcggcgctcacacgcttgccattgactcgacgggacgcgtgcacgcatggggaaacaacagttcaggccatctaggaaataatactaacactcaatcaaatgttccgatcgatgtatcgagtttcggaactcttgtcggtaaaacgatcgtgaccattgcgggcggcggcgctcacacacttgcccttgactcgacgggacgcgtgcacgcatggggattcaactccaaaggccagctaggaactggtactcactaattcatacacactaaaattacacacaaaaacacactaaaattcatacacactaattcatcagtccctgttttagcgttcacaaccgttacagagacggtctcaaacttgttcgtgaacttcacaggccaacatcgttgcttcgtggacgcgctcgctccagcaagtctacgcgatcacgaaggacttgttgtcgtcacagacaaaaacgcatacgcatccggtcttttaagaggacgacaacgcgccatgacaatcaacgaagccctacctatcgtatctctttccaaggtcccaaaagatccccgtgcattcagtgtgatctcgctcacccaggaccatcccgcaggtccatctgcagccatctcagtaacagagttcctaaagatcgcagaaaaaggtgatgtacgtgtccaaatcaattcgctcggcgaaggatgcatctgggtatgcgacgagaccggatcaactatccatgcaggtgattacgtcaccacaagtagtttgtccggttacgcgtctctccaagttagattagatgatggagatgtaccggatggtacattacgaaactatacggtcgccaaactcacgatggattgtgatttctcacagcctctggtagatgttgaagaagtacaacaagatgaatatgggaatgtcgttttcgatgcagacggatctctcgtgtacacgatcgtgaccacgacacagggtccttctgttgtggacccagataccggagagacacgtcctggggaaccactcgaaacacctattctagtgaccgaacctgcctacgaaatgcgctggatgacaaccgaaatcgatgcatcctcaggtgtatcgatcacgactcttatttcaaaagaagattacgagacacgtaagtcagatggacaattagtcggtttgtcacgtgcagctttcgttggatgcacttatcattgcggataagtgtacgactccgatatattcaaacaatacccgtgaaaaaagtgtgtgtgtatgataacaataacgaacaactgctattgctgatttgtttgtcatgcttgatgaagacatcctcctagttcgcagtaacaccgagctgcgcggacatgtcacggtacccgcctcgattacatccatcggtcgattctcttcttatggtccttcagtctttcacgccggagcagcgttctcaaatgcaccaactacattcggtgccaacatcgcatgcagttcgatcatcgatgcatgaggaggaatagctgtatcaggattcctatcgaatgctgctctgacacttactgattctggaggaggaatggcattgttatcagctccactccattccacacaagatgtgcatctgcaaaaagagctaaaagtccatggcaatgcgaccttcgatacacacgtcaccgttaacggcacgctatacgcaaaaaacttacatccgtctttcaatacattccaagctagcaacatcttgatttcaccaggtggaattattcagttcggagaaggaggctcttcgaccatctccttttccaacgctccggacacgggtctgttcaatccaatggctagaacactaggtgtggtcgcaggagggacggagatggtgcgtgtgtcagacacaaccgtatcattgttgggggatctcgtggtgtcatcgaacatagtcccgatgacgaacgcgacgcagtacctcgggacatcgaccatgcacttcaaagaggcgtggatcgaagagctccacatctcgtcgaacactctctacatcggggacacgccagtgctttgcgctgataatgatgccgtgtccatccgcgctgacccggggcaaggcatcacggtaacgaccacaggcgatggggagacatcactggtgtccgccaagggagtcaatgtagtgtcggaagggggtgtcacgatgcgtgtatcaggacctctagggagagttaacatccagtctagcggagcaggtggcaccgtgaatttgggagcggaaaaggaaattgtgatgacagcacctcttacgacgatatcaagtaacatgatcgtaaaaggtgacctaactgtagaaggcatccaattaacggtgaacacgcagacggtgacgattgaggacaatataattgtacttaactcaggtgagataggatcaggtgtctcaaagggtgaggcaggattttctatagataggggagatgctcccgaatatcagcttctttttagggagtcggacaacgcgttcgtaataggtccgctaggctccctcacacccatagcgaccgagacatttgcacgaaacgcaaacaatatatccagtggaacattagcggttgctagaggaggaacggggggctccacaagtaccggaacaggtagtgttgttttgagtagttctccaacgtttacgggaacagctaactttgcatctctaacaacttctgggccttcgacgataaatggtaacatgaccttcggaaccggagtcaatctatttgtaaaccctaacgattccgtgactgctccagggtactcttgggatactgatacaaataccggaatgtatcgtgttgcggcaaatacaatagggtttgctgtaggcggggtcaataaagctactataaacagcacggggatagtgggtagcggagctaatataaccagtttaagtgctgccaacatatccagtggaatattagcgattgttaatggaggcacgggagtcagtactggcttaggtgccctgaacgcaaacaatatatccagtggaacattggcggttgttagaggcggcacaggggtcacccttagtaccggaaccgggagcaacgtgttgagcgacaacgcaactatgagcaacttgacgaccataggaggcatgatcagcagtaacggtgtcggacttaccgcattgaacgcaaacaacatatccagtggaacattagcggttgatagaggaggaacgggggtatccgtcagtaccggaacaggtagtgttgttttgagtgtttctccaacgtttactggaacaactaactttgcatctctaacaacttccaatttggatgtgggtggtcttacgacactgaatgggaagtgtatgtgtcttgatacattgactgtgggtgttggtgttggagatgatactgtttacccagtacatataaagacaagtgtggataacgtatccctgttcagtgtgggcgatgtggtcatgtactccgacattcgcaccaagtcggatgtgctcccgattccggatgcattggaacgtgtgggacgccttcgagggtatacgttcataaagaatggtggtgacgagacacgtcgtagttgtggtctcattgcacaggaactattggatgtcttgcctgaagctgtgcatgcacatccggaatctggaatgctgactgttgcttacgggaatgtagtgtctttacttgtgaatgcgataaatgaacttaaggcacaagtcgatactttatcgtgcacttaatgcttggagtgggtgcatgaatcccccgaattttcgcattgcaagttcaatgatcagacacatattcgttttcaaagggtctaaggaaaaaacgcatatttttttgtaaaatgtctgtagaagctacacatccacataaaaaaatcatagacaggttttccattttgacaagagagatgcgacaagaggcgacatgtggcaagagagatgcggagatctttatctttgaggtttttagaatggtggccttgctaaacgacatcgatgttctgaatgcgatatggactcatttccctacttctgtgtggtcttgtgcttctggacatgtggttcaagatctgtatgaagaagagatgatagggacattaaatgaatttgccttgaaaagacggtttatcatgggagggaagtggcagtaccaaacattatcacaaacagatccacgactaaacgtgaccttcgacgattaatgcgtcgatttgtaatgatgaatggttgtcggaaccaagctcaagaaaactcaatgcacgtgtttcttgatgacaagtaccgcactgtgcggtcgcttgagcgcacaatgatcgtgctaccacagagaagccccgcatccacgaacttaaggcacaagtctatactttatcgtgcacttaatgccggagtgggcgcatgaatcccccgaatttgtattaatgccggagtaggcgcatgaatcccccgaatttgtattaatgccggagtgggcgcatgaatcccccgaatttgtatgtagccgtcaacaacacgcagccttgcaccgggataagttacacagttgcaaatgtcaatgggcgttcctggctcctggacgattttgacttgttgcgaaacatggtatgaagcggaattgtgattccttggtgctgatgactaaagctagcgagtcgttcaggaggaaaatctttttactaaaaagctccgggcaccggtaagggtgtccataaattctgcctctgactgtaggaatctgaattcgcacgcggctatccaggtttaaaggttactgtcgatatttacaataaagccaccactggcaacccactcgtacaagctgcatatatagtgatgaataccgggcgtgcgtgtaggctgtctatcatgctggatgaaggagaactgatccgcatcactaagtgcgagtcaggtgaatactcgattactgggtcacagggtgtgtgtgtgtggggcaatggttcggagcggtttatggcatcctatgtgacatcaatgttgaccggacatgacatagagcacatggtgctaaccaacaacatcttcttgcctaacatcaagccatctactgcgagcaacatggtggcgtgtgtgcttgagcgattggagttcgtgaagcacattatcctactcaaaggcgggcctacagtcggcggaacagtaaaatgaaacatatatcagatggaaatgtacgacatcgccgatagaaaattggcgttaagaatggtcgctgacttgggtgtgttaaaaacttctgtgtttacgaatgaatgaatcgatacaaagacgcacgtgtctgatatgatttccttagcattcagcaacctcactgataaaatcattatgggttgttttgaccacgtatggaacacgtatgtgatgtttgtataaagagttctgtgatgtataaattatgtaagatggcaacgaaacctccgacagtcgcgaaattgaaggagctactaaaattggccgaagtagcatactcatcaaaggacaagaaggacgatattgtccgtttatgcgaagacaatgatctcatcgccagaccccctccagaatacaagacggtggaaaagatgtgtgtcgtgaaatgcgccctgaagaaggcaatgagtcttgacgatgaagaattcggtaagtttagggagcatgtggaccagctcgtcaatgtggtgagccgcatgttacggcggtccagtcttgtgctgactttccacatcacgagtctattagagaaaggtctggatattccagacctgtacagcatgaaagatacctactggaaggattggctccgtatcggggtagacggaatcttccctgatgaggaaaagatatcgtacgaagctgtgaaggactccatcggcgatgtaattggtaatgacgacgctgactacatcaagtcttatccgatctatttcgatcaggtattgaactatgcaggtcacacattgagcactgtcgtgtcaaacaacgcatgggttcctttgataccacgtctggccagactcacttccaccactttaaataaattaaatgccccgaagacgctggacacatcgaagatcattcggggatacgacgtgatgcaggctattcagcaagaagtccaaaacatggagggatggccagagtctgttcaagagtacgtcaatgaagttagggagatgctgagtgttccagatggaagtcgagtttatgataactatggcaaagacatggactttccgaccatggtccggtttaattattggatacagacacggttggaggatatggatgcacgtcgtatccgattgatgcccatcttcaatgtccaacgggtgcatgttcgccttgacctgaagaccctcgtgaacctgttcaggcacatgttccccaatgaccagaacatcgttgagctttccaagtgggaacatgtaaagaatcccgacagcttcatgttaccccagaggcctgcacagaagaagaaaaaatcatgtggtcctggtgaatgggaggcatacaagtcggtcatgaagcagtacgatgatgatgttaaggatatcaaggctactgacgagtacagacatgcaaagggtttgtatgacacgcttgtgaacgcccgaaaaacagtcgcaggttccttcttcagaaaaccacctgtcaagaatgggtgggttttcgactgcagcatctgtactgacagagtctctttgagcatgcaatacagcaagacagtacaggtccttgtctcagatctgaagaagacctgtaagaagcctcgtaaagaagaaggtatcaagatcgcagaaaaatacgacggctcacttaaaacgatattgcccgatatgggtatcgtcgtcctgggtgtggacccaggacggagcaacatcgctacggtaacgtatttggcagacgataaaaataagacatggacgctgacacgtggtgaattttaccacaagtcgggtatcaagaagcagacaaggcagaaggaactgcgttttgctgacatgattcctatgtgggagtctctgcgtgaaaatggagcagctttgagtacatcgaggacggataagatctccgcgtacttgtcaaattacgctaagttttctgaagagtggtggagattggctttgcgacgccgagaatcccgtgacaacttgcagcgttacatcggaaaacgaaaggtcaaagactctttctgggcgggtatcaagcggtgcatgatgaaagaacttcctgatatgaaggtttgcgtggcctacggatctgccatcacgaaactgaagcctactggaccgggagaagttgcagttcccactggggccatgttcgcatcgtgtaaaagaattttcaaagaggacgtttctgtgacagatgagttcaaaacgactcttatgtcgtgggagacgggtaaagaaaaagaacgtgtttacaagatcccaagtgtttgttcagcagacgtgaagcttaggttgggtggtgaacgttttggtcacacgaaatcgaaaacgatgccaaaggtcgctgattgcgaccacttaggggtaaggttgtacaataaacgtaaaggcgcacaagataagcacaggaggggtggcttcgccacttcccttgtagattctcaaaaatcgatcgagcggtacccagaggtacgaggactgcgattctctccagaaacatgcatttactcggaccgggatcgctcttctgctctcacaatcgcaaggctgcactgcatggaattgatgggtctaggacgacctcttccatttgcccacagcagctctgttgttgttgatgaataaaaactcgtattgttgtagacaccactcggtccccctccggtggtcgcgacaacattaggttacaccgcaaggtgtaccatacactccaaaaagcggtttcattttagtattccgtcgagtgtaactcgtaacatattggccctcttaacaattgcgccaacggacttaactatcgcaaacgacgcaactgctaaagatgcgccgctctccaaagagggtagctttcccactgcgatcgttgccacgaccatgccccctattgctgtaacaagtgatgccgcaaacacggtccactgccacgttgagagctgccgcgctgatgatgctacgactgttacttcaaccccaataccccttgcaatcgtcggctccatgttgagcacgcgctctgccacagctgcatcgtgtagtgcttgatgctgcaatgtatgacttgtttacactcgtctttcgaggggggacacgtgtcgcctcaagcagacttctgcttgacaattatttaaggattatgaaagaggactcgcgggacccacggagtggggcagtggaattgagctgctgactcgcggatctgacctgtttacactcgtcttcgatgcacatgaggaacacgtgtcgcctcaagcagacttctgcttgacaactatttaaggattatgaaagaggactcgcgggacccacggagtggggcagtggaattgagctgctgactcgcggagatgacctgtttacactcgtatttcgaggcgcatgggggacacgtgtcggatctgacctgtttacactcgtatttcgaggcgcatgggggacgcgtgtcggatctgacttgtttacactcgtatttcgaggcgcatgggggatacgtgtcggatctgacttgtttacactcgttttcgaggcgcatgggggaaccgtgtcggatctgacctgcttacacgcgcgcttcgaggacgcgcatggggaacatgtgacgtctcaagcagacgtatgcttgacacacggggatgaacatccatggcaatgctgaaaactgacgcaggtggagggagggtttctccacctgattagaggtcaagcacggaattgaattgaatgcggactcgtgtgaacctctacggatctgacatgttttatggtgtaaacaggatcagagtaagcaaaatgtagatgttgtaccataccaaagagttatcattccgactgaacaaggttgaaacgatgctgacggacgcaacaaaacaacccaaggccaacttggcgccatgcccacccatcagggggctgggagcaaactggcacaggggcgcaggcgcaaaggcgagcatgcaggcagatgcgacgatcatgaacgcacgcgcgcagatgcagctgcaggacccgttcagtggatggagacagttcggatgctacaaggactggacagatgcaaacgaggcgctgcaaagactcaagggacatgcgaggcacgcgttcgagatcataccgttcggaaagccatgcaagccgtaccttgacatcgacggtccaccactgccgagcgaccaggtgcccttcccagacgtcgctgcactggtcgcgcacacagaggacgcaatcaagatgatattcagcaacgactacggaatccagatcgacgtcgacaacgacctcatatggctcgtcagcccaaacgccaagaagctcagcctgcatctcatcatcgacacgaagagagaaggaacgccgctccacggccccccaaaatacagaacgaacgcgagaagcatcatcatcttgacacgcctccgcgaaaactgcggaacactgtcgacacctacgtctcactccaaggcccctcaaaatacagatagatggaggtgtactacacgcatagagtcacgcctccgcaaaacggcggaacactgggtcgcgtgggacttccgcccggatacggacaaggcgaagacgctcgacaccctctccagcgctactttgctgccgcggatggcgacacggtccacgtggagtacgcaaagaaggagcacgggagggggaggctgtttgcgaaacgcgggctttcgcatactcatcggtgtccatctgcatctgcctctgcctcaaaataccacacggcggcgcttgtgcaatcgtcatcaaatgaagtataaattaaacagcgggctcttataattaccagcacactttgcagacacttcttcattcgcagtacctgaggatacacagttctaaagtcggatacagatgtcatcaaggaattttgtatgtcaatttgatggatgcaactctgcatttgcttgtaatagtaagttgactgtacacaaaaggacgcatacaggagagaaaccatttacatgcgattttgatggatgtggtgctgcatttactcaaagtggtgttttgaagacacacaaaaggacgcatacaggagagaaaccatttacatgcgattttgatggatgtggtgctgcatttgcttgtaatagtaagttgaatgtacacaaaaggacgcataaaggagagaaaccatttacatgcaattttgagggatgttgtgctgcatttgctggtagtggtgctttgaagacacacaaaaggacgcatacaggagagaaaccatttacatgcgattttgatggatgtggtgctgcatttgattgtaatagtaagttgactgtacacaaaaggacgcatacaggagagaaaccatttacatgcaattttgagggatgttgtgctgcatttgctggtagtggtgctttgaagacacacaaaaggacgcatacaggagagaaaccatatgtatgtgacttcgatggatgtggtgctgcatttgcttctactagtaatttgaagtcacacaaaattacgcatacaggagagaaaccatttacatgcgattttgatggatgtggtgctgcatttgcctggagtggtgttttgaagagacacaaaatgacgcatacaggagagaaaccatatgtatgtgacttcgaaggatgtggtgctgcatttgcctggagtggtgatttgaagacacacaaaaggacgcatacaggagagaaaccatacatattcgattttgagggatgtggtgctgcatttgctggtagtggtaatttgaagacacacaaaatgacgcatacaggagagaaaccatttacatgcgattttgatggatgtggttctgcatttgcctggagtggtgttttgaagacacacaaaaggacgcatacaggagagaaaccatatgtatgtgacttcgagggatgtggtgctgcatttactcaaagtggtgatttgacggcacacaaaaggacgcatacaggagagaaaccatatgtatgtgacttcgagggatgtggtgctgcatttactcaaagtggtgatttgacggcacacaaaaggacgcatacaggagagaaaccatatgtatgtgacttcgatggatgtggtgctgcatttactcaaagtggtaatttgaagacacacaaaatgacgcatacaggagagaaaccacatatatgcgattttgatggatgtggtgctgcatttgctgctactggtaatttgaagacacacaaaatgacgcatacaggagagaaaccacatatatgcgattttgatggatgtggtgctgcatttgctgctactggtaatttgaagacacaccaaattacgcatacagtcgagcatcaacagcggaagaaaagagaagagcaaaaggttgccaagttgttagaaaatcatggcattgatttcaaaagagaacaccaggtagacttttaaagtcagctaaattagctgtatgggatctacattcacaaggatagatttcttgattgtcaaagacggggttgctatattcttagaggtcgatgagaatcaacataaattcggtggatactcggttgcttgtgacatgaaaaggatggctagcatctatgagtccctagtcttcgatgacaacacactgccattatatttcattcggtataatccgcatgcatacagggttggtggtgaactacagaaaacaacgactgtcgctcgtcaacaatgcttagtggacgttatacactccaccagttctacaactgttaaacgaatgaatatactttatatgtattttgattgtgatacactcgtagataaaaacattcgattgtcggttcacacagacccagagtataacgagacaatgaagaagtgttgtctacacccagtgtattagtagttacagagaaacgaacacctaaggggtgttcctgcctcccggccgattcctgcaagttcaacaaagacgcggactcggtcctcgtcccgatcaagcagcaccacaaggatgacccagacacagcactcagggcagtcatctcaaacgtgccagaggatgccgcactcatacaggtgccagagcacataccgagatacgtcaagaagaacgggatcgcatggccggcacgaccgcgcacgcaaacagtcgcaaacgcagtcagagcggcgggaaccatcatcgccaaggccgtagagaaggaaccgcacgtccgacgcgccgacataatcgtgcgcatgctcgacctactcagacgagacatgcacctgtcagcattccacgatagacgaccctgaggacgcgttcgatcgagccgtaggcgtcaggttcaactacagtgacaggagtgaaccgtgctacacaggaaacatacacaacggagagcagaacatgagatgctttgtagacacagcaggaaactgcatcgtcaagtgcttctccgccacatgcgacaaccacgcgcccgcgtgcataggaagactcgcggaacctgctggcgacgagtgggatgcgggagccattcgagtaaaaagtaggtacattgacatcgacgcatgcctagagatgaagcaggcggtcgatgtgtggttagacccggagcgaaaggacgtcaacacgctctccgtgcgcagcccgatggggtcaggaaagtccaccatgctagacgcactcttagaacgcgtgggagaggacaagaccgtgctcgtcgtcacataccgccagtcgctcgcgctagagcacaagagaaaactggcgcgcaaaggatttgtatcatacttagacaccgacgtcacaccacaggacctcaggcgaagggacaagacaccgcgcgtcatctgccagatcgagtcgctacacaggctagcaaagcacacgtgcatgcgatacctcacatcgggctttgacatagtcgtgctcgacgaggtggaatctctgctgcgacacttcatgtcgccaaccgtcgtcaacccattgactgagatacagggtctggcggacacgctcaacgcaacgaccaccggcgtcgtcacaatggacgcgacatggggcagcgtcacgaaagaattcctaaagcaggccggcttgcgcaacctgctcgtcgtcaacgactaccggagcacagagaacgcgcgcacattctccatatcgaaggacgaggtgacatggagcgcgcagatctgagacgacatcatcgcaggcaggaacgtcgtcgtcgtctcgctcagccaagagagagcgatgcaggtgcacaaggccgcacttgacacattcgacgacccgaaggacgcggcaagactatgccttttgcacacgtccaagacagcagacgcggtcaaggcgatgctcatcgacgtagacgcactctggagcagcaaacgcgtcgtcgtgtactcgccgaccatatcggcggggatcgatttcagtaccgagcattttgacaggatgtacctgtacctgtgccccgggtccgcggctccgatgggcgcgctgcagatgactggacgcgtgcgccacctggtcgacaccgacgtcaggactctcgtctccaagaacatgagggtggcacgagaggcaacccgacaacacttgacgcacgtcgacctctaccagtggctcaggtgcgatagaggggggtgaaaagtggtgggtaaagtgacgttacagccactgcttaaatcatttacctgtccctttgatgccactgcttgacaactgacgcaggttgatggagggtctcgcaccctgcttaaatgtcaagcacgtaccgagtgatagataggtggcgggtaaagggacacttctaaaacacgcttcgctataatatataattgtcccattggaaccactgcttaacaactgacgcaggtggatggaaggtttcgcaacctgcttagaggtcaagcacgtacccgcgattgactgtggagacgaccacacactgcaagagctctcgggtggcgctctcgccccgttgtttgcgaccgtggctccaccgacactgaagatgactgtcgaaagctactttctagcggagatatacaacgccagcttcgactacgtgtcctgcttcgccgaccttctggagcatgcaggtcaccgcatggacctcggcaccagctacgctgcggtcagtgccgcccgcgtgcacgcgccgcctgagggcgacgtggaggcgacaagcgagttcctgatgcgcgtcctcaaggctcaggagcagatggatgcgcttaccggagttgtcactgcccctgtcactgcccctgacgctgtccctgacaatgtccctacccctgtccttgtcgctacccctgtccctgttgccggcaccgacatcctcagcaaccctgatgtgcccactgccatgcggcgcaaggatctcatggatgctatcgagcagcgcgtgatggccaacgacgcgagcgaggacgacaagttcattatgtacctgagccgctactgctctgcatggggcatcgaccgcgttgacgaggcgttcctgctggagaacaagcctggtgctgtcggttctccgaaggcgaggctcctgtcgcgcctgctgtgcccgatcctacgcccggtgcgcggcgccgacgtgcacacgactgagcactcagggttgctgaagatcgttctcatcgaagagacactcgctgctctggggtttgtgtccccgttcgacaccgagaccgtgatcccaaatctgatgacagcgtttgacaccaagctgaagggaacacagatgttcagtgactacacgaacaccgctcggctgttcaggcaggcctcgtgcggcgttcgcgacgggtgggacttgcgcaaggtgtcaaagtctgtgaagatgatcctgaacgcagtgggtctggatatggttagcatgacgaagcgggttcaggtaaaaggcaagagaactcaggaggagaggaactaccgcctgtgccgggagagtgtctgccgtatgctcgagctcgttaaacttcgtcttctgcgcacggacctcactcctagcaacgagcacgccgccgctgccctttctggccacgagctgtccatgtacaaccacctggttgacgtggcgtcgcctgtcgcgtacgtcttcgagcctgacgacgacgagccgtcaggcctataataatggtgtaaacgcgagcattgggatacagcatgtgagcagctcgacagcgatcatggcgcacattacaaccaatgtcgtgtacgcgttggttgagcacaagttcattcagaattatgagctcgtcgtcaaggtgggcaggacgtcgaggcccattgttcagcgactttctcagtacctgaagaactcaaagatgatattcgccatccacgtaattaatccgcgtgcttgtgtggaggctgagactgtcctgatccggtaccttcgcggagaccctagagtcaagccccgccgcgacgttgggtacgagtactaccaacttgacgcggctgatgcatgtgccgtctttcatgagatggccggtgtcgtcttccagtacgcgtggacaggtggcgtcgacagtattgattgcggcaccgaggacgtaccgcccgacccccccatctttgccgttgttgagccagagaaggaacgagagaaggagagagagaaggaacgagagaaggagagagagaatgatagagagagggatagagagaagacggtctctcgactggtcgccaagatattcgcgaacgtcttgaggctcaataccccacggaacgttgaggtacttgcatctctgctgtgcccggagctgcagcgcccttttcgtggcgtgccgttgcaccccgatcttctgaagatcgtgttgatagaggagacactcgctgctctggggtttgtgtccccgttcgacactacgaccgtcatctcgaacctgatgacggcattcgacaccaagctgaagggaacgcagatgttcagcgactacgcaaacaccgctcgactgttcagccaggcatcgtgtggtgttcgtgacgggtgggacctgcgcaaggtgtccaaggcagttaagatgatcttgaacgccgtgggtctggatatggcgagcgaaaccaagcgggtgcaggtcaagggcaagcggaccaaggaggagataaattaccgcctgtgccctgaaagtgtctgccgtatgctcgagcttgtgaaacttcgtcttcttcgcacggacctcacgccgagcaacgcgcacgctgccgctgccctatcgggtcacgagctgtccatgtacaaccacctggttgacgtagcgtcgcctgtcgcgtatgtcttcgagcctgaagacgtacgcgacatacctataataatgttgtaaacgcatgtattgggagacaggatgtgagcagctcgacagcgatcatggcgcacattacaaccaatgtcgtgtacgcgttggttgagcacaagttcattcagaatgatgagctcgtcgtcaaggtgggcaggacgtcgaggcccatttttcagcgactttctcaataaatgggcgttcctgcctcccggccgattttgactggttgcgaaacatggtatggagcggatttgtgattccttggtgctgatgtctcaagctagcgagtcgttcaagaggctctaaatcctgattataaattttaaaaaatcggccgggaggctggaacgcccattaatacccgaagaactaccgcatgtgccccgagagtgtctccaggatgctggagctcgttaaacttcgtcttctgcacacttgacacacgtagacctcttgttgacaaccacctggttgacgtaccgttgcctgttattattattattcgtaagccctcccccgatatccatgaatcccaatttcacgtacggatcgtacatcacggtatatcggatgagaagacactacaagacgtcaagatttcgcctgaattttctacaaaaacccatgattataagactacgactaccgttttccaacgggcatcatcgatgtttgcaagctttccgcagctatcacactcatgccacccccccttcccatctttccacaaacgcaactgataccttaagttcactgcactaccgcatccatcgcacgacaatgttttcacacgcgaccatttagctccgcatgacacacacgttcggactcctgtgtccatgttttgtgtcacaagagaggacgcgcacttaccacaacttacttcttctcgttccatacagtcagtcgttctcaaataattttgggacactcagtataatttgaatgatatccccttaaaccagatatgtgtcatggtccgtggttcactacaaatattttttgaggagtctgaggaaggtttgtaatatatactctctttacacctgtcgacctgtccagaccatgtttcgcaaccagtaaaaaccggtcggtaggctgcaacgcccattaattaaatccttgttctcctcaactgaactcaatgcaagtgtttcgtgatgacaagtaccttactgtgcggtcgctagagcgcacaaggatagtgctaccacatataagtcctgcatccaaagtgaacgcatctatacccccgctctgtactagcatcagaatatcctccatcgtgaagaagggtgcaggcgcggacagaccgtagtacacaccggtgctggactcaaacaccaccgagcacggagcgg

SEQ ID NO: 194 - DNA, 22409 bp, unidentified
  misc_feature 1..22409: note = Fanzor polypeptide
  source 1..22409: mol_type = other DNA
tgccatagtcatcataaagtcgacttccatctggaactttcagcctgactcgaacttcacggacatactcctgaacagactctggccaagattccatctcctgtatttcttgttggataaccctcatcacgtcgtacacacggatggtcttcggagctcccagtgcattcaaagtagccttagtgaggcgggtcagacgaggtaccaaaggaacccatgcgttgttcgacacgacagtgctcaatgtgtgaccagcatagttcaaaacctggtcgaaatagatagggtaggagttgatgtagtcagggtcatcgctaccaagcacctttccaattacgtctttcacggattcgtatgatattctactctcttcatctggaaagacgccgtcaactccgatccttagccaatccttccagtaggtatccttcatattgtacatattaggaatcggcaggtcgccctccatgagcctcgtgacatggaaagtcagcaacagactggaaggccgcaacatgcggctcaccacattgacgagctgatccacatgccccctgaacttaccgaattcttcatcgtcaagactcattgccttcttcaaggcgcatttcacaacgcacatcttttccaccgtcttgtactctggagggggtctggcgatgagaccattgtcttcgcataaacggacaatatcgtccttcttgtcctttgaggagtatgctacttcggccaattttagtaactccttcaatttcgcgactgtcggaggtttcgttgccatcttacataatttgtacatcacagaactctttatacaaacatcacatacgtgttccatacgtgttccatacgtggtcaccttagcgaagcacagctcaatagcattgaattctggactgtaaggaggagtgtaacaaatatttacggggcttctgaggaccaagttcttatggatactggcgttgtccattattactactgaattattgcacaaactcaatgagtcaataaatgcagcgaagtccgtcttcttcacagatcctttcttcacaacgaactccttcctaccatctgaaaaaactgccatcaacaaactatggtgtacccacccaccagtagttttaacgataacaggttttcctacaggggaatacccataatgtgccttgagacgctcactaaacccacattcgtcaaatgatactaaaattttcccagcattgattgtatccttgtatctactacaaaatccagtgacaagtgaaactaagtcccctttacactgtccaattttctaacggcgatgtcgtacatttatttccatctgatatatgtttcattttactgttccgccgactgtagaagatcttcattgtgaattgctttaatctgagtgagcgagtcatcagctgaatccctatgcaccgctacacggtgcccgcgctcctcccgttcataaatccaactgagttgtcaagcaggagtctactcgtggtattcaggaatcagttgaatgtgttggcggaaccccacgtattcactgtgcgagtcagcaactgaatccctatgcaccgcgctcctccgttcagattggtgcgcgctggtcctcgaattcgtcgtgaatgtgaatgaatgtatgcgcagcaaaatttgttattcgaaaaccagactaggataaaggagaagcagaaaaaacacatcatacatgcagacttttggggatttatatcggtgcgtcatggctcgagacaaaataataaagcattccattattatggcatgtgcaaatatacaatcagtacaaacatttgatggtaggataatcttggctatattatgggtggatcaaattcgccgaggtgcttacatgtttgaaaataccatacttcaacttatttgcactgacgaggaaacgactcccgccgttgcatcttcaataggaattgtgccctagtttcagatggttcgtgaattacacaagacattaaacaacatgcaagaaccttctgacaaagacaaacacaaactgtatgacggagcaaaggcttggctaaaaaacatcatgggttattggttccgttgtggatacgaattggaatggttgcattccataaggtactcgcaagtgggccccttcccttcccttcccttccctctgtatctggacccccctcagggtagggtaggtaggggtcccacttgaatgcccattaaagatacagatacagggtaattggcactaaagaaaggtacttgaataaaagctgcctaatacttgcgggtacctttatggccccctttgggtggtgagctagtacgcctagggtcattccatacagctagggacatttgatattgggacaccttatattttggggattctgaaaagttgaccaattcaagatttgtaaccgatcttgtcaatacagatactgtcttcaggtgattgacacaaaaaattcaaggcatctaaagacactgaatttacatgttcaaagtaccctgaaaagtcaaactgatggctaacatcgtgcgcatcaataatccttttcaaagcgttactgtaatcaaatatatctgctacatctggatcagcattttagtattccgttatcaaatatatctgctacatctggatcagcattttagtattccgttgactgtatcgagatcatgtacaccgtggcattcgatcttcaaccggcgagctccaacatggacatccggaatatctctgtatcgaattgaattctccaaagggatgtctattttgtcaatgctgcacccaggtaatcgtttggatccttccagccacaaacggactccttcatctgaaggatccagttccaccttgtaataatgctcggctcctggcaaatatgcaaaacctgttggcacgtgtccaaccacacgagcatatctaccaagaccaagaccaagaccagagcttgcaattgaaaaaacagttggcatctcaatgacttcaagggggtgaccgtcattcaacaaccgcgcatagacaaataatgaatccgacttcataatttatctgagaagcatttattttataaggaaacgctacagtcggcggaacagtaaaatgaaacatcccaataaacggtataaaaatgatccggaggttggaacaggttagggtcaagcaggaacaggaaccagcactgtcgagtcagtcacactctcatcaaggacggcatcgagttgagccactcacagggagacctctctcatctcatcaaggacggcggcggcacccgtcgagtcgagccactcacagggcgacctctctcatctcatcaagtcatgtggcttacattcgcaagtatagccactctcctcaaactttgcagcaatgtgtacatgtgtacaacaatcgaccgtctgtccaagttgtacatagagaattgtaattgattcaatatactgtaacattattgaccggtctgactgtaacatggccaggttgcggataaacttggatgatggtgttgacccgttggacgtcggtgctgcagtggagatgcttgaccaggcagtgtatgccaaggtgtcaccattggtagtgaagctgcttggattcagtcaggacggaagcctagttggtcaattcagcggcttcatgcatggggaagtcatcgtggcagcaggacacatgcaggggttctgcggcaagcccctaggtagtacatcaccggctgtggcctttaaggcaaggtacccaaccgacggctttgaggaggatttggaggtcgtggccccctcacctccaggcaatgtgcctgacctcattctgttgaagggttcccgctctgccacgagcctttggtccactgatcttgaaatcatggcgtcagtgtacgcactggggtacacaggcacagagaacaagccccgttgctccaagggctcactatccagcaccatgcctggctcagtggccatcactgcacacgcagatgacgggttttcaggcggaccagtggtcgacaagcatggccgtctgctgggggtcgtgaagggcgcacttggcaccacaatcatgcgcatcggcatcaccccaaaccacgaccttcacacctacctgcttcaagcaggatatccaggcttgatctaagcccatgtttgcaagcaccagtggcatgatgcaggatgcctattctggacccatgtagcagagtgcagaagcggtgatacacagtcaacggaatactaaactgaaaccacttcgtgtacggcacaccttacggtgtatagccagggtttagatatatacccctgtcttttgaggcttttgaaaagttgaccaaccgcgcgagagtcacttcctctcacgatgtccactgacgttctgttgttttctgggctaatacccggaatatgtttcaatctgttgaccgtccagtgcaggtatacgctcatccacgctgtcgtgaaggcacctcgaacccgcacgttacatgatgagtccccaaaagtccgcgtgtatgtgttttccccgcacgcgcaagagcacacaagccgcccatgcatgcatcatcatctataatcatccgcggcggtgcgtgcgtgcgtgtgagtcagcgacttaagacatcgggttacaatgtggctggcatatcctgagaatcatggattctctgcctggccaacgcctctcaccgacatctctgagataaaaaacgtaattaggacgtttacagtcaacggaatacttaaatgaaaccgcttcgttcgtggctcccctgcccgcgttcccactcactacagatatatcaacaacatgggcagcaacatggagggcaactgggacatgctgaagcaggctgctgctgaaaagccgattgtcatcaaaggcactggaacctacaagcgcacttttccggtggaccacataacaggcaaggtgctgatccgtggtgcagctagtgacaacgaggtgctgcttgagcagagcagagggaagtacacaggcataaagctcatgcgtgggctgtgggaagagccaacggggcacagcagtggcaccttctttccagtcgcagcacctgccggcgtaggggtgttgtggggcagcgctgggcactgcctcatgcccgccagcgtgcaacagaagtggcggtgcggctacggcacagacgtgctgccgtccagtctgtccactcggccggttccccgcgcaattgtggacctgggctggctaacagcggggcgcaacgttagcgagctggctgaacacatcccctcgcagccctcgcagcgcatcgatgaggctgagaggtcctgccagacttcgggttcatggtcaccaaggcacctgaggggggtccgatgcagatcttcattcccagcgcaaggaagctggtggatggggacgcggtgtgcgtgctggggtttgctcatcgcctgactgccgaatgggcgaaaaggtttctgcgcaccgaggcggattatgagcaggccgctgatgaggccgagctactgggccatcagctacctgctccagcaagctggcggctggatgaaaatctagccctgcgacgtgcgcttgacctggaggatgatgtgtgctacccctcgcgcttggtcgtgtcgcctggactggtggccggggcctctcagcgcatcatagagcacacctgcagcaccttcccgggcatgtcaggcgggccgggcgtggacgtgcaaaccccttggcagctgatgtttgtgcacactcgcgccgacgacgacttccgccgcaacaactacggctactccgtccaccacccgctctttgtcaatgcctatgagcgggaggtgctaccgaggctgctggccacatcctcagacctgctctcaaaagagatgatgcgctgcttgcacgggtatctggatgcccacaaggaccagcttgctgaccaaggcgttttgcatcaggtggagaagcgtcgctgagtcgcgcaaggtatgctctgtgcccggttctgggatcgttcaagcagacttctgcttgagaccccacccatctgatatatagacacaaggacccctttaatatgcgtgccccactccgtgtgtcccgcgattcccctttcatgatcccgacatagttgtcaagccgaagtctgatcgagactacacgtgttccccatgctccacgaaccacgagtgtaaacaagtcagatacactacagacaggatcctacacgtggcggaccttgcttcttttacagaggacaactgctttttcccagatcatcaaccgatccttaatacacgagcaaatctttgcatttgttgacaaatgttgccaatcgttttgcatcgacatccggatttttcttccataagttttccagtgctgtaataagataagctttataatgtgtaccgtacactccagaaagcggttttatttaagtattccgtcgagtgtgtgcatgccgtttattttcacccagttcatggattttgaatgtacggacgcgttctgcgaaatcaccacaatcttttaaaatcaggtacaaatcggagcataaagatacttgtggatatattactatatattactatctattactatctattactatctattactatctattactatctattactatctattaccatctattaccatctattatttagttattactattaataatgatttcagtggaaataaataaccacatctcgagacgggtcaaatgtatggaacacaagtggtattggagtttattgagctcaaaccccaatatcacatgggatatcatcgaatccaatcccaacaaaccatgggattggaactggttcagcagaaaccccaacatcacactagatattatacaagccaacccagataaaccatgggactggttctggattagcagaaaccctacaataacgattgatattgtcattacaacccccagtaaaccttgggattggggtgggttgagcataaaccccaacatcacatgggagattatacaagccaacccagataaaccatgggactggtattatatcagcagaaaaccctacatcacgtgggaaatgatcgaagccaaccccgacaaaccgtggaattggtattggatcagcagaaacccatgcattaaatgggatattgtcattacaaacccagacaaaccgtgggaatggggtggattgagttcacacccgaacatcacactagatattatacaaaccagccctgacaaaccatgggattggtttaatatcagcataaaccccaacatcacatgggagattatacaagccaacccagatataccatgggactggttttttatcagtaaaaaccccaacatcacatgggagattatacaagccaacccagataaaccatgggactggtttttgatcagtaaaaaccccagtatcacatgggatattatacaagccaatccagataaaccatggaactggaactggaccagcaaaaaccctgtcataacgatggatattatcgaaaccaacccagacaaaccgtggaattggggtggaatgagcgcaaaccctaatattacgtgggagattatacaaaccaacccagataaaccatggggctggtatgagttgagcagaaaccccaatatgttgctatcttcccaagacatatgtgatatcatacgtagatacagatcagcaagaactatacaaaaaatatggcgccatgtcaatactaacccaagttataatgcatgtcaacacagactctatagggaatataatgaaatggtttaaaattaaccccgttacactcagaccggtcaataatgttacagtatattgaatcaatcccctccggtcgcccacccggaaaggggctccgccgcttgtttatacagcccgcaattctgcggcgtttatggatatgtcactagcataacgcccgctaagatgcgtacgcgtttagttccttttactttgcagttgaaaaagcgcatgcacatcgattccgttgacaaaatctcatacatcacatgtttatcgacccaacggatgtcatttgtttcaataatgcaatggtccatgaacgctgtgtgcaatatgtccgactgcacccaagccttatccgaaacttcacaatgttttccgataaagtttgaaaacaagttctcgatacgctcttgctcgttcatcatttgatgacagattggttgttgactttaagttacactcagaccggtcaataatgttacagtatattgaatcaattacaattctctatgtacaacttggactcgttcaggatgatctaaatcctgattagaaatttaaaaaaatcggccgggaggcaggaacgcccattatatacacccacatcgtaccttcctccagggaggcgccggctccgtcacactaagggccatgcagggcatggctatgcacagcctgacctgcgtcagagtcctcacggagaggggcgtgccgcttccagaggaactaagagctcacttgacagaaaattaattgtccgattgtatttcctgacatgttcattatttgtaagcttgaatttccattttctcttcaaatgtaaagctcgtacggacatggattcatcatttgagagtctttgagaaatgagacaacgggacaacgacattgaagatcgcaataagcacagaacaaaagcggtgtttgccagactctcgcaaatggtagagcatgtcggtcgtgttcgctcgtttgtgcacaacgtgcgtaccacgcacctcgcagcggcactcacccttacggccaaggcagacgatgagctgcgggagttgttctccagcctaaccgacgtgtgcagggagatgggcgacatcaccaacgattccattggcggcggaacagtaaaataaaacatatatcagatggaaataaatgtacgacatcgccgttagaaaattggcgttaagaatggtcgctgacttgggtgtgttaaaaacttctgtgtttacgaacatcagtcgttctactctgtggaggtggaaacgctttggtgtaaatcgaaaacgacgtgaatttgtaagcaacctttttgagacgaataaggatttgttaaaatcgtttttattgtcaactcaatgcacaaccgcaagaggcgttgttgcttttttcaaaagtactcacaatgtacgattatcaactaaaacagtgtatcgtttcataaaactcattggttttacaagaaaaaggagcaaactccgtggacagtgtaaaggggacttagttccacttgtcaatgaattttgtagtaggtacaaggagacaatcaatgctgggaaaattttagtatcagttgacgaatgtgggtttagtgagcgtctcaagccacattatgggtattcccctgtaggaaaacctgttatctttaaaactactggtgggtgggtacaccacagtttgttgatggcagttttttcagatggtaggaaagagttcgttgtgaagaaaggatctgtaatgtgcgttcctgcctcccggccgattttgactggttgcgaaacatggtctggagcggaattgtgattcctctgtgctgatatctcaggctaccgagtcgttctggaggctctaaattctgagtagacatttcaaaaaatccgccgggaggaaggaacgcccattctgtgaagaagacggacttcgttgcatttattgaatcattgagtttgtgcaataactcagtagtaataatggacaatgccagtatccataataaattggtcctcagtcaccccgtcaatatttgttacacacctccttacagtccagaattcaatgctattgagctatgcttcgctaaggtgaagagagactttcgtcgtttgaactacataccgaatgaaacaaagacgcacgtgtctgatatgatttccttagcattcggcaacatcactgataaaattattatgggttgttttgaacacgtttggaacacttatgtgtataaagcggtctgtgacgtattgattatgaaagatggcgacgaaacctccgacagtcgcgaaattgaaggagctactgaaattggctgaagtaccatactcgtcgaagtccaacaaggacgatcttgtccgtttatgcgaagacaatggtctcatcgccagaccccctccagaatacaagacggcggaaaagatgtgtgtcgtgaaatgcgccctgaagaaggcaatgagtcttgacgatgaagaattcggtaagtttagggagcatgtggaccagctcgtcaatgtggtgagccgcatgttacggcggtccagtctggtgctgactttccacatcacgagtctcttagagaaaggtctggagattccagacctgtaccacatgaaagatacctactggaaggattggctccgtatcggggtagacggaatcttccctgatgaggaaagcaagatatcgtatgaagctgtgaaggactccatcggcgatgtaattggtaatgacgacgctgactacatcaagtcttatccgatctatttcgatcaggtattgaactatgcaggtcacacattgagcactgtcgtgtcaaacagcgcatgggttcctttgataccacgtctggccagactcacttccaccattttaaataaattaaatgccccgaagacgctggacacatcgaagatcattcggggatacgacgtgatgcaggctattcagcaagaagtccaaaacatggagggatggccaaagtctgttcaagagtacgtcaatgaagttagggagatgctgagtgttccagatggaagtcgagtttatgataactatggcaaagacatggactttccgaccatggtccggtttaattattggatacagacacggttggaggatatggatgcacgtcgtatccgattgatgcccatattcaatgtccaacgggtgcatgttcgccttgacctgaagaccctcgtgaacctgttcaggcacatgttccccaatgaccagaacatcgttgagctttccaagtgggaacatgtaaagaatcccgacagcttcatgttgccccagaggcctgcacagaagaagaaaaaatcatgtggtcctggtgaatgggaggcatacaagtcggtcctgaagcagtacgatgatgatgttaaggatatcaaggctactgacgagtacagacatgcaaagggtttgtatgacacgcttgtgaacgcccgaaaaacagtcgcaggttccttcttcagaaaaccacctgtcaagaatgggtgggttttcgactgcagcatctgtactgacggagtctccttgagcatgcagtacagcaagacagtacaggtccttgtctcagatctgaagaagacctgtaagaagcctcgtaaagaagaaggtatcaagatcgcagaaaaatacgacggctcacttaaaacgatattgcccgatatgggtatcgtcgtcctgggtgtggacccaggacggagcaacatcgctacggtaatgtatttggcagacgataaaaataagacatggacgctgacacgtggtgcattttaccacaagtcgggtatcaagaagcagacaaggcagaaggaactgcgttttgctgacatgattcctatgtgggagtctctgcgtgaaaatggagcagctttgagtacatcgaggacggataagatctccgcgtacttgtcaaattacgctaagttttctggcgagtggtggagattggctttgcgacgccgagaatcccgtgacaacttgcagcgttacatcggaaaacgaaaggtcaaagactctttctgggcgggtatcaagcggtgcatgatgaaagaacttcctgatatgaaggtttgcgtggcctacggatctgccatcacgaaactgaagcctactggaccgggagaagttgcagttcccactggggccatgttcgcatcgtgtaaaagaattttcaaagaggacgtttctgtgacagatgagttcaaaacgactcttatgtcgtgggagacggataaagaaaaagaacgtgtttacaagatcccaagtgtttgttcagcagacgtgaagcttaggttgggtggtgaacgttttggtcacacgaaatcgaagacgatgccaaaggtcgctgattgcgaccacttaggggtaaggttgtacaataaacgtaaaggcgcacaagagaagcacaggaggggtggcttcgccacttcccttgtcgattctcaaaaatcgatcgagcggtacccagaggtacgaggactgcgattctctccagaaacatgcatttactcggaccgggatcgctcttctgctctcacaatcgcaaggctgcactgcatggaattgatgggtctaggacgacctctttcatttgcccacagcagctctgttgttgttgattacattacattacattacatgttaaagtctacttgacaccgcgagggtgtatgagactctgtgctttaaacaaaaagaaaaagcacccacaaagcaaaaaaccccattacatcaggggtgtgtcgaggacaaacaaaccaaactcccaaccaccgttttggtggcgtaggtattaaaccccttagagcaggacccagatctcaaccacttacagtggcggaggtaagaagctaacaaatgagaagtcacaagaagaagaaaaaaaagggataataaattacggtgccactaagcagtccagggcttcctgtcttgctcttctacaagtagaaagatagtcggctaggttgctccaaaaagacttagtgccatttccattcataaaggttctgaatgtggaatcgcagaattccacattccatacggttaagtcggtatcctcatggacatgcctataaatatctgtaaacagattctggtagcggaggcgaatatcattataaaaagggcactcaaacatatgcatttcatcctcagttttttggaacccacacatttgacagtgtctcattgagcgagggatgtgtgctctatccaccaccctcattctttctgtgttcagccaatgggaacccattctaaactgtgctatagaacgaatctgatcctgcttatgtaaggcggatgtaaagggaatcaagccattctcatcattgctgttggctgcgaaccatttttggtatcggaggcgtttaaagccaacccttctctcatcagggatgtctctaactgcattggtgtcacttgggtacttaaacctccatgactcaaaaacttcagacataataccttcgacatcgacagcctccaaaatgttgatgtttttactggatcctagcttgtggagagcacaacgcaagtcatgaacccagccagtgttggagtcaaaagattcctcaagagccattctaatgagatcctcaggttctttatgtatggtcttgttccagaagcgcaaagcttgtttaagccaagcaaaacacaacggggttctacccagctcttccatgataatattagatgtagtagattggcaaacacccaacatttgtttaagtatacctctatgccatttctcacaagcatggtcatttgagataagtgtgttgttcagaatagaaggagcccacacctcacagccaaaattcaggataggttgtacaagagaatcaaacaggtgggtgagaatatcaatattgtatatctccatagtatggcatcgcctacgaagcatgtggtgtgccttttgggccttagtgagcatcctagaaaaagcagcttttgcacgattgcttgagtcaccatccacaaagagggatcccaagtagataaaagataactttgtagaaagttgtgctccatcatagacaaatttgtaatcaggatccatgcgggcctcatcacagaattgtttgttgaaaacgacaatctcagttttctttatattcacagccatcttagtagcctcgcagaaatctctcaggcagtcaagcatcgcttgcatatctgccggggattctgccattatagctaggtcatcagcataaagtaacagttgcagaatctttcccctaagctcagcccctacatttgggagcttggattggaggaacgattcaattctatcaatgaacagaccgaataggagtggggatagggggtctccttgtttaactcctacaagggatggaaaggaggatccaatgtccccatgtaggcgaacttggaaaacaacatgattatacatggacttcagaatactgagataggggtccttgactcctagccttgctaagcaatcccatagcaagtctctgttgacccaatcataagccttcttgaaatcaacaaaagccacaaagagtggttttttcttttctctatatttatctacaatatggttaagaatgaatgatgcatctgcagtacccctaccacttctaaatccatattggccagcggctctgaggttgaattcttctgaccaatcatctagtctacgtagcatgcaaagggagaagatctttcctatggagttgctcaccgcaagacctcgatagttgtccttgtcatacacactgcctttggatttgggtacgggtaccaaggcagctgcagcccattggctagggtaagaagtcttccagatgagattaaacaggttagtcatagcttgtacaaatcgggagttggcctcatgggaagcaaatctgtaccattctgcagggataccatctaccccgggggaggagtttttccgtagggattggagaacagaaaacacctcctgggtggtaaagtcttgacataaccatgttggtgcggcctctatctgaggtccatcagcttgagggacaaagtccctagcatccagacttggatcaatacctacttgcacatcaaagaggtctgcaaaataatcagtccaatcatgaattgtgatatctgccgtagtggccttgttaggctcacgcacgtctttccaaaaacttttcggattatgccgaagattcgtatgaaggttctccatgcgtgtttctagccacttcctcttctttcttctgagaatcctcttgtactccttgtgcatagaaccagccaagtcagagctagagccatgttgatgttctgcttggcttgctgcctgtctagcacgattgcattcatcatcataccatgcgttcacgggcccgtgcttacgcttagctacaggtttgtgacatggtgtgcatttgcttatggctagttcaatagcactagcaatccccttctctgaatcttccatagatgagctatggagtgcattgtcaagtaatcggttaacgtctggatcacgcttaattgtgtgtgcatacatctggacatagttgtctttccatttcagtttgggcgaaggtttaccaccagcaggtgtactaatagtaccttgagaaggcctaagggcagcatctggtatgtggagtgtgataggcatgtggtcaaactttccacccccgggcctgagagggcagtcatgcttgggagccacactaaacttgactcctggggtgttgagaagactaggggcggctagcgcataatcaatgacagatttcttgtccatgccatctgcaaagaaggtatgtgcaccttgcatatcaccttctgttctaccgttaaggatgataagaccagttactacacatagctggagtagggccccccccatgttgatgaataaaaactcgtattgttgtagacaccactcggtccccctccggtggtcgcgacaacattaggttacaccgcaaggtgtgccgtacacgaagcggtttcatttaagttgactgtattggcgagaacgaatccgttcatgatcacatgagcgagggtcacgtttgtgatggttgcgggtgttttttccgttcttcgcgcggtttatcatttcacaatgaacgtgtggctctggctcgacgacttgtgcttcaaggaggggcgaccccgtgtgacgacacctcatcgacttgtacaggcgctttcaaggtgactttcgaagcccagcactcatccttgatcgcttcaacacgacgatagttttcagcgacctgcaccaaatcaactttgccttccattttggcaatagtgttccgctgggttgcgaatttgatttgctgttcgctgtcctgctccaattttaatattctgcgttcaagtacttctttcttgtgcatgaaatggtcattgatggattcaatctccttttgaagctttgcatcgtagtcaacagtgccatcatcttttaatggtgttcgtttgatgcaacgacgacgaaggtaatgaggagtgatcgtgatcgctgagtgatcattcatgtttgattacttatcccaatcatgatgcatgatttttttatactcaataatgcaacttgcaagcagtagtagtagcaggcgggtgtatgtcctcagttgttgagtgtagtgatacaccggtcccccttgcaactctgtctgaacagtgcagccaacccgagaccgaatatgattgaaatgattgctgaccccgtcttggtatcgaatgctttggtaatcatgacacttcgtacgatgtgggtgtggataactgggcgtagataactgggcctccctggtcacgtaggtgtgcgacatgttaatgtggtcaacgaagtgagtccgtacagtggcgatatgtcggtcacgtaggtgttcgatatgtccaggtgaaccaacgcagtgagtccggacagctacgatatgtcttggatattgtcttcgatagccgacattgattggtagggtacgtattccacccgattgacaccgattttcaactctttgagcctgcaaatgcgtgataatgcgtattccaaactgttataatgtcttaagtggatccttgtgacacaccggggtgcggcgcatctccactgtttgcaaacgagaggcacttgtttgaggtgggattcgttcgaaatcgcattagatagaatgatctccaatacatcttcattgatttcttcaaacgaactcattcgtttgtgaagtgttctgtgctgtgctgatggttgtttacactgaagaatggttgtttacacttaattcgaggactaccatacgaggcgaggcgatgagggacgagaatccgccaccgcatccgtgcactgaatattaatgaatggccccgacaatgaattcgacagagagagattcgagtttgtatgtctgtaataatctgtatggattttgcgttgtttacactcgtttttcgaggcgcacatggaacacttgtcgtagattcgttcgccatcctgttcggttgaatctgggtaggacgactcctgcatgttggggagggggattccgtattgtttgcaaagatcctcattgagacgcctgtcattatcgttcagggaattccattgctcgatagtcatgcttgacagatcgtacctcacttgcttctcaagcgcttctgcgcgctcagtctcaagctcaagctcaatctccatactattcactcgagcagcatctaccttctttcgagcgcgctgagtctcaagctcaatcttcagtcgagcattctcaagctcaatctccatactattcactcgagcattctcaagctcaatctccatactattcactcgtgcagcatctgccttctttcgagcgagctcagtctcaagctcaatcttcagtcgagccatgtaaataatagcgaaggtagagatgcagacaagtagttgagaattgtcaatcattgtttataaattctgatgattgtttcttaagtcgtgtgttacgcaatctcaatctctgggccatgtactgtagtgtaccaccactccggcaaaagattcaaacccacctattgaatgcgtttccgcgatctccggtctcagaatcgcgagagaactttgtgaaactcgcaagcaagccaagtcgtaggtctgctctcgaagcgtctagggaatatgttggcgtctgctgtccttagagtaggcgtcatcagccacgcgtgtctcttcttgtgtcctcctccgatgatgagcaattcgtcactcaaccctgcttgtgtttacactacatttccaatgtcgcgtctcggtgttgtgcatgcaccgttaggtgtgccgtacacgaagctgcttgagtgaataagcttgagactgagttcggtaggaacaagctcactgtagataaccaacagcaattgcatcgtctgcagtaacagtaattgcatcgtctgcagtaacagcaatggcatcgtctgcagtaacagcaatggcaagtgctgctacgtgtgcagcagcagcggcagccgcagcagctaatgcccttgccttggtgagcgaacctgctggcgagggcttgacatagctctgcatctgcggcacaatattgtaaaggtcctcgttgccgagcttgattgtgtaggactcttgaatggacacgtcgtaacacctggtatcaaaatcagtgtcaatgatctgctgaactagtacctgcccaccccaaacccttttttttcccacagaaaggccagctggaggattgcaccgagctccatccgaatacttgaatgacatcctgactatgccaaatgcgacagcttcaaacacggcccttatgtcgtcggtgatgtacatgtcatcaggtccagtcgaccccgtagccttttgaaagctgatagaaccatgcatgatgtccggatcctgcatgttgttttttgacattaagtatattgaatcaattccaattctctatgtacaacttggacagacggtcgattgttgtacacaatgccggaggctcacatcaatccctattttaaacgtgttcacatgaacacatctgaaaagactctccatctctgtatcctggggtagaaatcgaaccctgtctgatgagaatgataccatgtttatttttcacaagtaatgggcgttcctgcctcccggccgattttgactggttgcgaaacatggtatggagcggatttgtgattccgttgtgctgatgtctcaagctagcgagtcgttcaggaggctctaaatcctgattagaaatttaaaaaaatcggccgggaggcaggaacgcccattaagtataaaaaatcaagactatgtctagtatattgctttgcgcaccctatctcttctgtgtagaacagaaacaatggataacttcaagaagttggatacaagcatgtatgcgtgtttcacagtttcaggcagtacgtggaatggcaaattttttattttacatggaacggtggtattcgataatgaggatgacgccaagaaatgtttagaaatactcgacctgtacaaagagacattctacttcaggagtacatcgaacgtgatgaataagactatgttcacgtttgacggcacgacaatccacctattatctggtgccaaaattgagtacgaccagaatgcttctcgattgaagaagattgtagagatagaaaagacgtacacggcaaacacgtgggaatacatggacaatacgtaaggctattcgggtatcttccgctcaggaaaagggcattctggagctgcttgctgttatgtttttgtttgcagttgtatattctgtattatccatgttattatgaagctaaattctcctcgcacgtggagtagtaaatgtagtacatagagagaagagtaagtaatgcggtgtgggttgttttttgtctgcgtaataaagaacccttcttctcgttaatttttctcaatattgttttttttttattttgttttttgttttttttcgatcgtttaagttttctgtttttgcgtaaagtggttattaaaataatataatagttaaagaaaaaagtttaacgacccccatttgcactagcgcgcactcctccttccttttttcaacaataaccggcacggggcaccgggggccgcaagacacccacatcccttttcgtgggaaaggaagggagcaatgaaatcgcatcgctatttttccttcgattatttattttcatttggcgttttccatgctttggtttttttttttattggtttagtagccttttttactgcaatatcatatttatttcacgcctctcttcagcttccttctctcgttttccttcctctcgccctcaaacaacgacacgaactcggtgccgcaatcaaggctgtcgactccacgaactggaatacgacattggttgtcatgtgcgccatgattgctgtcgagctgctcctatgctatataatcccaatgcgcgcgtttacaccacttccacgagacagacgatgaatggacgagacagacgatgaatggacgagacagacgatgaatgtgtgtcatgaatggacggacggacggacggtgtggatgcgacagttttccacagttttgcgtgtgatgattgattgatgccttgacacacttggtttctgcagctcaattcccctaccccactccgtggggcccgcgatttccctatcgatatacgagatctattgtctagcagacctctgcttgacatgtgatcatcgtttgcgattactttaccgtgtttcccgtcatctgtgagtgatatcttacagtatcgaggtattgacacagtccaacttacagtggtggtgtttcactgccaggactcgaacccccttgtatcactcaaatcacgtgcatgtgtgtgtgcactccatggggcgtacgtccaagaagaacaaaaatgtgcagcacacacgtatttcgccatgcaaactatctggtgggcagcttgtgaaggtgacatgcaaccgggtactggactaccctcatgatggcatcgtaagccgttcttacagcaaggagtacacagcgcgcgatgcgtctgacgtgctgaacagtgtgcatgtgatccacttctgccgcggtgaccctcagtctctatttgatgatggaagtggtaaggcgccgttggacgagctacgggtgcgtgagacgtccctgtcgtggtttgtggcacagggtcgagatccacacatcgagtccggcccgccatcaccgttctcacctgatgaagtagtgaaacgtgctagggcgtgtttgggcgctgcggactacaaggctcgcaagcgtaactgccagtcgtttgccacacactgctattacggggtggcccactcggctgcagtggttagggcaggctacctgatcgcaggggcagttacagtcagatacagaatttatgggacacccttaccggtgacccttgaacccaatgggtaggtcagctaaaggttttgtatcaaggtccaatccttcgtgtccttcatcccgtatttcagcatttaagctggcccagaggataacaattgtaagctgctaactgacccaggtgggtcggttggttgagcgcccacatttgcctctccggaaactgtggtttttgggtgggcgatgaggagggcacacaaaatgccgctggtcgctctttcccgtccatccacgtcgtcagaagcagaagaaggttcttggcagcgttcatgtctcggttccaggttgcaccacagcgcaccatggatgatgcgcttttgacactgttgcgaaagtgcagtactttgtggaccttaacgttcttcaccaccgtcttctgcttctcaaacgttgttggtgttgtaggagccccgtcgatgagggcggagggctcgttttgaactctgcgccagacgacgctgtctgccttcatgttgacgagcttctgaagcagccgtggcaagtacaagaagtgttgcgttcgtcgacgttttgaacagaacattctgacgacgtgaaaggcacttcctgatctctttcactggtcccagaacacgaacggactgatgccatagccctggttggaccagttgccgaagccaacaacggtcttctttgttttggagcaatcacatcgcataccttttcttcaatcgttttcttctgtgcttttggagcaatcaaatcgcataccttttcaatcgtcttctgtttgcccacatatcgaagaatcgcatcgatcggtaacctctgttggctcggtgttgaaggagggtcgggaggcgctgaggtaacctctgacatggtcctgcatgtcgtgcatactgctcgtagtcggcgatggaatggacttcacgaggtcttgcgtatcggcattccatttgtttgtgcgacgattgctggtattgtacccagctgcttccctaaagcgggcagagctgaaagactcgactcgaccgtcagaagatgctatagtgacgatatctgtcatacccgggttgataccgacacgcagcgcaccctggcgcaaagaagcgtcctggcagtcttcgatacttgcgtctttgggataccccgcattatctcctcctccttctccagcgatatctttacccacctgaggcttcatttggacggagacccctttgccgtcgctgaggattcggttgtcaaaatgagaccctttcg

SEQ ID NO: 195 - DNA, 22382 bp, unidentified
  misc_feature 1..22382: note = Fanzor polypeptide
  source 1..22382: mol_type = other DNA
gcccgatattcctcacgtactcctccgtggtacttaattcgcgtacgatgataacagcgggtgactttggttaaagctgtgggtcttggaaatgttgttaacacatccgatgattggcttgaaagaagtgtgggcacgtgctgccaaaaccattcattgttctatcctcctcccggtggggaatcatgttcgagcctgtcgcatgttcggtgtatagtaaccttgaacacgaacgtctcgtgcacgagttttggtctcctctgtcatcatcaatcattccaggcgccgtctcctgacggcgtttgtttacgtgccaataatgccaataattgctacacttgcgacgatgtcataaatgcatacaaagcaaaaggatggacatacgacaagaaaacatttgtacagtgcaaggagccggaatacttgggatgtttcgctgacaaaggattcaccggcatcagtcgacctctcgtgggtgccggtcgcacaaaatccaaagacaaggccgtgatattaaaaaattgcgagaatgcagcaaagataagggggcacaacatctttgcaattcaggataataactcatgtttcacaggaacggaagcatctaagagttacgcgcgcgacggcgtaagccaaaactgcggtactaatgggacaggggggggatgggcaaactctgaatacaaaatataatgggtggtcggggggaaacggggaatggtaccgatgcgtttacacttgacggaatacttaaatgaaaccgctttctggagtgtacggtacaccttatggtgtgccgtacacgaagcgtattcattttagtattccgttgactgtaccttgacccagcagttccatgcagggcagccttgtgattgtgagagcagaggagcggtcccggtccgagtaagtgctggtttctggagagaattgcagtcctcgtacctcagggtaccgcttgatcgatttgttgtcgaaaaaagagggggctaagccacccctcctgtgtttttcttggatttgtttacgtgtgcagtacaccctcactgccaactgttcgcgataagagacctgtggaggctccttcaatggggtgtgacccaacaactcgtaaccttagtcgaatctgacccacctgggttatcctttgggccagcttaaatgctgaaatacagagatgaagggcaaaaatatgtcctcgcctttagctgatctacccattgggttcaagggtcaccggtagggtgtcccacaaattgcgtctccctccgactgtagtttcattttaatgttcctttgaatgtactgtattcaacattttgacatcatgagtacatcatcatcgaatattataaatcaggatcaaagagcattcggtagcgacatacattcgcctcgtcctcctcctaatattcccctaatcagtgttgttgtatccaaacatgacgaggggccgccacatcatgatgacgagaatgagcaagaacaacaaaataaatccgcgccgacagtgttatcgctctccaatcgttgtgcagccgaagtcgtggcatgcttcttcttccacatattggggtcgttatcccctacaccatggtgcaacgcagccacgttgtccatcatggttctagcgaccgcccgcatctccggggcgcacctgaatccttgcgtcacatgggttttcacgttgatggggtacacgcacccgcacgaggcagtcctctacgctgtatcgcagtacgttggatgcgtcttaggcgcaatgtacctctcgctcatgatcccgggcgtcagcgtggggggacctggcttaggatgcttctcgccaagcgaagggatcacagacaggcgcgtgctggctatcgaagggctcggaacgttcgtgttcacattgtgcgtcttcgcggtcgtgtggtacactcaaaacaagcacgggtacggtaccatcggtcctatcatgatcggactggctctccttgcaccagcccttgccataggaccgctcaccggtggtgcaatgaatcctgcctgcgtgttggcaagtccgacggtcttcaacgagggcgcaggatgcaagggagagttcctgggcgtgtacgtgggagccgagatgctcggggccacgttgtccgcgatatgcgtgctcctgtgcttcggtttggcagaggttccttggtacccgtacagtgtgaagaaggttatacggcgcatcgtggaagccgcaagacacccaccctttgtaacgtactcattggtgcggggagattgaaccattaattcctcgcgtaaacccctaaaccacagttaacacagcatacatgggtgacaaacttaatcaatcaatcaatcaatcaatcaatcaatcaatcaatcaatcaatcaatcaatcaatcaatcaatcaatcaatcaatcaatgaggtcagagacaatttcaccattcgcgctgaccgatgaggaatgggcggatatcattaaatccaacacattcacgcgtagcagagctgagaaacggcgctttgatcatctgcaagaggaatctactgaaaacatgaagaccatcttgaacaaattgccgaagatcaagacgaagaagatgtagatgtagatgatatgtgatacaatcactgtagttaattggattgatgggacacacgtccacattgtaacatattttctctctctctctctctcacacacaaaatcttgacataatgggcgttccagactcccagcggatttttactggttgcgaaacatggtatggatcggaattgtgattcctctgggctgatatctcaagctagagagtcttttctggaggctctaaattctgagtagacatttcaaaaaatccgccgggaggcaggaacgcccattacatctcaaaaatttagtagggatcctgtgagagacgcttttcaatttcgtccctttcatacatgtagggacattcttgttcacgggcatgttcctcatttgccaaggcattgattacatcactgacaatttgggtctccttattcgatatgttgttcagtgattcaatgaaggtctcgaagattttcttacgctctttctgactgttctgaatgcgcttgcgatacttgaacatacatgaatcttcgatgcacccctggtgcttctcacacccttcatttccgtccccacaaaactcgaggccatctttgttaaggttgtgatgaaaaacgcgccgagggcatcccgtaaacgtaattcggacagtgcgaatacaatctcgggagggggagatcttacacatcactctttcgttgcaaatattaaacatttgtgcttgatacaaatgtacttacttacttcctgacgcgattttttttagtgcaatcgtccgcgagtcaatgactcactgagctggctggctgacatccttgtcggaacacacattgcggacaatctttatctgcagataggctctctcgattattccaagtcttcatcagaacacacgatatgcagcagttgatacaatgtataaaagttacgaacaacaactactaaagtgcttactcgcacatttacgataacacatattttgatgaaagtgatacaatcgtgttgaaaataaaaggcatattacatattcacactataatccacagtggagcgccaagagctaccatgggtaatccttcacaacagcaacatgacacaagcgcgcccatctctccgcaactggctgagcaggcgcttcaccggtttctatcccagcgccgtgtacataaaggggacgaattcacacacaacggcatggggggaggacgctcgtgcagtgcaggatcatactacatatccgcatccgaccaggaagatttccaccgtctgtaccgtgaagcagtaaatgcaggcgcaccggatctctcgctcacagagaagcaccgccacatcggaccggtcgtcattgacctagacctgagacttgattcgggatgtattggaggcggcagggcttctcctgacaagtccatagtggacattcgctcattggcacctcagatatgcaaaatataccttcaacgcatccgagaatttgtcgacgctccgcgcatccgtttctttgtcatgtcccgatccaaggctcctatgttcttcaagagcggcgtgctaaaggacggactgcacatcatcgtcccggacatcgtgacccgcaccgaggtgcagtacctcctcagacagaaggtcctagatgacctatcggccctgttctccacacacatccctggcttgttattgcgcatcgaggatgtcgtagacgaggcagtcatcgaaaagaacaactggatgatgtacggaagtcgaaaacctggtgccacgccgtacaccgtgcacagcgtgctagagtgggactccgtctcctcactagcggaggtcccgatagcggaagacgaacaacatctctcagacatactctctatccggaacaagtacaccgagagcgagctaagagaagatagtcttgatgaggtgactgtattctcacgcacacgagaacatcgcaacagaatgcgagagacgatccagaatgtagtcatgcaggaagacgattgtaggaacaaccacgtctccgccgatgagttccttcgcatttcccagattgtgatgatgctttctccagctcgcgccgactgctacaacgagtgggtccgcgtaggttggtgtctgcgcaatatagatcatcgcctactagacaagtgggaggaattcagccaacagtcgccaaagtatgtgaacaccgagtgcgctcgtttgtggaacaagatgcgcaaaggcggactcgggataggcacactacatatgtgggcgaaacacgacaaccccgaggcgtacccgaaccttatccgcaatgatctacactcgctcatcatgcagagctcgaacgggacgcattatgacgtcgctcgcgtggtgcaccacatgtatcgctatgattacgtgtgcgcttccatcaagatgcgcatctggtacgagttcaggaaccatcgatggcacgagaccgattccgcatacactctacgcggcaagatcagcaccgaagtggtcagcgaatacacccgcgctaccatgaacattcaatccatgtccctgacggttgatgagtctgagcagaaaaggttgatcgagctggctcacaaactcaccgccgtatccctgcagttgaagaagaccgctttcaaggacaacgtgatgcgcgagtgctgtgagttgttcatggtcgagaagttctgcgacctccttgacagcaactgctctctggtggggttcgagaacggagtgtacgacttggagcgtttcgagttccgtgacggtcgtcctgacgactacatttccttctcgacgggttgtgcgtacaccccattccatcgcgaccacccagtggtcgccgaaataaacaagttcttcgcccagacgcacccacgagaggacgtgcgcacgtaccttctaaggacgctcgcggattgtctctcggggcacatccggtacgagcgcatgaacgtgtggacaggaagcggatcgaacggcaagtccatcacgatctctctcatggaaaagtcgcttggggactattgctgcaagttccctgtcactcttcttacgcgccagagagcggctagcaacgcagccacttccgaaatcgctagggccaaaggcaggcggttcggcgtgctgcaggagccatgcgagaacgagcacctgaacatcggactaatgaaagagttgtcgggaggagataccattcagtgcagggagttgtacaagccccccgttgagtggaagccgcaattcaagttgtttctacagtgcaaccatttaccttcggttccttcggacgacggaggcacgtggcgacgcatacgcgtgatagagttcaagtccaagttcgtgcccaagccatccccggaccaccctaacgagttccccatggaccttgaactatcgtcaaagttggagcattggaaggagcacttcgtatcgatgctgataaacacatacacggccacgttcgggcaggcgctcgaggagcctgagcccgtcatggcgtgtactcaccagtaccagcgcgacaacgatcactttgccaatttcgtcgacaagtgtgtagagaaggtcgaagaagacacggtatcggcggaaacgctcacgctcgacgcagcattcgacgagtggaagatatggaacaaggccgagtcggacggtatcacgggggcaaccaagatccggagaggcgcgatgaacaagtacctcgaccaggcgctgaggacgaaaggaattcgtgtcaagggggtaggaattgtttacgaggggttccggttgatcgaaccagagttacgttgatatttgccatcttgaggaggcatagacattgaaggtggcattccgaacgggtatcgaggaagcgcatcatacgaagaggggccgttattattaccaccacgggcgctagatctcgggccaacgtttttagaaatggattgttgtgttgtatcaccattgtccccaccattaatgtgaagtcgttcattgtcgcggccgcgcccacgcccacgcccacgcccgcgcccgcgcctattctcattctcattctcattctcactcgcactatcactgtcactatcattgttgcgggtgcggtcactgtttttgcggtcattgctgtcgctttcactatcgttgttgttgtcacggttattcttgctttttaggggtagggaatccggatcaaacatagctcggcgtttcatattgtagaccgctgatggtatgaacggtttgcgtgacacagattcttcttcatttcgcttgatcgatgcgtcatctatattgttgtctacttcacgacatttaagatcttcgcgtttctgaggactcctcactccctgttctttcgcgttcgcgttcgcgttcgcgttcgcgttcgtgttcgcgtttttttttcgcgtttgttttcgcgtttgttttcgcgttcgcgtttgcgtttgttttcgcgtttgttttcacgttcgcgttcgcgttcgcgttctcgtaagcgttagcgttagcgtttgcgttcgcgttagcgttcgagggggagttcgcactcggagaacgctgcacaaacatagatcgtaaaccgaataaacctgataccacgattatcaacacaggaattgtactcgccattttgtatttaaaacggatcactaaaaaatattcgggtcaactccggcatccggttacaacgcggtacttataataagagatatgatggcatctttcttcatggaggcaatagcagttgctgtcacaccaggggtgttcgtactagaaagaagtcttctaagctcgtcgacacgcatagacttgagtttaccctcgttcaaattactgggtcgaagagattcactatcaccctcaataggtactatttcagtctgttgtggaaaggtagtagcggaaccagtatcggtactattagtaccatcagcatcaacatcaccaacatcagtatccgtgatgacacaagaagtttgtggggtataatttacagaatggtcctcgatgcatggtgatcaattggaggaaatgatcgtcccgacaatgtcgatcatattgtctacctcgtcatcttcattgtcctcatggtcatcggtatattcttccccggagtcggaatcgtcttcaacatttgcggacttaccgtcacccttcttcaagacaataacgtgattagtattgttacaagtctcattaccattgggctcattatggcgcaacttagaactcaccaaagacagacactccaatcgaaccatctcgatacgcttttgcatctttgtgtggatgtccgatatagacatgaacacatacaacgccgtgcacacggccaggcaagctgtgagaacgctccaagggatacgtgttacaattgtcagtgccattgaaaagactttacatgtccttacaaatacaaaatcaacgaacgattgaccgcgcaacccgtttttcctacaaatgaaaccgtaaacgataacgagacgtttgatttattgatttgcgttcgcgacatgtatcacgtgtcactacactcggtggaacagtaaaatgaaaaagactcaataacgttctgcattgtttcaattactgctcttgggtcttgaagaagctttgggtcttgaagaagctttgggtcctgacgaagccttggttcctgacgaagctttgggtcctgaataagctttgggtcctgacgaagccttggttcctgacgaagccttgggtcctgacgaagccttggttcctgacgaagccttggttcctgacgaagccttggttcctgacgaagccttgttcgcggatttttcggttgatttattattctttttggactttgtagacgactttgttggcgtcgtcttggagatacttttggtggaacgagtaacaacatcctttttttcgggctttttggtgaaaatatcgtttacaatgttaactccttctctagcacctagcattaaaaaagggactatgaatttttgaaattcagttgcaattattcctgcttccaacataggaaggttccgttaataaacttaacggaacataaaaaaaactgaaacataccaaaaaactgtacaaggacaacgcttcaatggacactctcgaaagtaccgacaaaagaacgatacggagtctgcaggatggagagccgtgatctaaaaaagaaccacgatattctcttgcaatttgttgattatattatggtattggtgttccactgccccgtggatttctacaccataaggtgtaccgtacacgaagcggtttcattttagtattcctttgactgtacagtcggagacacaaattgtgggacacattaaaatgggcgttccttcctcccggcggattttttaaaatcttgtcaccctgacaccgtttaacacaggacatgtcagggagagaccgataagacacagagagacaggcagtcaataggaagctgacactacagtcggcggaacagtaaaatgaaacatatatcagatggaaataaatgtacgacatcgccgttagaaaattggcgttaagaatggtcgctgacttgggtgtgttaaaaacttctgtgtttacgaacatcagtcgttctactctgtggaggtggaaacgctttggtgtaaatcgaaaacgacgtgaatttgtaagcaacctttttgagacgaataaggatttgttaaaatcgtttttattttcaactcaatgcacaaccgcaagaggcgttgttgcttttttcaaaagtactcacaatgtacgattatcaactaaaacagtgtatcgtttcataaaactcattggttttacaagaaaaaggagcaaactccgtggacagtgtaaaggggacttagttccacttgtcaatgtattttgtagtaggtacaaggagacaatcaatgctgggaaaattttagtatcagttgacgaatgtgggtttagtgagcgtctcaagccacattatgggtattcccctgtaggaaaacctgttatctttaaaactactggtgggtgggtacaccacagtttgttgatggcagttttttcagatggtaggaaagagttcgttgtgaagaaaggatctgtgaagaagaaggacttcgttgcatttattgaatcattgagtttgtgcaataattcagtagtaataatggacaatgccagtatccataagaaattggtcctcagtcaccccgtcaatatttgttacacacctccttacagtacagaattcaatgctattgagctatgcttcgctaaggtgaagagagactttcgtcgtttgaactacataccgaatgaaacaaagacgcacgtgtctgatatgatttccttagcattcggcaacctcactgataaaattattatgggttgttttgaacacgtttggaacacttatgtgtataaagcggtccctgacgtattgattatgaaagatggcgacgaaacctccgacagtcgcgaaattgaaggagctactgaaattggctgaagtaccatactcgtcgaagtccaacaaggacgatcttgtccgtttatgcgacgacaatggtctcatcgccagaccccctccagaatacaagacggtggaaaagatgtgtgtcgtgaaatgcgccctgaagaaggcaatgagtcttgacgatgaagaattcggtaagtttagggagcatgtggaccagctcgtcaatgtggtgagccgcatgttacggcggtccagtctggtgctgactttccacataacgagtctattagagaaaggtctggatattccagacctgtacaacatgaaagatacctactggaaggattggctccgtatcggggtagacggaatcttccctgatgaggaaagcaagatatcgtacgaagctgtgaaggactccatcggcgatgtaattggtaatgacgacgctgactacatcaagtcttatccgatctatttcgatcaggtattgaactatgcaggtcaaacattgagcactgtcgtgtcaaacaacgcatgggttcctttgataccacgtctggccagactcacttccaccactttaaataaattaaatgccccgaagacgctggacacatcgaagatcattcggggatacgacgtgatgcaggctattcagcaagaagtccaaaacatggagggatggccagagtctgttcaagagtacgtcaatgaagttagggagatgctgagtgttccagatggaagtcgagtttatgataactatggcaaagacatggactttccgaccatggtccggtttaattattggatacagacacggttggaggatatggatgcacgtcgtatccgattgatgcccatcttcaatgtccaacgggtgcatgttcgccttgacctgaagaccctcgtgaacctgttcaggcacatgttccccaatgaccagaacatcgttgagctttccaagtgggaacatgtaaagaatcccgacagcttcatgttgccccagaggcctgcacagaagaagaaaaaatcatgtggtcctggtgaatgggaggcatacaagtcggtcctgaagcagtacgatgatgatgttaaggatatcaaggctactgacgagtacagacatgcaaagggtttgtatgacacgcttgtgaacgcccgaaaaacagtcgcaggttccttcttcagaaaaccacctgtcaagaatgggtgggttttcgactgcagcatctgtactgacggagtctctttgagcatgcagtacagcaagacagtacaggtccttgtctcagatctgaagaagacctgtaagaagcctcgtaaagaagaaggtatcaagatcgcagaaaaatacgacggctcacttaaaacgatattgcccgatatgggtatcgtcgtcctgggtgtggacccaggacggagcaacatcgctacggtaacgtatttggcagacgataaaaataagacatggacgctgacacgtggtgcattttaccacaagtcgggtatcaagaagcagacaaggcaaaaggaactgcgttttgctgacatgattcctatgtgggagtctctgcgtgaaaatggagcagctttgagtacatcgaggacggataagatctccgcgtacttgtcaaattacgctaagttttctgacgagtggtggagattggctttgcgacgccgagaatcccgtgacaacttgcagcgttacatcggaaaacgaaaggtcaaagactctttctgggcaggtatcaagcggtgcatgatgaaagaacttcctgatatgaagggttgcgtggcctacggatctgccatcacgaaactgaagcctactggaccgggagaagttgcagttcccactggggccatgttcgcatcgtgtaaaagaattttcaaagaggacgtttctgtgacagatgagttcaaaacgactcttatgtcgtgggagacgggtaaagaaaaagaacgtgtttacaagatcccaagtgtttgttcagcagacgtgaagcttaggttgggtggtgaacgttttggtcacacgaaatcgaaaacgatgccaaaggtcgctgattatcgcgaccacttaggggtaaggttgtacaataaacgtaaaggcgcacaagagaagcacaggaggggtggcttcgccacttcccttgtcgattctcaaaaatcgatcgagcggtacccagaggtacgaggactgcgattctctccagaaacatgcatttactcggaccgggatcgctcttctgctctcacaatcgcaaggctgcactgcatggaattgatgggtctaggacgacctcttccatttgcccacagcagctctgttgttgttgatgaataaaaactcgtattgttgtagacaccactcggtccccctccggtggtcgcgacaacattaggttacaccgcaaggtgtaccgtacactccagaaagcggtttcattttagtattccgtcgagtgtaaaggatgactcagttctacgggaagctatcactacagtcggagacgcaatttgtgggacaccctaccggtgacccttgaacccaatgggtagatcagctaaaggcgagtacatatatttgcccttcatctctgtatttcagcatttaagctggcccaaaggataacaaggcaagctgctgacaaacccaggtgggtcggtcggtttagcgctcacactcgcctcgatggaaactgtggttttgggggaaggcgagggaacacagaatgcctcaggtcgctctctcccgtccatccacgttgtcagaagcagaagaaggttcttggcagcgttcacgtctcggttccaggttgcaccacagcgcacattggatgatgcgcttttgacactgtctctacagtgcagtgctttgtggaccttgacgttcttcaccaccatcttctgcttctcaacagttattctgtcgaccgtttttgtaaggagtatttagccgttccgacatcggatttgttaagcatcgattaggcgggtttttacattggtgacacttgtcgcagagggtactgtcaacgcggcaaacgtttaaatatccaaatttctaggacattgcgaatgtccaaattgacactaattgctgccgtttctgctaaaggtatcgttcattacaagatccttgaatgggcgttcctgcctcccggccgattttgactggttgcgaaacatggtatggagcggatttgtgattccttggtgctgatgtctcaagctagcgagtcgttcaggaggctctaaatcctgattagaaatttaaaaaaatcggccgggaggcaggaacgcccattcttgatcacaattgcaagaaagtcgactttgtacagtttgtatctgagttacatgtacagcggggtacagtcgctgtccttgacaatatacagttccatcattcaaaggagacgatttctatgttcgattctgtaggaatacgaccactctttgtacctccttacagtcccgagtttaacgctattgagaatgtctttagtttgctcaagcgaaaatatcgctgcatgtgcccaataatcccagatgtagcagatatatttgattacagtaacgctttgaaaaggattattgatgcgcacgatgttagccatcagtttgacttttcagggtactttgaacatgtaaattcagtgtctttagatgccttgaattttttgtgtcaatcacctgaagacagtatctgtattgaattggtcaacttttcagaatccccaaatataaggtgtcccaatatcaaatgtccctagctgtatgggaagctatcagggccgatagttctaagggagtacataagtagtcaccaagtcataaaacgcttgagagcaccgcaattcatgttctgctcatattttagagcctccggaacgactcgcttgcctgagatatcagcacggaggatcacaattccgctcaagaccatgtttcgcaaccagtaaaaatcggccgggaggctggaacacatcccccatcaggatgggatggggctcacacacccttgatagcattgatagccttcttcttcaactgagctacctgctcagcatccaaccgaaacctcttctgcttgagctctccatcatctaacaagagaaccatcaaaaagtcctcgcgacgatatttaacctgctgtgaacgctgattcttcgggaactcaaacatgccatcgacacactcagaatcggatttgatgtacacgccctggacgtagaaatatccattactctctctgatggaggtcaccttgaacgcgtacacacgacgcggatcatctccgtcgggagaatcactcaaacgcacagcgtatgggtcagacggttcgctgcaaactgcaaacccgacttctccaggcttgggaatctcgtcatcatcatcatcatcatcacaggtgtgtttcggctcggtgatagtcatccgcttggatgcgtgccggttggatgcgtgccggttggatgcgtgccgcttggatgcgtgccgcttggatgcgtgtatgggatcaggaaggtcacacgctgtctcttcacaaggattggcattgaagtcccatagtcgttctcgagatgggccggcgtccccgagggcccgcacaggtaccgtgttgaatgccagtgcaccgtactttttcatcgcggatgggtggatgtaaaacatgagccgcagcatgtggctcagatccaggtcagccatttgtggattgtccgctgcctcattcagctgtttcggcttggttcctcgaatatgtccagaattagccaaccagccgacatcgtagaccttgtacacagcattcttgaatccaagcttccagttggagggaagcatgctcgtctcaatgaagacgtgtctgaggtccagcatcggagcaagaacggacatgctctcggcaacagtttgcttccgctgtcctccgtcgtaggcaatgcagtccttcggtttgatcaagtaatgggagttcctgcttccgaacggattttttattttactgaaatcttacgataaatattgtaagatcgtttttgcaaattaattgattttgcttttttggtgtattttacgaaaatatcttacaatttattttgtaagatcgttttcgcaaattaattgattttgcttttttggtgtattttacgaaaatatcttacaatttattttgtaagattgttttgttgtattcaggagaaagagactattcccttcaatttcagttgtaacattgatttgctcgtttggagagagagaaagttccttcgaagtattccaatacaaaatcaattgtagaggacagtcaagaggaaggtgaaagctgtttacaaagtcttgaacgcattgctcataattatttatctcacaactcacaactcaacagttcgaaagtacaacttagtacttatgactccgaaatctgtacttatgtgtacctcacttatgtataactcacaactcagaacttatatgtaccttatacaagtcagaactaataactcctaactcaggacttattattcataatttcatacctcatagcctcattatgtacataacacaaatttaaatctgcaaactgccatcctagaatcctgaaatcactcaaaatgtgtgctggatggtgcaaacaagtacactcgtgcaaacttgtgcacggtgctaatgttgcactgctgccaacaagtccattggtgctaacttctgcacttagtgctgacagatcatgtgctaactgacgccatggtgctacctgacacaatactgtctactctagattggctgtgggaacaggctatcacgttgtagaaagagggccaatgctaacttgttgggtaacaacagcgcctgaacaatcgctgcactagagtctcctcctccatgcccccatccccatcttcctcctcctccatctcctcctccttagcaatgtctacattgtctccatccgattgcacagcctctgccttggtgtccttctcaatggattggcagcttgacccctttgcatgactccttgctgtgcattgattgccatgcccagcaccttctctggcagcttgacccctttgcatgacctggcagcttgacccctttgccgggccccccccttgctgcgcatgcatgaaagactgttttgataaatcggaaaggctttgcttcatgccttgcgctttcacctcttttcatgccttgcgctttcacctcctttcatgccttgcgcaaattgcctttcgcatcctgcattgctttgctgagcatctgcattagcaccgggtggccctgcatggtcccgagttgcacctaattctcgcaccctttgcgcaatgcatttcactgctatgggaattcacttcagctctgttctcatgatctgctgctttgcctttcgctttctgcatcgccttgctgcgcatctgcattagcaccgggtggttgtgaataacccccgagttgcttctaattctcgcaccctttgcgcaatgcatttcactgtcactgtcctgcctagcaccttctctggtggatgctgggcagatagccaggagcactggcgctcggagcactggataggtctgcctacctgcatggcggttacccgcctgcacctgccagaccagaccaggacacgcgccgggccagcacctgcgccggagtactggcgaacagctctgcacccgcctgcaccttcctgaggcctgcctacctgcatgatggttacccgcctgcacctgcgtcagagtactggcggacagtcctgcatacccatatggcatgcatccttagctaccgttccaagatttctatagcgtctggtttggttatgaattgcagtgtagtggtagactgcaattgtagcccagacttagctgccttgtgcctgtgttgaccaagttactgcttgccaacaggttgccttgtttattggttaatctttgccgggagtgtggttgggtgtttatgttgtgattggtactttacatgacagtgacatatggatcatgtacacctgcagttcttctattttactgtgttcttgcccacctcggccacctacctatttactaggtttgttttagtggcccagtactgcaataggtaaagcaaagaggtgtagttgaggcctgcttgacttgcatagcatgactgatgaaatgtcatagcccagaagaatttagcccttttgcctgttccgtctaggcattcggtggatcaagttttctttgactggttttaggattgattttttaatgatagggaggactgtgtgtattccgattttttttttctcaatcattcgctcgttgggtttgacaatgctcccgatcatgatcgggaggactgtgggtattctgagtttggttttcctcaatcattcgctcgttgggtttgacaatgctcccgattatgatcgggaggactgtgtgtattccgaatttggttttctcaatcattcgctcgttgggtttgtcaatgctcccgattatgatcgggaggactgtgtgtattccgaatttggttttctcaatcattcgctcgttgggtttgacaatgctcctgattatgatcgggaggactatgggtattctgagtttggtttttctcaatcattcgttcgttgggtttgacaatgctcccgattatgatcgggaggactgcgggtattctgagtttggtttttctcaatcattcgctcgttgggtttgacaatgctcccgattatgatcgggaggactatgggtatgccgagtacaaaaaaaaaaaaaaaaaaaaatgccgagtacatgttttctgaatcattcgctcgttgcgtttgtcagtgctcccgattatgatcgggaggactgtgtgtattccgaattaggttttctcaatcattcgcttgttggttttaacaatgctcccgattatgatcgggaggactatgggtattctgagtttggtttttctcaattattcgttcgttgggtttgacaatgctcccgattacgatcgggaggactgtgggtattttgagtttggtttttctcaatcattcgctcgttgggtttgacaatgcttcgattatgatcgggaggactttgggtatgccgagtacaaaaaaaaaaaaaaaaaaggcaagtacatgttttctgaatcattcgctcgttgggtttgtcagtgctcccgattatgatcgggaggactgtgtgtattccgaattaggttttctcaatcattcgctcgttgggtttgacaatgctcccgattatgatccggaggactatgggtattctgagtttggtttttctcaatcattcgctcgttgggttttacaatgctcccgattatgatcgggaggactgttggtattctgagtttggtttttctcaaatattcgttcgttgggtttgacaatgctcccgattatgatcgggaggactttgggtatgccgagtacaaaaaaaaaaaaaaaaaaggcaagtacatgttttctgaatcattcgctcgttgggtttgtcagtgctcccgattatgatcgggaggactgtgtgtattccgaattaggttttctcaatcattcgctcgttgggtttaacaatgctcccgactatgatcgggaggactgtgtgtattccgaattaggttttctcaatcattcgctcgttgtgtttgacaatgctcccgattatgatcgggaggactgtgtgtattccgaattaggttttctcaatcattcgctagttgggtttgacaatgcttccgattatgatcgggaggactgtgggtattctgagtttggtttttctcaatcattcgctcgttgggttttacaatgctcccgattatgatcgggaggattgtgggtattctgagtttggtttttctcaatcattcgttcgttgggtttgacaatgctcccgattatgatcgggaggactttgggtatgccgagtacaaaaaaaaaaaaaaaaataatgccgagtacatgttttctgaatcattcgctcgttgggtttgtcagtgctcccgattatgatcgggaggactgtgtgtattccgagtttggttttctcaatcattcgctcgttgggtttgacaatgctcccgattatgatcgggaggactgtgggtattctgagtttggtttttctcaatcattcgctcgttgggtttgacaatgctccctattataatcaagaggactgtgggtattctgagtttggtttttctcaatcattcgttcgttgggtttgacaacgctcccgattatgatcgggaggactatgggtattccgaatttggttttctcaatcattcgcttgttgggtatgacaatgctcccgattatgatcgggaggactatgggtattctgagtttggtttttctctaaatatgaatctatttttgaatctgaatctgaatctgaatcattttctttaccaacctatttgtcttccgcagggtctacaatgactgtaccgtggaaataaaactccaatcggacgggaaggatttgcgatgcggcgtcatggacgaatggaccaaggagcgccaagtgccaatgaacatcgaagtcgttgttggtggaccagacttctatgttacggctacgcacgctcactggttgaggttttgcggcgaatgcaggcatatgtgcggagcagatgcattctggtcgacactcacccttgcggaagtcaagacagcccagttgcttgaagtcactagcattcggaggcccatgtcaggagctgggctataaggagataacaatttgaatacgatgaccttacagagttgtcggtgatctgtcctcttcgttgattgtaggaagctgacctcgtcgcgcctttcctgacttcttcgcggaggctgtaggaaatgtaaagagtgcagaagttacgcaatatcctatcgaaattgaaagcggcaagtgcggtcagcacacaatggttgtttcgaacggtgtacatcataccgcgtacgtaacattcgaaatgtacctgtcagatttaaaaatgtaacctgacccacggtgcagcagtacagtctgttcgattgctctctactggcgtcaggtgaaggcccttttggtgtacatcgaggtgacgtcctcctgtcgctaggaccaaactcctcgaaatcgctcctgagctttccttcgcatgtctcaacccacgccctagtttcctcaagctctttgtcggcgataaattcgccctcgccgaccctgacaggcttgctgcgcattgtcaaccaccaacccaagagcctgaatgtgaactggtatccatgatagggctcctaacatgggccgtcgaatgctagtgacttcaagcaactgggctgtcttgacttccgcaagggtgagtgtcgaccagaatgcatctgctccgtacatatgcctgcattcgccgcaaaacctcaaccagtgagcgtgcgtagccgtaacatagaagtctggtccaccaacaaggacttcgatgttcattggcacttggcgctccttggtccattcgtccatgacgccgcatcccaaatccttcccgtccgattggagttttacttccacggtactgtcgttgtagaccctgcggaagtcaaataggttggtaaagcaaatgattcagattcagattcagattcaaaatcagattcagatttagagaaaaaccaaactcagaatacccatagtcctcccgatcataatcgggagcattgtcaaacccaacaagcgaatgattgagaaaacctaattcggaatacacacagtcctcccgatcataatcgggagcactgacaaacccaacgagcgaatgattcaacaaacatgtactcggcattttttttttttttttttttttttttactcggcatacccatagtcctcctgatcataatcgggagcattgtcaaacccaacgaacgaatgattgagaaaaaccaaactcagaatacccacagtcctcccgatcataatcgggagcattgacaaacccaacgagcgaatgattgagaaaacctaattcggaatacacacagtcctcccgatcataatcgggagcactgacaaacccaacgagcgaatgattcagaaaacatgtactcagcattttttttttatttttttttttttactcggaatacccatagtcctcccgatcataatcgggagcattgtcaaacccaacgaacgaatgattgagaaaaaccaaactcagaatacccacagtcctcccgatcataatcgggagcattgacaaacccaacgagcgaatgattgagaaaaccaaattcggaatacacacagtcctcccgatcataatcgggagcattgtcaaacccaacgagcgagtgattgagaaaacctaattcggaatacacacagtcctcccgatcataatcgggagcactgacaaacctaacgagcgaatgattcagaaaacatgtactcggcatttttttttttttttttttttgtactcggcatacccatagtcctccctatcataatcgggagcattgtcaaacccaacgaacgaatgattgagaaaaaccaaactcagaatacccacagtcctcttgattataatagggagcattgtcaaacccaacgagcgaatgattgagaaaaaccaaactcagaatacccacagtcctcccgatcataatcgggagcattgtcaaacccaacgagcgaatgattgagaaaaccaaactcggaatacacacagtcctcccgatcataatcgggagcattgacaaacccaacgaccctattcgcttgaagtcacctactacactgctagctgccaggcagatgcctggtcaccagctgctagagtgggtgtcggacctaagcccggcaccgttattgatatagctataggctgtatcataacattcccccgaatccctggtattctggtacccagaattcctgggattccacaacacaagtcataaggagtaagccagacaaatatgcccgtggagaagaaaagtagggggaaagcaatcctaaaaccagtcaaggcgtaggtatgacatccgtgaaaaactgtctgaacagtatccgaagctcttcttgcacgcatccgctgatgcaatggacaacaagaagactaatcttcctcagtcacgccacttctcacatacaaagaagaccgcaggaggtgaacttctaaagacacgcatcatgggtgagtacaaatacagcgcatgtaggacatgtcctcccgatcataatcgggagcatacacagtattttaaacttgaaatgattacttaacaaaataatgctaatattctgacttcatgtttccttctatgttaactcaggattattc

SEQ ID NO: 196 - DNA, 22379 bp, unidentified
  misc_feature 1..22379: note = Fanzor polypeptide
  source 1..22379: mol_type = other DNA
gggagcatgctcttaatgtccatggcgttcatcaccccctcaatgagagcgaatgcgtctactgcttcatcgtgtggcttgacgccgaggacctctgctacaagtagcattatccgctttaacgttggactgtcagtgcgctcagccatacagctagggacatttgttgttggagtaaaaatgaacgcatagtgcttcttatgtttttttattatcgggaaagatgaatcgcgggacccagggaattcagctgcggactcgcggaaacacgtgtcctaggatctgacttgtcaatccatcggaggaggacacacgcaaacggcggaacacggtcgaatgtataggaggacacacgcaagatgcggaacacggtcgaatgtatcggaggacacacgcaagatgcggaacacggtcgaatgtatcggaggacacaagcaaacggcgggaaactgtcgcatccacaacgtcagtcagtccgtccattcatgacacacggatgcggtggcggatcatcgccatcgaatgaagtgtaaacaaccatttttcagcacagcaaggcacaccataatacacgcacgttatcatgatcgatgcagaggtaagacatcgcgcggttgttcacatatttatgcgcacgatgtaagcaaacacgttgacttgtcaggctactttgatcatgtaacttctgtgtctttacaggccttgaatgttttgtgtcaatctcctgaagacagtatctgtattgacaagatcggttacaaaacttgaattggtcaaatccccaaaataaaatgtgtcccacaatcaaatgtccctagctgtatggaggattttgaaaggagagtacgtgtgtggcacgaaaacattcggatcttcgaggatcatgtccctcctcatgcttctttgaaagtttcgtacgatccttccttcgagtttgatcgcacgaaatatggtacgatgcggaccgatatccgtgtaatagacatggacacagtagatgcgaccctagaccttattgagcaaggtatgcacccgctcgtcttgaacatggcggacatacataatcctggggggtgcgtgtcttgtggaggtgggatgcaggaagagtcgttgttccggaggacgaactaccatcgtcatctctcgaggtcgttttacccgatcggagaaagggaagccgttgtatctttcgacgtcgacatcatcagggagtgcgagagagacggattcgagttcctgaagttttctaaatcggcatccttcttggcatgtccgtgcatttccatgccacagctggtggacaacaggttctcagagaaagacagtcaattgtttcgcgaaaaggtgagactcgtattgagtgtagctcacaagtacggacatgacagcatcgtattaggagcttggggatgcggggcgttcgggtgtccacctaaacacgttgccgagatcatgtttgccgagatcgaaaatgtagaagggtgcttcaagaagatcgttttcgcgattctaggtaaaaacatcgatttctttcatctcgcagaaaatgaaaaaaatagtaggaaactttcggagggtacatcaccaaagtagcacagatgtcgtgatagcatacagctagggacatttgatattgggacaccttatatttggggattctgaaaagttgaccaattcaagatttgtaaccgatcttgtcaatacagatactgtcttcaggtgattgacacaaaaaaatcaaggcatctaaagacactgaatttacatgtttaaagtaccctgaaaagtcaaactgatggctaacatcgtgcgcatcaataatccttttcaaagcgttactgtaatcaaatatatctgctacatctggaacacaaaaaatctacttaggcttaaatgcgcgagcagtatgattcagtttggaagttttaggattggatgtgcgcgtggtggacgttttaggattggatgtgcgcgtggtggacgttttaggattggatgtgcgagtggtggacgttttaggattggatgtgcgagtggtggacgttttaggattggatgtgcgagtggtagaaattgcaggattgaatttgcgcgcgtatgggtccatcttcgaaacgtattctttgaattccattcgatttgtttggaattgtctatgaacttaatatttgatattgcgagtttaatatttgatattgcttttttcgagtcctcgtctgtagcgtaaagaaccatttgattggtactcgaatggtaccagatgtacaatagatggaatttttctgtcattttgatatttttttctcccaagcgtcccaccaactctgacacattaacgtccggcacgatgggaacggtggcatagtttatgactggatataatcgcagcatgttacaaatgtcgataacctcggacggacgcaagaatcggcacaacaactcatcatggatcgctttcatacccttgtacgtcaacagtttatccacattttccccccatttttgctttatccattcaatgatattaatcttttgctgtttagacagtttaacattatcatatttgacagtgttcacttcgtattttttgcgttcgctattgtttttcttagcgcactcattaaacaaatttattctctccttggagccggatccgatttgtgtgcggttcatttttaataagtgtaacattttttttactcacatacagctagggacatttgatattgggacaccttatatttggggattctgaaaagttgaccaattcaagatttgtaaccgatcttgtcaatactgtcttcaggtgattgacacaaaaaatttaaggcatctaatctagtgaacaaccgcgcggtgtcttatctctgcatcaatcatgataacgtatgaaatggtataaagaaatgtggaaaatattatatcaccaaaagaaaaaaaatactcaccccctcttaattttgcatttcctcctggcactacagcagactaggtggctgccgatctgaagaaaatgcttgataaccctggtgctatcttccctccagcatttctcaatggtgatgatcatggtggtcatgacagcaaggctctggccctgggtctgggccttggacttggcctgggaatccctatccttctcttgattgggttcttactgtaccgcaggtcaggacaggtcattaaccctgcctaaggagggtacggctaattctgcctaagtatccatgccctggccaatcatggcagctcaactagatacagtctagctaggtacactgcaggcgcacgccacggcggcgtcatcgaatgaagtataaatatatgatgctgctcatggaaaggaggaagatgtcggtcggtcgtgttcgaaggaagagagaggagaacaatatatagggatatatagaacaggagcagctcgacagagatcatggcgcacaagttggtcgtgtacgcgtttgttgagcacaagttcattcagaaaaatgagatcgtcgtcaaggtgggctggacgtcgaagccctttggtaagcgactttctcattacccgaagaactcaaagatgatcttcgaaatccacgtacttaatccgcttgcttgtgtggaggctgagactgtcctgctccggtaccttcgaggagaccctcgagtcaagccccgtcgcgacgttgggtacgagtactaccaacttgacgcaggtgattcaggtgccgtctttcaggagatggccgatgtcgtattccagtacgtggggacaggtggcgtcgacatgtctatcaagtctgtcttataatcatacgacagccttgattgcggcaccgaggacgtgccgccagacccccccagctttgcctttgttgagcgagagaaggaacgcgagaatgagcgagagaaggaacatccattatgtgccctgagctgctgcttccccattcgacactacgaccatcatcccaaatctgatgacggtgttcgacgaaaagctcaagggaacacagatgttctgcggctacaacaacactgctaggctgttcagccatgcatcgtgcggcgttcgcgacgggtgggacctgcgcaaggtgtccaaggctgtgaagatgatcctgaacgccgtgggtctggatatggtgatcgtgaccaagcgggaccaagcgggtgcaggtcaagggaaagagaactcaggaggagaggaactacctcctgtgccctgagagtgtctgccgtatactcgagctcgtgaaacttcgtcttctgagcactgacctcacgccgcagctgccctttcgggacaagagctgtccatgtacagctctccggatgctggagctcttgaaaacttcgtcttctgcgcacggacctcacaccgccgccgcgctgccctttcgggtcacgatatgtccatgtacagacagccatagtccatcggcaaacaacggattgtattattcaacaagcggcggagcccctttcacctcttcccccagcggagcgaccgggggcgaccggaggggagccccctcaaaggagtccgcgaggaaccgagcgggtgggcgaccggaggggagcccacagttcacatcaaccagcagacacactacacactacacactactacacactactgtgtaactacagtcggcggaacagtaaaatgaaacatcaaaaaaacggtataaggcggtgacaatcataaaatgacccgtccagcaaagaaacctccttacatgacgcattgcacatcaacaaagaccccgtgttcttttgggccacggtattggggaagaggcgatcgcttaagtgcggctggtccttcaatggacactctcgaaagtaccgacaaaagaacgatacggagtctgcaggatggagagccgtgatctaaaaaagaaccacgatattctcgttaacatcctgcaatttgttgattcaaaatcttattggtgttccattgccccgtgggttgctacaccatttggttacaccgtaaggtgtgccgtacacgaggcggtttcattttagtattccgtcgactgtaactgtcaagtcttacacaatgtgtatgttgtttgtaaaagattcactgtaacacttgggcgtttccgatgtgtcgtctcaagcagacttctgctttacaactatgtcaggagtatggaagaggaatcgcgggacacacggcggcacctgtcgagtcgagtcacatcacatggcgacctctcgcatcaggaggcggcacctgtcgagtcgagtcacatcacatcacatggcgacctctcgcatcaggcggcggaacctgtgtcgagtcacataacagagcgacctctcgcatcacggcggaacctgtagagtcgagtcacatcacacggccaagttccaagtcaagcacgagctgtccaccatttatcagtctgtaatccacgatctcaatctgagtcccactacaactgtcgggtcatatccatatgtcgagaccccttccttttccaacagagtgataaaaaatttgtcaaagtgatatggcagcggaacacaatgcttatgcatgtactgcaaaaaagcaatctttaaaattttgtaatccatgtaggcgcctgacttcttctcacattgctcgaaaaaggcagcaattatgtcgtttagtttatccataagttacacacactcaaagctttatacagttgttcaattcggcctgaattattttttctcattgcatgatcgaagcaaacggaagtgtgcgactttcgcaagcagacttctgcttgagaactatgtcgggtttgtgaaggggaaacgcgggccccatggagtggggcagtggaattcagctgatgcaggtgccgtctttcgggagatggccgttgtcgtcttccagtacgtgtggacaggtggcgtcgacagccttgattgcggcaccgaggacatgccacccgacccccccatcgtctcgtggaagtggtgtaaacaacgcagaagactatttaactaaccttattatcctcttcacagccatattattctctgctacatcacaatcctcaatacgttgttggttcctaggcccttgaatacttaaacaatagaagagaactgtgggaactgagtttattataacttttccaatttattagctttgtattattaaaagtcatggtcatacacattgatgaggacgtcctcgcgtgcaacgggagtcataacgagatcgcgcgcatcgcgaaaaaaataattggaaaccgcatcgctgccgccgcgagcacgaacggaaagctattatggtacgtattcgacgggcgatggaagacggacgtcgacgcgatccacgtcaagcacgagctgtccaccgttgttctagagcacttcagtatcgctatgaacagggagagagcgtcccaaagcgattacgacatgcagagcaacgaggagagcacaaaggacgactccgccgacctagcgcacatcaccgcgcgcctccaggaagcgaccttcaagaataacgtactgaaagagatgctcgagtacttttacgaaccggaattcattaagaaactcaacgccgaccggctagcgcacatcaccgcgcgcctccaggacgcggccttcaagaataacgtactgcaagagatgctcgagtacttttacgacccggacttcatgaagaaactcgacgcagacccaaacctattagggttcaacaacggcgtgtgggacctcaaaaacggcgtcttccgtcaagggcatccggaggacatggtctccatgtccgtgggattcgattacaatggcgaagtgtgcgaggaatcagcagaccgcgtgcgaaaatactgggacacaatgcacccagacgacaaccaacgagaatacctcatccacacattttctagacagctgtacggagacagtggacaagagctctttcacatacacaccggcggctccgacgcgtccacctcgaacgggaagaccaagttcttcgaagtcatggagatcgtattgggagactacatccggaaattcggcgtggaaatgctgacaagaaagaaacgcatagatccagctcgcccgataccacagttttcgaagcggaagggggtccgcattatgtattgcacagagccaaaacacgacgaagtcttaaattccggagtcctcaaggatatgacgaccggtggggaagccatcaccacctgtgcattgcactccagcgacatcgtaagcttcatccgcacgcaacacaagaccggtggggaaggcatcacccaccgcctcgtgcactccagcgacatcgtacacttccgcccgcaacacaagatacacattatgtgcgacgcaccgacgatggtcgacggttctgacacgggagtccaacgacggatacgaaaaatcgactacgtcagtcggtttgtggacgaggatgatgcggacgccgccaaattcctcttcccacgagacttagggcttgtagagtcattcaaggcagacgacggcgcgatgcgcatggagttcctacgcacccttctacacgcgtttgtatacgagtacaagttcgatatgcccgattcgttaaagaagaccagtgcgacgtacttgaacgcgaacgacgccgtggctatgttcgtcgaagagcacgtctccgcggccatcccggacacgggaatggacctggaacgtcacctaagagaagagacggacacggacctggtccttcacctacagcaagagacggacctgggacgtcacctaattaaacgaaaaactttgagagggatggtttaaatcacacggcaacctctcgcatcacggaggcacctgtcgattcgtgtcacatcacagagcgacctctcgcatcacggcggaacctatcgagtcgactcacagagtcacagagaccattacagtcggcggattgatgtcgacttacgggggacgatcgctcgcatcgcaaagaagttgatactttctaaagatactcacagataacggaaaacacggtaaagtaatcgcaacatgtgatcacatgtcaagcatgggtctgctagaagaccgagtaccgatgtccggctccatttcgttttgtcgccggagcaaggtgctttacatatcaccgctggcaggactcacttcgttgattcacctgaacatgaagggcaccgacgtggaagacatatcaccactggcaggactcacttcattggtgcacctggacatttcgaacaccgacgtggacgatatatcaccgctggcaggactcacaaaaaatggatggaatgatgtgtaaaattgttcaacgggtcatcctatgatatagatagccggtatctacatatggactgtgacaattcgttgtatgatcgtgacagctgtggatcgcggtggacgcgtcttcagtcaagatatccgcaagccaggaaattgaataacttagtgaactttggaaaaacactggaggtaccgagtctaccgttgacagattagcaactaaaaaactattgttttaataaaaacgagtgtaaacaactttgatccatacaggtctcggcattgttttgctgagtatgtaacgtcccccccgttcccccagatggatgtaacgttccccccgttcccccagatggatgtaacgttccgttttcagaggtgttcatgtgaacacgtttgtttaaaatagggattgatgtgagcctccggcattcttcagtatttattttttgttgaaataattgttgttcccgagatggagagtcttttcagaggtgttccatgtgaacatgatacagtccagccaaagcaggaccaaatgcaatgggatgatctccccacaccctgcccgcttttttggttgatctctgaactgctctgctctgatgccacatgccatcaggatttaggctggatttcttcttgggttgtcgcagtcgggtcttaaggctcaacttgggcacttgccacactacgtttccttcaggtggaaaatagtatatggtgaggaaaaatggctttattacagctaagcgaaatcaagaactacagtcggcggaacagtaaaatgaaacatatatcagatggaaataaatgtacgacatcgccgttagaaaattggcgttaagaatggtcgctgacttgggtgtgttaaaaacttctgtgtttacgaacatcagtcgttctactctgtggagttggaaacgctttggtgtaaatcgaaaacgacgtgaatttgtaagcaacctttttgagacgaataaggatttgttaaaatcgtttttattgtcaactcaatgcacaaccgcaagaggcgttgttgctttttcaaaagtactcacaatgtacgattatcaactaaaacagtgtatcgtttcataaaactcattggttttacaagaaaaaggagcaaactccttggacagtgtaaaggggacttagttccacttgtcaatgaattttgtagtaggtacaaggagacaatcaatgctgggaaaattttagtatcagttgacgaatgtgggtttagtgagcgtctcaagccacattatgggtattcccctgtaggaaaacctgttatctttaaaactactggtgggtgggtacaccacagtttgttgatggcagttttttcagatggtaggaaagagttcgttgtgaagaaaggatctgtgaagaagacggatttcgttgcatttattgaatcattgagtttgtgcaataattcagtagtaataatggacaatgccagtatccataagaaattggtcctcagtcaccccgtcaatatttgttacacacctccttacagtccagaattcaatgctattgagctatgcttcgctaaggtgaagagagactttcgtcgtttgaactacataccgaatgaaacaaagacgcacgtatctgatatgatttccttagcattcggcaacctcactgataaaattattatgggttgttttgaacacgtttggaacacttatgtgtataaagcggtctgtgacgtattgattatgaaagatggcgacgaaacctccgacagtcgcgaaattgaaggagctactgaaattggctgaagtaccatactcgtcgaagtccaacaaggacgatcttgtccgtttatgcgaagacaatggtctcatcgccagaccccctccagaatacaagacggtggaaaagatgtgtgtcgtgaaatgcgccctgaagaaggcaatgagtcttgacgatgaagaattcggtaagtttagggagcatgtggaccagctcgtcaatgtggtgagccgcatgttacggcggtccagtctggtgctgactttccacatcacgagtctattagagaaaggtctggatattccagacctgtacaacatgaaagatacctactggaaggattggctccgtatcggggtagacggaatcttccctgatgaggaaagcaagatatcgtacgaagctgtgaaggactccatcggcgatgtaattggtaatgacgacgctgactacatcaagtcttatccgatctatttcgatcaggtattgaactatgcaggtcacacattgagcactgtcgtgtcaaacaacgcatgggttcctttgataccacgtctggccagactcacttccaccactttaaataaattaaatgccccgaagacgctggacacatcgaagatcattcggggatacgacgtgatgcaggctattcagcaagaagtccaaaacatggagggatggccagagtctgttcaagagtacgtcaatgaagttagggagatgctgagtgttccagatggaagtcgagtttatgataactatggcaaagacatggactttccgaccatggtccggtataattattggatacagacacggttggaggatatggatgcacgtcgtatccgattgatgcccatcttcaatgtccaacgggtgcatgttcgccttgacctgaagaccctcgtgaacctgttcaggcacatgttccccaatgaccagaacatcgttgagctttccaagtgggaacatgtaaagaatcccgacagcttcatgtttccccagaggcctgcacagaagaagaaaaaatcatgtggtcctggtgaatgggaggcatacaagtcggtcctgaagcagtacgatgatgatgttaaggatatcaaggctactgacgagtacagacatgcaaagggtttgtatgacacgcttgtgaacgcccgaaaaacagtcgcaggttccttcttcagaaaaccacctgtcaagaatgggtgggttttcgactgcagcatctgtactgacggagtctctttgagcatgcagtacagcaagacagtacaggtccttgtctcagatctgaagaagacctgtaagaagcctcgtaaagaagaaggtatcaagatcgcagaaaaatacgacggctcacttaaaacgatattgcccgatatgggtatcgtcgtcctgggtgtggacccaggacggagcaacatcgctacggtaacgtatttggcagacgataaaaataagacatggacgctgacacgtggtgcattttaccacaagtcgggtatcaagaagcagacaaggcagaaggaactgcgttttgctgacatgattcctatgtgggagtctctgcgtgaaaatggagcagctttgagtacatcgaggacggataagatctccgcgtacttgtcaaattacgctaagttttctgacgagtggtggagattggctttgcgacgccgagaatcccgtgacaacttgcagcgttacatcggaaaacgaaaggtcaaagactctttctgggcgggtatcaagcggtgcatgatgaaagaacttcctgatatgaaggtttgcgtggcctacggatctgccatcacaaaactgaagcctactggaccgggagaagttgcagttcccactggggccatgttcgcatcgtgtaaaagaattttcaaagaggacgtttctgtgacagatgagttcaaaacgactcttatgtcgtgggagacgggtaaagaaaaagaacgtgtttacaagatcccaagtgtttgttcagcagacgtgaagcttaggttgggtggtgaacgttttggtcacacgaaatcgaaaacgatgccaaaggtcgctgattgcgaccacttaggggtaaggttgtacaataaacgtaaaggcgcacaagagaagcacaggaggggtggcttcgccacttcccttgtcgattctcaaaaatcgatcgagcggtacccagaggtacgaggactgcgattctctccagaaacatgcatttactcggaccgggatcgctcttctgctctcacaatcgcaaggctgcactgcatggaattgatgggtctaggacgacctcttccattttcccacagcagctctgttgttgttgatgaataaaaactcgtattgttgtagacaccactcggtccccctccggtggtcgcgacaacattaggttacaccgcaaggtgtaccgtacactccagaaagaggtttcattttagtattccgtcgagtgtaattggtggagtaatgacatgaaaacggttgcgcatacctgtcaggaaccatgtacacaataagatgcggtggtcctgtcaaagaattgagtgcgagtcacatggcgaccgacctctcgcatcacggcggatcctgtcgagtcgagtcgagtcgagtcacagagcgaccgacctctcgcatcacggcggcacctgtcgtgtcgagtcacagagcgaccgacctctcgcatcacggcggaacctgtcgagtcgactcacagagtcacagagcgaccattacagtcggcggattgatgtcgactcacagagtcacagagcgaccattacagtcggcggattgatgtcgacttacgggggacgatcgctcgcatagcaaagaagtcgatactctctaagacaacatgtgatcacatgtcaagcatgggtctgctagacaagcgctcttgtatatcgatagggggatctctgcccccgcggagtggggcaggagaatttagttgcagaaacctgtcaagtcatcatacacatacacacgcaaacggcgggaaactgtcgcatccacaccgtccgtccattcatgacacacggatgcggtggcggattctcgtccctcatcgtctcgtagtcctcgaattaagtgtaaacaaccattcttcagtataaacaaccatcagcacagcacacttcacaaacgaatgagttcctttgacgaaatcaatgaagatgtattggagatcattctagccaatgcgatttcgaacgaatgccacctcaaacaagtggctctcgttagcaaacagtggagatgcgtcgcaccccggtgtgtcacaaggatccacctgagacattataaaagtttggaatacgcattatcacgcatttgcaggctcgaagagttgaaaatcggtatcaatcgggggaaagacgtaccctaccaatcaatgtcggagatcgaagacaagatagaagacatatctccgctgtccggcctcacttcgttggttcacctggacatatcgaacacctacgtgaccgacatatcgccactgtacggactcacttcgttgacgcacctgaacatggcgcacacctacgtgtacgaagacctattatcaccgctttccggactcacttcgttgacgcacctagacatttcgcacacacttgtgaccgacatatcatcgctgtccggtctcacttcgttgattcacctagatatttcgcacctcacgtacgtggacaaacacccattatcagcgatttcaggactcaattctttggttcacctcaacatttcgcatttcggaaacaaactagaagacatatcaaagctgtccggactcaccgagttggttcatctgaacatggcgtacacacgggtgggcgaacacctattatcaccgctggcaggactcacttcgttgattcacctgaacatggagggcaccgaagtggaatacctatcatctctgtccgcactcaattcgttgattcacctcgacatttcgcatctcagatacaagctcgaagacatctcaccggtgtccggtatcactgcgttgcttcacctgaacatggagggcacacgtgtaccctctatatcactactgtccggcctcacttcattggttcatctgaacatggcgtacacatgtgtggtcgaagaccgagtaccgatgtccggctccattttgtcttgtcgccggagcaaggtgctcgacatatcaccgctggcaggactcgcttcgttgattcaccttaacatgaagggcacacgtgtgaaagacatatcaccactggcaggactcgcttcgttgattcacctgaacatgaagggcaccgacgtggaagacatatcaccactggcaggactcacttcgttgattcacctgaacatgaagggcaccgacgtggaagacatatcaccactggcaggactcacttcattggtgcacctggacatttcgaacaccgacgtggaagacatatcaccactggcaggactcacttcattggtgcacctggacatttcgaacaccgacgtggacgacatatcaccgctggcaggactcacttcgttggttcacctcgacatttcgaacaccgacgtggacgacctatcaccgctggaaggactcacttcgttgacgtacttgaaaaattgatggaatgatgtgtaaaattgttcaacgggtcatccttagtaaatgtagccggtatctacatatggactgtgacaattcgtcgtatgatcgtgacagctgtggatcgcggtggacgcgtcttcagtcaagatatccgcagccaggaaattgaataacttagttaacttaattaactgaaggtggaactttggaaaaacactggaggtaccgagtctaccgttgacagattagcaactaactttgtagttcagagaactcgcggacgaggcgccttcggcacaacacatacgtgggatcggagatgctttttcgaaattgggtttggatgagttggatagcgtttttacgcctaatatggtgggcacgccacgcttgttggatctttttagcatatttcgcaagtgtgacattctcaacgatataatttatttgtaattgttggtggtatgtctcgctcgttgcgtatacacttctacaccggtcagatagccttgctggaacaatccagaagctccacatgtaatcatggcttccttctctttgctgaagatgacgatgaggttggatctcatgcgtgttgcatatgaatccgtccagtatcattaaacacggttttgtggatatccaactggggtcgattgtgactgttctcacaatattgtgtttactccagaacttcacgcaggcgtcatctaggtctgaaaagacaatattctcccagccctgcatttatgaacatttgtttcatggtcgagttgtttgcttatacagtcgagctccatctacagttgttctcaaataaagtgggacaccttataatcatccagactgcagatcgttgcttttgggtaacgttggggggtgcagcaggttgaagaggttctcgaagatattccgagtagcctctttggtaaaccgttcaaccgtcgaatgtcgacaatggatccactttcatcgaagactcgttcaaatacagtcgacggaatgtacatgtgactgtcatgtattcaaagcggtattttttaatgataactgactcctgctgcaacacgtcatgcctcaaagttggcagcggacgaccgcatcctcacacacgcacggcggcgggtcttacgcaaccgcatgtactcaaacgaaagccgtgtgtatcaagcaggcttggaaatggaaaaacgttggggggtgcatgagctcacctacgtgcgaggagatttagcttcgtaatagcatggatcgatacagaatatacaactgcacgaaaaacataacagcaagcagctccagaatgcccttttcctgagcggaagatacccgaatagccttacgtaatcgtccataatcaatattggatccatgtattcccacgcgtttgccgtgtacgtcttttctatctctacaatcttcttcaatcgagcagcattctggtcgtacttaattttggcaccagataataggtggattgtcgtgccgtcaaacgtgaacatagtcttattcatcacgttcgatgtacgcctgaagtagaatgtctctttgtacaggtcgagtatttctaaacatttcttggcgtcttcctcattatcgaataccaccgttccatgtaaaataaaatttttgccattccacgtactgcctgaaactgtgaaacacgcatacatgcttgtatccaacttcttgaagttatccattgtttctgttatacacagaagagatagggtgcgtaaagaaatatactagacatagtcttgcttttttatacttgtgaaaaataaacatggtatcattctcatcagacagggttcgatttctaacccaggacgtaaggtaatgtgcatgatgtggatgttcgcctcgatgtcacaccagtcgcacgacttgggatcatgatcaatcaagaaagatggatgacaacacatgcatgtgcctgtaatgtgctgcaacacgtcattcctcaaagttggcatctggtacccggtgcattatgtgcaagagatgcactctggttatgctgtccgataggatagatagataggataacgcactttatcacgacacatgccgcatcctcacacacgcgtcgcggaggctgctgtcgagatgatgatgcccaccaaccactcactcactcactcactcactctcactcattctcacgcacgcactctatcacacgcaaacggcggaacacggtcaaatgtatcggaggacacaaggatgcggaacacatacatacatcgtcaatcactcaatcactcagattaaagggaccggcgctttgcgtacccaggcatgcccaatcattgtgtatttctggaggtacgatcgccgggaatcatcttccctagcgcgtcattcgcacaccacccatcgatgcgcacgtacacgacctgggtgtaaccttattagctcgcgatgtgcaccaaagccaatataaaacatcatcgttagaaaagttcgagcgtcataccaagcgttacagtcagagacagaatttatgggacacccttaccggtgacccttgaacccaattgattgggtaggtcagctaaaggttatgtatcaaggtcccaatccttcgtgtccttcatcccgtatttcagcatttaagctggcccagaggataacaattgtaagctgctaactgacccaggtgggtcggttggttgagcgcccacatttgcctctccggaaactgtggtttttggggtgggcgatgatgagggcacacaaaatgtcgccggtcgctctttcccgtccatccacgtcgtcagaagcagaagaaggttcttggcagcgttcacgtctcggttccaggttgcaccacagcgcactttggatgatgcgcttttgacactgttgcgacagtgcagtactttgtggaccttgacgttcttcaccaccgtcttctgcttctcaatcgttgttgttgttgttgttgtaggagccccgttgatgagggaggggggctcgttttgaactctgcgccagacgacgctgtctgccttcatgttgacgagcttctggaagcagccgtggcaggtacaagaagtgttgcgttcgtcgacgtttttgaacaaaacattcttacgacgtgagaggcacctcctgatctctttgatgggcccagaacatgaacgactgataccatacccttggttggaccagttgccgaagccaacaacggtcgtctgtgcccttggtgcaatcacatcgcataccttttctttgatcgtcttcttctgtgcttttggagcaatcaaatcacagaccttttcaatcgtcttctgtttacccatataccgaaagaatcgcatcgatcggtaacctctgctggctcggtgttgaaggagtgtcgggagagcgctgaggtaacctctgacatggtcctgcatgtcgtgcatactgctcgtagtcggcgatggaatggacttcacgaggtcttgcgtatcgacattccatttgttggtgcgacgattactggtattgtacccagctgcttcgctaaagcgggcagagctgaaagactcgacgcgaccggcagaagatgctacagtgacgatatctgtcatacccgggtcgacaccgacttgcagagaagcgtcctggcagtcttcgagaattgcgtctttgggataccccgcgttatctacagcgacatcttcactcgcctgatgcttcatttggacggagacctccttgccgtcgctgaggattcggttgtcaaaacgagaccctttcgtctcaagtccttggacattgaagtactttctccacaacatggaatgattctcgtgacgtccatcgccacggaagctctcgagcggcgaatcgcccatgctgagaagcttcatgagtgtcatggacgatatagggacgtaagaaatggtgaatccgctcttgcgtggaaggatactgaacagacgggggcgtttttttgttgttttctcttttagatccgctcccaactctgtaagcacgtgatgaaacagtctcattgtcaggtgcgctcgagtgttgaactgcttcccccttggcagcggcaagagatctctcaggcgtctgacaacgtctttgatgaggttcgcatgcacgagactcgctgggatgattttgtcgatatccgactcaggatactggaccactgccttgacaatcttattgaaatgtttcttcaacgagggatgtttcaagcgcaggtacttgattacaaccctgtccacgtttgcccagacgctgttgcatgccatcgtcgccatttgtattgagacgtctgcgattacctgtccccattgacgaacgtccacctttaagtagcctgcaggcctgagagcgtcgaaagcaaccatgctatccttcaagctttgtcccagcgtatcctttcgaacgttggatgtcgagacagcaaggatgcacctgtaataaaagtttcgatccaggtgcggcaactgcttcacgtcaaagtctacatcatcgaggcatctggtgatatgaaaatttgcgaataagtatgcctctgcaactgcgtggttgattacgagtaccatgctttggatccttgagcagatttgctgccttgatacatccatgcacagagaatttagcgtcttcttgaccaccatgatgtccagatcgtcgtcgtcatctccattgtttgtcactacccccatcgagatggagggagggagtgttcttttcttgtcttgatatcatcatgtacaacaatttccttataccataatacacgcacgttatcatgatcgatgcagaggtaagacatcgcgcggttgttcacatattgatgcgcacgatgtaagccaacacgttgacttgtcaggctactttgatcatgtaacttctgtgtctttacaggccttgaatgttttgtgtaaatctcctgaagacagtatctgtattgacaagatcggttacaaaacttgaattggtcaaatccccaaaataaaaggtgtcccacaatcaaatgtccctagctgtatgtatatagcgttgcctatcacaatatcgttcgcttcgtctctaattcttgtctatgctcgacgcgcatgtcaaagcatgttggaagccttgtccatgttagcatggttggtttcgacaagtgtgatcatcacatggattgccatgacaaaaaaacagaagttacctcaaatttgcgcaggcatcatgtggattataacaatcacgatgttgattagcttctgctcatcattttaaaagaatcatgaagtaatgggcgttcctgcctcccggccgattttgactggttgcgaaacatggtatggagcggaatcatttcacacacaagcattggagcgtttgtatgaagttcttcttactctgctcattatatcaagggagatggatctggcaacaatcagtagttttaagcgcataggaatgggcagcttcgcaaccgtgtttgtcacggaggggtggtgttgaagcaaattcaggacccttgcaaagatgcagtggcaatgttgatgaaggaacatgatgacctcttgactttgaacagtgtttgtggtggctcgtctcagttctttcaacttccgcgtgcccatggcagctacacagactactacagttttgcgcaggaggtaggtatccagcggacagaagacatggggttgtcaccgcatgccttgtatgtcatgcaacgtatatggcctgtttcacattggctggctaccagtatacgggacttgttccttcctcagcctttcagagacaagcccccccctcagcttctggcaagactctacctgggcaatgggacatcgcgtgaaggcagccggttcgtgaacactgagaatttccccttgtctgccgaccgaattgagcgccttggacttcctgcagataagatagctgctggaatgggacatatgctggcttcgatcaacttcaaagctggccgagatgggcgcgacatcgagttcgtgttgtgtggtcatcctgaaaatcccctgagtaaggtgccgttctacgaatgcatcgatttcaaccaaatgcgaccgcatggggggtctgcgatagtgattgtcagcagcatggtcagcaatgacccatactatcctcggtcgtggtcgcctcagtggcaggcctttgctgacgcctatctcgccacagctgctgaggccaacgagtcccccctggcacatgatgtgttgcagaaggtgcattctcactgggaggaaaaaaattgtcatcgcgtacagctatgctaagtttgccccaggtggcaaggagggcgagctttgtgataaaatacatcggagcgtgtcaaggtttaacgaaagcttcaagcggaagaggtaagcacttatctttggttaaaaaaacgaacccagttaatatccatataccggaaactcagcacccctgaaagtgacgctcccgctgttggtggtaacttgtttctgagggaatcccagaggcacacctcctttaccacgtctcaccttgtgtcccctcgctccctagcgcaatctttggttagatcagctgatggtattcaccatcctccgctacccgagggttgactgtggtcccgcgctttgtgtagggtgtttgcagcgggctgaaattacgggacttctgtgatggtttctgggacatcccaacaaggggcgggtgtttcacatcaataaagagagtggcgggttataatataatcgaaagacaagcagtaaaaaaacataagaaaagaagttgtattacaaacagtgtaaataagcaatctcgatgttagcaagccccatgaccatattgatcgagcgtgaaaattagttttgactcactgtatatgattgatcgtatggattgatatggtgcacgagtaatgacatgttttgttgttattatgattgacatattctgataatgtattgtgagatgggtgagattgagcgtgtgcataatgagacagtgatcatctgtgacgcgattccgtatggatcccctccatacgcttgtttaggggaccgcaccctctgtcctgcctactgtcgcccacctcttatatcacacacaactggctgcctaactcgctctctttcgtcctcatgaggcttgccctatggtctctgcgttcttccaccatctgcccgagctgaaacaagcaagtcttgttttgtaaacgtgacctggaatgcagccaaattcacatccacacaattgctttacaaatgtacccacccgccccggaattcttgcagacggcgccccaagaaatattgcaaaagactgagaacaaaacaaaagaaaataggcagtttcggggatcgtcggggcattttatcatgtcggcgattcgatgtgaccgccagcactaaatgtgcgttccctgctcccgcgattttttaaattctaatcatggatttagagaccctcctgaacgaccgctagctggagacaacagccaacaagaatccaaatcgtactagcatggtcgcaccagtcaaatcggcggaggcaggaacgccattactacacaggattggtgtggcgtgatggggattatgcactcagacgtttacactcgttttagcggggacggcatctgtgtcgagacgagtcacagagtctacagaagtcacagagcgagccgacatctcacatcacgggcgggcgcgtactacggcagtgatgccaggcagtcacagagtcaaatggcgacagtacttggaccaatcac

SEQ ID NO: 197 - DNA, 22379 bp, unidentified
  misc_feature 1..22379: note = Fanzor polypeptide
  source 1..22379: mol_type = other DNA
taataaaaaaacaatcccatggtttatcagggttgtcttgtataatctcccatgtgatgctggggtttgcgctcaatccacaccagttccatggtttgtcggggttggctttgacaataaaccatttgacgcaagggtttttgctgatattataccaatcccatggtttatctgggttggtttgtatcatatcccatgtgatatgtgggtttgcgctcaattcacgccagtcccattgtttatcagggttggctttaataatatcccatatgaaatttgggtttgcgctcaatccacgccagtcccatggtttatctgggttggcttgtataatatcccatgttatgcaggggtttctgctgacccagtaccgattccatggtttgtctggatagcattcgataacttccagcgtcaaacatggattataactcaataaacaccaatcccacttgtgttccatacatttgacccgtctcgagatgtggctatttatttccgctgtaatcatattttatatggattatctcgtataatatcccacgtgatgttggggtttgcgcttatgtaaaaccaagctatttatttcggtattcgaaacccatgttgcctgccacgattcgcaagacgttgggtccgtgaaaaaacgctacacatgacatcatccatggcagcttggtgcgggctccttgacaccgtgagcttgccgggatgctcaaactcttcataagatatcataacgttttcgaaccctgtggagtgcgacgtaggtgtcgacagtgtcccgccgttttcgcggaggaggcatgcatcttattggacagatgatacatgtggtgggagaaaacgattggtattaaaatgtcacattccagcaaatcggcatcttcggacattgtcatggttgagaagatttgggtacattgcatgatttgattgcaaaattctgaaaggccatggttccgtacaaaacgttgtagtctgaaatgatttgatcgaggagttcaggtttgttttcgttgttttgataccatttgatgagccgttcgcaatttatttcaatatttggcggatacttgcctgttgagtgtatccattgcatgacaatgcatacaagttgtgtggcaagatttttgtcgattgatggagggtgttgcaaaacttgagttatatccattttaatatatgcattagcaaacaataatacattgtttgacgcattgtttcttatgcctcggttgataaacggacctcaaggtgtaccgtacactccagaaagcggtttcattttagtattccgtcgagtgtaaaaggatgtggtctcactccaaggccccccaaaatactcacatcccatgactgatttgaactgtaaaataaacactccagtgtgaccgtacacaacaagtttcacgccgagtgtaaagattgatcgattccctgtacttaaacagccccctattctcctctttttggaaaaccgctagtcatcggtggtggctcagcaaccaccacctcgaacgagaaaatgtcttcgtcttcgtcggtgtcttcttcatctttccacgttgagatgttaccgttcccgttgatccgttccatcgcgacgctctgcggcgagaccgcaattttttgcaccaacaaagccatccgcggcgggttcgcatggccggatcggctggagctcgccattcgagaggccaaaaccctcgacaagaacacactgttccgcatgcaatgcgacctcggtgccgtggggacttgcgaacggatgctggataacgagtccgatgcattttctagggctgcgatgcttcttgcgaagcctccgaactactctggggagacggcattgattggggggtgtaaacagggcaacgtctccctagtcgagattctcattaggaactctccgaacgagcaagtgcttgcgacgaataatcatgggatgtcggcactgatgcgtgcttgtggcattcagggggggcatgcgaatgcagcatgtgtcaatattcttcttggatactctccgaacgaacaagtgctggcgacagacaatcatgggatgtcggcattgatgtgggcatgtatccatggtcacgcggcctgtgtcaagattctgcttcgacattcccccgacacacaagtgctgtcgaccgatcatttcggattgtcggcattgatgatggcgtgtttccatggtcacgcggcctgtgtcaagattcttcttcgtcattccccctacacccaagtgttggcgaccgaatgtcatgggaggtcggcactgatgtatgcgaatgcgtcctgtgtcaagattcttctccgaattccatcatgatttgaatttgtgacgtgacagtattgatgagctcctcgacatctgatgaaggcaacactttgtaagctttctttccccattctctagcctggtttgctgcatctttgttaaaaaaaaatatcaaatttcaccaaggtattaaggaacaccattgttattatgaaatagggtgtggtatttcatccgtgaccaaaggcgaattgaatcaacatctcaactgtcaccgaggtattatggttcaccattgtgatttcgaaggaggatgtggtaaatcattcgggacgaaaggcggattgaatcgacatctcaaaggtcaccaaggtattaaggatcaccattgcgattacgaaggatgtggtaaatcattcgtgaccaaatgcgaattggaacaacatctcaactgtcaccgaggtattcaccattgtgattgcgaaggaggatgtggtaaatcattcgggacgaaaggcggattgaatcgacatctcaaaggtcaccaaggtattaaggatcaccgttgcgattacgaaggaggatgtggtaaatcattcgtggacaaaggcgaattgaatcgacatctcaaatttcaccaaggtattaaggatcaccattgtgactacgaaggagggtgtggtacatcattcgtgacgaaaggcggattgactcgacatctcaactgtcaccgaggtattaaggatcaccgttgcgattacgaaggaggatgtggtaaatcgttcgggacgaaaggcggattgaatcgacatctcaaaggtcaccaaggtattaaggatcaccattgcgattacgaaggaggatgtggtaaatcattcgtgaccaaaggcgaattggaacaacatctcaaatttcacaaaggtattatggttcaccattgtgactacgaaggagggtgtggtaaatcattcgttaccaaaggcggattgactcgacatctcaactgtcaccgaggtattcaccattgtgattacgaagaaggatgtggtaaataattcgggacgaaaggcggattgaatcgacatctcaaaggtcaccaaggtattaaggatcaccattgcgattacgaaggaggatgtggtaagcatccccgggggagttgacccctatgatatccctagctgtatggataaaacacaccatatctgaacataaaaggaaaccccaaacagtaatataaaagtattattaacttacaattatacaatgggtagcaagcttgataggattcgtgcagatattatatcggccattaaatctacacaagcagatattaacgatgaaacattgtcccgcaatagaggcaaagttgcctttaatgttgattgtgatgtaatcaatagtatgaatatcattcaaatcaaatcattgatacatagcccggaagttaaaagcgatctaggtggttattgtaacagtttcataaacaaagcaaataacatcattgaaacagagccaccggcagcgaggactccagaggtcacagacgatgccgaaggctcctccagcgtgggcggagaaatagggcgatgaaatggccggccagaactacttgactacgaagaaaaaataagaatcatccatcaatcaatccctattttaaacgtgttcacatgaacacctctgaaaagaagaacaacaattatttcaacaacaaataaatactgaagaatgccggaggctcgatagcggattttttgatggctttgactgcatggggggtataaaaaagtctccattcatgttccttatttaagttcaatggatggcgacgctgaactagatgctttgctttctcaacacccggctgcaagagcggcatatgattgtcgcatcgagaggctaaggtttgtaaatgcttgcctgatgatagccgaacgatatgtgttacgccacactacttgccgtgtacaacatgctagcaaatgacacacaacattcgtttatctcttgctgttgcagtccgacgcgtacttggacggatgttgtcattcgagctcttgccactcgtgtgaactctcccattgatgagcagcaatttgccaaggagctcttggaagagtttgtaatcggtgccaccacccaaaatattgatgccatgaatggtcttgtgcgtgggatgttcactggtgtgaggaaaaattgcagcacgaccatgctggaggtggatgatgcctgatacattcgacagtgttccgccgtttgcgtgtgatagagtgcgtgcgtgagaatgagtgagtggttggtgggtatcaacatctcgacagcagccgcagcgacgcgtgtgtgaggatgcggcatgtgtcgtgataacataatgcataccgccaggcaagttcctcttacactcaccgcttgcagataccgccaggcaagtgcctcttacagcttgccgcttgtcgctttcattccaggcaagtgccgcttgcagataccgccaggcaagtgcaaccaagggtttatagggtttatcccaactcattgtttatttataccatcctgtacacacatgttcatcgaacatgcagtcgaacacgcgatcatcgtttccactccttacgtgtccccatgacattcttggtcgtattgccctattctcttccaacccaaagattgtattagtgtgtaaaactctgtgcaaaagtatttctggatggccccttaccggactgatccaaccaccacagcgagttggagagatgatggcaaaaggggggcgcgccgaccttctagcagtatgcttggtgtccaatcctcttgtacaggttaaggggggcctacaattgagggcgaaccaaaatgaaaacaagcttctctatgtggctgccaaggccggtcacgcagatgtctgcaagctgctcatggatccagcgatggctggaattgagttcagggcccgggctaactctgtcaacagctgggccttgcgtgaggctgcctatggaggtcacgcagatgtctgcaagctgctgatggatccagcggtggctggacttgagtttagggccagggcgaactctagagacagctgggtattgcggctggctgccaatgcaggtcacgcagatgtctgcaagctgctgatggatccagaggtggctggaattgagtacagggccgtggcgaactctagcgacagctgggccttgcaggtggctgccaatgcaggtcacgcagatgtctgcaagctgctgatggatccagcggtggctggaattgagttcagggctagggcgaactctctcaacagcagggccttgtggctggctgcgaaggaaggtcacgcagatgtgtgcaagatgctgatggatccagaggtggctggaattgagttcagggccctggcgaactctaacgacagctgggccttgggggcggctgcgaatgccggtcacgcagatgtctgcaagctgctcatggatcctgcggtggctggacttgagttcagggccagggcgaattctagcgacagctgggcattgtggctggctgcccatgcaggtcacgcagatgtctgcaagctgctgatggatccagtggtggctggaattgagttcagggccagggcgtacactttcgacagcagagcattgtgggcggctgccaaggcaggtcacgcagatgtctgcaagctgctgatggatccagaggttgctggagttgagttcagggcccgggcgaactctgtcaacagctgggccttgatggtggctgcgaaggctggtcacgccgatgtctgcttgcttttgatggatccagatgtggctggccccgagtacatggccattgtgaatcttgacagtgcgtccgtagttcctctggcagcggcacgcccctctccgagaggaccctgacgcaggtccggctatgcagtgccatgccctgcatggctctgaaggtgacggagccggcgcctccctggatccgtggagagattcgcgtgtgtaaggctgtgtgaggatggatgatgcgtcatgtgtcgtgacaatacgagtgcgagtgggtgcgtggccagcaacatccgccgccgtgcgtgcgttatccgatcatgtttcctccgttcgcctaaccaactcacaattaatttcattggacgagacatgcgacaccctgccgattgcaagtcatggactgaattggctaacacgttcactaaactgtgatatggtatgaaaggaacacccgtaaatttgtaattttaatcttactcactactattttgcttaatgggtttaagtaaatcaggtcaaaaagcataaggcgatgataattataaaaagaaaactaatatgaacgattgtcgcttggttattcaggcatccactcaccccgtgtctgatatagatagagttgtttctcgtcaagactgctacatacatgtcgatctgaacagggagatatgtgaagacttcaacgaaatacaagttgatttaccttacatgcaaacaactagagaaccggggagattgctggtgttcaaagaaaatgatttcttgcatgcaattaataacatgagtcaaacgcgtccacatagtatcgagacagccctccgatttgctaacttattcggactacattcaactgagctgcactttcttagaatttgcagtaaacataaactgcacttgaacaagtatctatttaccgattaataatccggtgataccaggatgcaaagtagtaccattccctattaatccaattatcatgtacaactccatgacgcaatggatcaacccccaaccccatgcctgccttccaatccctccctgaaccagagcggcatggccacttggttgaagtttttatctgcataccgtttgcaattatatgtttcataatgtcgccagtcaaatcgagactgtcatgtggcttacattcgcaagtatagccactctcctcaaactttgcagcaatgtgtacatgtgtaccacaatagaccgtctgtccaagttgtacatagagaattgtaattgattcaatatactgtaacattattgaccggtctgagtgtaacaaagggtttttgaggccattggaagtctgatcaaaaagacacagatgttggttgtctcaactcagctgtactcggtgccagccgcatctgaatccatgagcagcttgcagacatctgcgtgacctgccttggcagcctcacgcaaggcccagctgtctctagagttcgcccgggccctgaactcaattccagcaaccttcggatccatcagcagcttgcagacatctgcgtgacctgccttggcagccgcccacaatgctctgctgtcgaaagtgtacgccctggccctgaactcaattccagccaccgctggatccatcagcagcttgcaaagatctgcgtgacctaccttcgcagccagccgcaaggcccagctgttgacagagttcgcgcgggccctaaactcaagtccagccacctctggatccatgagcagcttgcagacatctgcttgacctgccttggcagcctcacgcaaggccctgctgtcggtagagttcgccctagccctgaactcaattccagccacctctggatccatgagcagcttgcagacatctgcgtgacctgccttggcagcctcacgcaaggccctgctgtcgctagagttcgccctagccctgaactcaattccagccacctctggatccatcagcagcttgcagacatctgcgtgacctgcattggcagcggcccacaatgcccagctgtcgctggtgttcgccagggccctgtactcagggccagccacctctggatccatcagcagcttgcagacatctgcgtgaccttcatttgcagccgcacacaaggcccagctgtcgctagagttcgccctggccctgaactcaattccagccacctctggatccatcagcatcttgcagacatctgtgtgacctgccttggcagccgcccacaaggcactgctggcggtagagttcgcccgggccctatactcgagtccagccaccgctggatccatgagcagcttgcagacatctgcgtgaccttctctagcagcggcccacaatgccaagctgtcgctagagttcgccacggccctgtactcaattccagccacctctggatccatcatcagcttgcaaacatctgtgtgaccttccttggcagccgcccacaaggcactgctgtcgctagagttcgcccgggccctgaactcaattccagccaccgctggatccatgagaagcttgcagacatctgcgtgaccttcattggcagcctccaacaaggcaaagctgtagctatagttcgcaagggccctgaactcaagtccagcaacctctggatccataagcagcttgcagacatcggcgtgaccggccttggcagccacatagagaagcttgttttcattttggttcgccctcaattgtagggcccccttaacctgtacaagaggattggacaccaagcatactgctagaaggtcggtgcgcccccctttcgccatcatctctccaactcgttgtggtggttggatcagtccggtaaggggccatccagaaaatcttttgcacagagttttacacactaatacaatctttgggttggaagataatagggcaatacgatcaagaatgtcatggggaagcgttaggattaacgatgatcgcgtgtgcgaatgcatgttctataaacatgtgtgtacaatgcatgcaagcgcacaggatggtctatagccttttataaaatcccaactcattatttatttatactaccgaggcccatgcacctcccttgtgacgcttgcgcaagtatttattcccccacttattgcagttcctagacctcggtgttgtcctcctgctccatcattttagtacgcacatggctggcggcttctacagtcggcggaacagtaaaatgaaatgcacaaccgcaagaggcgttgttgcttttttcaaaagtactcacaatgtacgattatcaactaaaacagtgtatcgtttcataaaactcattggttttacaagaaaaaggagcaaattccgttgacagtgcaaaggggacttagttccacttgtcaatgaattttgtagtaggtacaaggagacaatcaatgctgggaaaattttagtatcagttgacgaatgtgggtttagtgagcgtctcaagccacattatgggtattcccctgtaggaaaacctgttatcgttaaaaagtagttttttttaaaaagtagtgggtgggtacaccacagtttgttgatggcagttttttcagatggtaggaaagagttcgttgtgaagaaaggatctgtgaagaagacggacttcgttgcatttattgaatcattgagtttgtgcaataattcagtagcaataatggacaatgccagtatccataagaaattggtcctcagtcaccccgtcaatatttgttacacacctccttacagtccagaattcaatgctattgagctatgcttcgctaaggtgaagagagactttcgtcgtttgaactacataccgaatgaaacaaagacgcacgtgtctgatatgatttccttagcattcggcaacctcactgataaaattagtatgggttgttttgaacacgtttggaacacttatgtgtataaagcggtctgtgacgtattgattatgaaagatggcgacgaaacctccgacagtcgcgaaattgaaggagctactgaaattggctgaagtaccatactcgtcgaagtccaacaaggacgatcttgtccgtttatgcgaagacaatggtctcatctccagaccccctccagaatacaagacggtggaaaagatgtgtgtagtgaaatgcgccctgaagaaggcaatgagtcttgacgatgaagaattcggtaagtttagggagcatgtggaccagctcgtcaatgtggtgagccgcattttacggcggtccagtctggtgctgactttccacatcacgagtctcttggagaaaggtctggagattccagacctgtacaacatgaaagatacctactggaaggattggctccgtatcggggtagacggaatcttccctgatgaggaaagcaagatatcgtacgaagctgtgaaggactccatcggcgatgtaattggtaatgacgacgctgactacatcaagtcttattcgatctatttcgatcaggtattgaactatgcaggtcacacattgagcactgtcgtgtcaaacaacgcatgggttcctttgataccacgtctggccagactcacttccaccactttaaataaattaaattccccgaagacgctggacacatcgaagatcattcggggatacgacgtgatgcaggctattcagcaagaagtccaaaacatggagggatggccagagtctgttcaagagtacgtcaatgaagttagggagatgctgagtgttccagatggaagtcgagtttatgataactatggcaaagacatggactttccgaccatggtccggtttaattattggatacagacacggttggaggatatggatgcacgtcgtatccgattgatgcccatctttaatgtccaacgggtgcatgttcgccttgacctgaagaccctcgtgaacctgttcaggcacatgttccccaatgaccagaacatcgttgagctttccaagtgggaacatgtaaagaatcccgacagcttcatgttgccccagaggcctgcacagaagaagaaaaaatcatgtggtcctggtgaatgggaggcatacaagtcggtcctgaagcagtacgatgatgatgttaaggatatcaaggctactgacgagtacagacatgcaaagtgtttgtatgacacgcttgtgaacgcccgaaaaacagtcgcaggttccttcttcagaaaaccacctgtcaagaatgggtgggttttcgactgcagcatctgtactgacggagtctctttgagcatgcagtacagcaagacagtacaggtccttgtctcagatttgaagaagacctgtaagaagcctcgtaaagaagaaggtatcaagatcgcagaaaaatacgacggctcacttaaaacgatattgcccgatatgggtatcgtcgtcctgggtgtggacccaggacggagcaacatcgctacggtaacgtatttggcagacgataaaaataagacatggaagctgacacgtggtgcattttaccacaagtcgggtatcaagaagcagacaaggcagaaggaactgcgttttgctgacatgattcctatgtgggagtctctgcgtgaaaatggagcagctttgagtacatcgaggacggataagatctccgcgtacttgtcaaattacgctaagttttctgacgagtggtggagattggctttgcgacgccgagaatcccgtgacaacttgcagcgttacatcggaaaacgaaaggtcaaagactctttctgggcgggtatcaagcggtgcatgatgaaagaacttcctgatatgaaggtttgcgtggcctacggatctgccatcacgaaactgaagcctactggaccgggagaagttgcagttcccactggggccatgttcgcatcgtgtaaaagaatttccaaagaggacgtttctgtgacagatgagttcaaaacgactcttatgtcgtgggagacgggtaaagaaaaagaacgtgtttacaagatcccaagtgtttgttcagcagacgtgaagcttaggttgggtggtgaacgttttggtcacacgaaatcgaaaacgatgccaaaggtcgctgattgcgaccacttaggggtaaggttgtacaaaaaacgtaaacgcgcacaagagaagcacaggaggggtggcttcgccacttcccttgtcgattctcaaaaatcgatcgagcggtacccagaggtacgaggactgcgattctctccagaaacatgcatttactcggaccgggatcgctcttctgctctcacaatcgcaaggctgcactgcatggaattgatgggtctaggacgacctcttccatttgcccacagcagctctgttgttgttgatgaataaaaactcgtattgttgtagacaccactcggtccccctccggtggtcgcgacaacattaggttacaccgcaaggtgtaccgtacaataccgtacaatactgaccaccaggccgaaactggtgcctataactccgtacttgaacacctctctagaaaaagccgccccctcatagcaccagctaccgaagtgctgacagttccttcccaacacattgtaatccgccctgccgagctgcgagcgtgcccttttgaccacctccaacggtgagaaacgacacctcgcattcacaacccgtgcagagctgccaactaccaggaactctgccagagtagtctctctgataaatcgctttccatggggctctgaccccgcatagtggatgaccttgatgtctgctgcagaggaatacccttctgggggggcgctcacaatgccatcgtgctcgaacttgatgccgatggggttgacgcaatccacatgaagccacatgccagcctcgatgctcgccatgttcaacttcttagtacccatggcagactttttctgcgaggggtggcatacgcaaccaggggaaacatgtcagcatatctgacacgtgtgttcgcgcgcccatgaaaatacgagtgtaaacgtggcatttctgccacgttttcgcgctcctcgaagtcagcgaaagccgccttggtgtgtgtgaggatggtacgggtctgcgaaatcacagtgtgctgtgactcgactcgacagtttccgccgtgatgcgagaggtcgccatgtgatgtgatgtgactcgactcgacagataccgccgtccttgatgagagtggtctgtcggtctccgttcctcgaaacacgagtgtaaacgttgttgtgaaccatgtacgtaattcccttgtccgattgtacaaaaagcaaccatgcaggagtcggaaccatcccagcaagtgaagaactactacatcgatgtaaaacgcgaagatgcaattgctggattgaatggcctgttcggagtgtcacgcgaggactcaggtgcacgcctggtggagtacatgccatcccatgaccaaccaggtcccccgcatgcaaaacacaaatacacaaaaacaaaaaaaatggcgaaactttgactggttctcttttcacagagtgagtgtgtggacgagaaagaggctacaggtttccgccgtgatgcgagaggtcggtcgccatgtgatttgactgcttttgcagtgtacgaaacttattcgtaaaagagcatccaacagtgcatatcgtcgtcgccgtttatccaacggttttgaggatacacgcatgctaagtaaccaatgccaaagttagtcattgtgaccatgtgtgagtagcctaagctgctgctcaagaggatgcgtattcccatagcggtgctgatacggtcgataattggcttgaactctaaagcaactgtgcagagccatataaggagttgggcaccaggatggtgcgctccatgttggttgaccatttcacacaacaaatttgtagccgcctgaattttcgctttacttgtatcgcacacatggtcgcaaagtctattttgcagtccatccacgccgtttatgtccactaacctaccatcactatgcgagggcagtgtctgcgtgagtggtagcactgcttccgcagggacatccaaggtaatcaattcgcatactatgcgtaccctgtcatgaagagactggcgcatccccaattgtctcagtgcataatcgtgtaaatgaatagagcatggattcagaagcagatcacgagcaagcttacgcgttggcgcgacagccatgtgcggttcaagtgctgttgccatggcctgggcgtaagcaggctctgctattgctacacgcagcatcatttttgaaattgaagcaacagtggcccccgctgtctcattgtctagcagtatgacaatcgcggaccggataaagagatcctccacccctgctggcagatgtgctgtcgctacacattcattggccacatggatgaacacatcgatgcatggtatgggtatcttagctggtagttcagctaaaagtcgaaacagattcccaagaccgtcttgactgagtgcatctatgacggcaagcatatgggactgggaacgagttgcaatgaagagactgaccagtccgaccagatgacagtgttcctgcgtacgatcattacatgtccgaatgaacatgtcggtgtacagttggttgaactgtgggctgaccttgtcggtacctatgctgacctgccgaccacacgcattaagcgcaacgctcagaaagacggtgggcatgctggcgatcaagcaagcaataccgttcatgtccaatgtaagctcagtcgtaatgtcgttgtagtactgtagcatcctcgcaaccccctttgatgctttgcgcataatcacaggtgatgcagcatacggtgtggctgtctcgagcaaaactagcaatgccctagtagcagtcttgaaatcaccgtgtccagagcagcgtctaatcctagaagaagctagcatcaatctgatactcagtggtagtaagcaaccgcacatccacattgtgcaatgaactacagtgatatgatgacaacacgccttctctgccagcgttgcagcggccgcagttgacatcatgaacttagaacccttttatgcacctgaaaacagttaaactcaatggaatgagacagatcgggaaaaagctacccccgaaaacaactacaaaaagccctgcaaaaatctaccccccgaaaacaactacaacgatacgccaccgcattgccgtgtcatgtggatgatgttggtcagcttaaatgctgaaatgtctatgattgtacgagaggcgttttgggctactactacttgtacttacattgtactcaccaacgggagtgtaatgaattctttcaagagtctgcgtcggcacacaacataactcgggtttgtattcacgtgtctccatgtttcctgaatagtcgctgcggctctgcgtcttcgcactaaacggcacgcgtcttggacggataccaacatgttgcggtttctactcaataaatgccagtcccatggtttgtccgggttactcgagacaatgtcccaagtggctactccgggattcgcactcaatccaagccagttccacggcttgtccgggttactcgagacaatatcccaggtggctacactggggtttgtgctcaaataataccaatcccatggtttgtccatgttactcgacacgatgtcccatgtggctacactggggggtgtgctcaaccaataccaatcccatggtttgtccgggttactcgagacaatatccagggtggctaccccgggattcgcactcaatccacaccaatcccacggcttgtccgggttcgtcacgacaatatcccaggtggctacactagggtttgtgctcaaataataccaatcccacggcttgtccgggttcgtcacgacaatatccaatgtgactactccgggattcgcactcaatccacgccagttccacggcttgtccaggttactagacacgatgtcccatgtgacattggggtttgtgctcaaccaataccaatcccatggtttgtccaggttactcgacacgatttcccatgtggctatggtgtttgtgctcaatccactccaataccatggtttgtccaggttactcgagacgatgtcccaagtggctactccgggattcgcactcaatccacgccaattccatggtttgtccaggttactcgatacaatgtcccatgagatgacactggtgtttgcgctcaaccaataccaactcaatggtttctccaggttactcgacacgatgtcccacgaaatactcgcgtttgagctcaatccactccagtcccatggtttgtccgggttactcgacacgatgtcccacgtgacgacactggcgtttgtgctcaaccaataccaatcccatggtttgtctgggttactcgacacgatgtcccacgtgacgacactggggtttaagcacaaattactccaatcccacggtttgtctgggttactcgacacgacgtcccatgtcaggtatggattatcactcaattgaccccaattccatttgcattctccggcttttactcgatccagtatgtgactaatttcgatgtcgagcattatataaattctcacggttgtgttgtcctcaaataaagtaaagtgggaccattcttttacattacagtctacggaatactaaaatgaaaccgcttcgtgtacggtataacctaaatgtgtagaaatccacggggtagtggaacaccaatacgattgtgaatcaacaaattgcaagatgttaacgagaatatccattgaaggaccagccgcacttaagcgatcgcctcttccccggtaccgtggcccaaaagaacacggggtcttgatcgtgctgagttttccgttgaaatattcgcatgtcttgaagcgttctttggcctccttcagcagaaatgcgctgtccgggccgttcacatttccaaaataattttgagcatgcagggaagggaggatgagtgactttgataatcgtttgcagcagcttgaggcggactacaaagtgttgttcgaggaacaggcaaaccagcgtcaggagatccagcgcctggacaaggagatccaagcagtgcgggatgccacgtccacccagatcgagcgtgagttggaaagggcatgggccgaggcgtaccatgaactgcaagggatgttgaccgatgctcagttgacccaagttaaactggcaacattcggcatgcacaaactcacaccccatcttgcttgttgaaaatccttgcttgccatctcatggagcagcctcctgaacgactagctagcttgagacatcagatcacaaatccgctccataccatgtttcgcaaccagtcaaaatcggccgggaggcaggaacgcccattcattgtcaaagctttgcatggggggagttcatgaatttgcttggtgtgtttgccttgccataaaaataatgagagcggtaggtaatatacctgaaaaatgcatacgtattacgttcgtgctatatgcacgttgcaatatgatcaattgatagattggtttcgatcgcatcctaaaaacatatgctggcctcagcagatgatggactggggtgatgtgtttccagatctgtacgatgttctagacattgatgagggtgctgttgatcaagaaattctgagggcgtttcgcattcaagtggtcagggttcatcccgacaagctaggtcctttggcatctgaagatgaacgaacagcagctggccctccgcacacgagttattctgcaagcgaagaacgtgttgatgaacaccgaaagccgcaaggaatatgacagtgagcggcgaatgagaaggcaaggggatcagcaatccaagtctggttttagtgcgccggaggaggcatctgctggcatggcgcatgtttgggaggtctgggccaatgttgttgtagaagggtttgccaagcagtttgaggcaggagctcgaggagagcgagtggtgcagcttttggaaacgattctgctgccagccataggggtgggcttgggtggggagagaggcttcaagctagggctgacactgtctactgttttcaataccggatgtatttctgtggtcgtgaaggcgctctctgccgaggaccaaaagttgtttttccaggctctggaagtgttgtgtaccaaaatgccttgagtaatacagttgttgagaaaagtccgcagctgaattcccctgccccactccgtggggtcccgcgattcctctttcatacttgccatttcccgacatatttgagaattcccactttatttcagaacaacataaaggagtttcttcattgatctaataataattttgacgtgaactgtcaaaatgttgcaagaagaatatgaaagagaattacgtgtgttggtggaaaaaacatcgacccccgtccgaagcctggtaggttccatcaccaatgacttaactgtaacatggtttagcttgaaatggaaaatactcgaaattcttgggtatgacgtccaggtcattcatgcatgcgagtatggttgcggtagagtttcccctgcccactttcgtcaatcacccgcccctctctccccatccgtgttcatgtggttcagcctctgttaagttcaccacccatgtcatgcattcctttgtgtgtgtgtgtcagtcagtcagtctcagtcggaaccatcccagcaagtgaagaactactacatcgatgtaaaacgcgaagatgcaattgctggattgaatggcctgttcggagtgtcacgcgaggactcaggtgcacgcctggtggagtacatgccataccatgaccaaccaggtccctctcatctgaacatggccaccatcaagcaaatatttggatgacatgggggcgctcgtgaatggaaggaatagagagagagggaacgttacatactcagcaaaacaatgccgagacctgtactgatcaaagttgtttacactcgtttttattaaaacaattgtttagttgctaatctgtcatcggggttgtagctcagtggtagagcgtgaggttaagccaattttcttcattccttgatcatgtcgcccactaattggttcgaatctcggtacctccagtgtttttccaaagttccaccttcagttaatcaatttcctggcttcggatatcttgactgaagacgcgtccaccgtgatccacagctgtcacgatcatacgacgaattgtcacagatccaagtgttgttccgtctttcatgtcaatgttgatgagatgctgtatccatgacgaaagtctactcgcgcacataagtggcctgctgtatggctttcaaacaccttggcatttccagttttggcatgggctttgaggattttcgtctccaccacgaaaagtgtgttgatagcatgtgagaatacaagggcgtccccgttggcgcgcttgaagcagccgtcatcgaagacgtactccacagcgacgaggaacaaacgtgacgatggggatgtgtggtgtttttgtttaattaagtggcgcaatgcgttatactccaagacgcgtggatcgccggaagtagccgatgacgtccgcagtgcattgagacggctgacattccggcagtggaggcgatcaagaaactttgatgtgtcgagactgtccatgtccagcgcccttcctagttggcggactggatttgaaatgggctgacaaggttgtggcggcatcgcgtcgatgaagactcttttcttcgcgcatacgtggatgtggcaatgactccaatctcaaaagaaggctttacatatccgtctgtgtggcgtgtggaaagagcgagagagcgagatagaaagatagagagagagaaagagagagagagagagagggatagatattcgcgtgtgtatgtattttgcgttatttgtagatggaagaaaggaaagagtagggtggtgtgcgaatgacgagctagtgaagagctagtgatgaggagaataatagaaaaatatgcattctcggggcgaggagggtcttttatgatgcccggctatcgtacctccagcaatacacaaggattgggcatgcctataaattcgacagtgttccgcatcttgcgtgtgtcctccgatacattggacagtgttccgccgtttgcgatgacttgacgcaggcgttccgaatgaatccggtatttgagtattttcccttacaagtctgatgcttgatgtgaactgtgggctcccctccggtcgcccccggtcgctccgctggggggaagaggtgaaaggggctctgccgcttgtttatacagcccgcaattctgcggcgtttacggatatgtcactacactcgacggaatactaaaatgaaaccgctttcttgagtgtacggtacaccttgcggtgtaacctaatgttgtcgcgaccaccggagggggaccgagtggtgtctacaacaatacgagtttttattcatcaacaacaacagagctgctgtgggcaaatggaagaggtcgtcctagacccatcaattccatgcagtgcagccttgcgattgtgagagcagaagagcgatcccggtccgagtaaatgcatgtttctggagagaatcgcagtcctcgtacctctgggtaccgctcgatcgatttttgagaatcgacaagggaagtggcgaagccacccctcctgtgcttctcttgttcgcctttacgtttattgtaaactaccccctaagtggtcgcaatcagcgacctttggcatcgttttcgatttcgtgtgaccaaaacgttcactatatcctcatatttggctccttccttgccgatggatcctatctgtagctggacacggtctatttcttttccggagcttgagcgtgagggtgctctgagcagcaatttgacgaagaacctcatactctgccatatgctgcttatacacgcgagcctcctccaactcctccttcttctgttcaatgtcagcatgggcctgagtaatctctgcctgaagtgcctcccgcttctcttggtaccctcttctgctcaacaactgtttgatcacaacagccttcattttcaaaccctgcatctcgactgctgctatttctctcatgagatcgttcagtgacttgtctgcatcctcgccactgcccttctcagcctgcaggcaagctccatgaacctctttgctactttcttgaaaggaggtctcctcgagggacagatgcctgagcaagataatctactcctgatgatggccttcctcagcaggtcgaaacgccgctgctttcgacatatagctactaattatctgttgtttgatgccttgatggctcgccctgggcaaaactttgatcgatggcttcttctgggcgtggattgccagtgaagagatcctggccgggcggaattcacggatctagctcaggcatgcaatggaaaacagtaggcacgttgtggctacggaagattagaaagatagaaagcaaagaatgcgctggatcaaaaggagataaagcaacccacagttgcgttgtttgaggaacgggtcgcgatgaatcacatgtgcagaaagcgaaagaacgcatagtggcgtggcttattaaaagcggtacattccaatgcagctgaaagctttggtatcaaacagttgtatcaacctgcgagataactgcacaccaacactgcagttaccggattgtcgcttggttatcaggcatccactacccgtggtctgacatagaagagtgtttctcgtcaaaggactgctacaacatgtcgatcgaacacgggagatatgtgagacttcaacgaaactacaaggttgatttacctacatgcaaacaactagcgaaccagggaggacttgctggttgttcaaagaaaatggatttcttgcatgcaattaataacatgagtcaaacgcgtccaccatagtatcgaaacagcctccgattgctaaactatggactacattaatgaggagctgcactttcttagaactttgcagtaaacataaactgaacttgaacaagtagtatctatttaacgattaatacatccggtgaaccaggaggccaaagtagtaccattcctattaatcaaattatcatgtacaacatcctgacgcaatggatcacccatgcctgccttccaatccctccctgcacaagagcggcatggccacttggttgaagtttttcatctgcattacgtttgcaattatatgtttcataatgtcgccagtcaaatttgcatgggtggataacaaaggatttgaggccattggaagtctgtcaaaaagacacagacgttggttgtctcaactcagcgtgtaccggtggccagccgcaatctgaatccatcagcatcttgcagacatctgcatgaccgccttcgcagccagccgcaatacccagctgtctctagagttg

SEQ ID NO: 198 - DNA, 22376 bp, unidentified
  misc_feature 1..22376: note = Fanzor polypeptide
  variation 21967..22376: note = n is any nucleotide
  source 1..22376: mol_type = other DNA
aagggcatgttttcattgatcgatagcgggcgcgatgacattgcgtgcgatgacattgcgtgcgatgtcaccacctcccccatcgtcgtgaacaatgttgattaattttgaatggaattgattggattggattgtgtgtaaagaattgaatcgtccaacatacaaaataaaaacaaacaaattgtaagatgaagaatccttctaattccaatactgacggtgatctacggtccgagttccgttccttcgcattatcagagggtgttagtgagagctctatctccaactaccttaaccgattgtctactttggaaacatctgtgttccctgaattgagcttggatataatagttcttggaggacgacgttctgttgtgaagaagtcatctgcgaagaagtctttggtggtatcatcatctccgaagaattcatctttcacaacggtagatgacatcgacgctacgtacgacgtgttgcgtgtgcgttactctaacatgtctacgcgacgtaactttttgaccgccatattggcctttctgcggtacactccttccttacgtgacgacccccgcgctgcatctgcacgtgctcgttggacagaatttcacggacatgctcgcgcgtttcaagagtctcgttacaaacagcacatgccttcggagcggcaactcgagaagtacgtcggcctcgaccaaatcgattccaagtaccaagagctgaagggcggagatgttactaacactactcttcaagattcccttgacattttgttgttgtcattcgtcctttcgatgcctcctaaacgcgctgacatgggagctttgcgcatctacgaggacactgaccctcgtttgtcttcagaaaactaccttgtattgcgccgggcgtcttctgcgtcatccgttaatgccaccgcctacatcgtattgaacaagtacaagacgtccgcgtcatacggtcgtgtcgagacggatcttcctcatagcgccaccgcagacctcctggacagtctgcgtcactggccacgcgactacgtgttcgttacccgccgtggacacaacagaccgttcgcctcgaacaatgcgtacggacggtgggtgcagagcgtgttttctcgtctgttcggacgtgcgacgggagtgaccatgctacgacatattttcatcactgagaaggtaaaccctggttcgatgaacgatgacgagttggaagacatagcgcgtcaaatgttacactcgaccgacctgcaacggaagtataactgggaccgcgcgaagatctgcgagacgctctctcaaatgtgtgagcagtgtactggaggtaaagtacggacaaaatcaacgaagaagaggaagttcggatccgttgtgcatcttcccatcaagtaaattattccactggctaaataaattattatgaactattacaaccactcaaacaaaactatggcgactgggatacctttggcgacattaacgatcgctccattttcaggatatcagttcactaactctgcagttggagatttgctgatccacggtatcaacggaggcccttctcaaaagattctggtaggaacacaaagcaacaatcatgcgctagtttcgtttgagcaaaccgaggtcactgtgagggatgccaagttgtccatgatgaacgactcaggcggagtgcagctctccgcagagggggatgtaatgtacaccacagggtccatcatcccagcatcgacatgcaacgtgaccatcggatctgatgcatctcgatgggaaagtatgtacgtcaataacttcaccatgagcgggaaggcccagctggggtccaatgtgtccatgtccaatgctacaggtaaggcaaacatctggtcctcagggacctacttgggtgttaacacccccaacccgacccaagaacttgacgtgaacgggtccatcaacgtgtcatctaacgtcacaatcagtgagacgctagatgtcgggctatcaaccaccttgcaggacaccctactagtaaatggtgctgccaccctctccaattctctgactgttgacggagccaccaccctcgataataccctactggtaactggtgctgccaccctttccaattctctgactgttgacggagtcaccaccctcgataataccctgctggtaaatggtgctgccaccctctccaattctctgactgttgacggagccaccaccctcgataataccctactggtaactggtgctgccaccctttccaattctctgactgttgacggagtcaccaccctcgataataccctgctggtaactggtgctgccaccctttccaattccctaacggtggacggtgctaccattttggacgacaccttgctggtcatgggtgcgtccacgttttccaacgaggtctctttcgcggacagttccaccttccttagtaacgtgattgtcctcgggcagctcagcgtcgacaccgtcacctacaatgtgagcaacatcgttgtctttgcatccgaggagttgcgcagcaacttgcttgtggagggtgtcatggacgtgcggagcaacgtgttcttgggtggcaaaaccttgattggcgacgaattgactgtcgatagcaacgtttttatacagggggtaaccaccatgtccaacgacttgatcgttacaggcaacacattcttcctatctagtggtgcgcagacattcgaaggcgcggtcataatcaaagatactctggatgtctatagcaacttggtagctaagtccggtctccaggtggatggggtggcgtcattctccaatgacgtttacgtgtcgagcaactttgcggttcaaggagtcaccacatttggggacgcactcgaggtgaccggtgcatccaccctctctaacaccctcattgtggacggagccactattctcgacaataccctgttcgtgaccggggcatccaccctgtcaaactctgttgacgtgtacggtccagccagtcttcggaatgacctcttcgtcgcaggagcatccaccctctccaacaccctaactgtcgacggtgccactattctcgacaactccctgtttgtgaccggcgcatccaccctctccaacaccctcattgtggacggtgccactattctcgacaataccctgttcgtgaccggggaatccactctgtccaactccgtcgacgtgtacggccccgcaagtcttcagaatgacctcctcgtgatgggaacgtccaccctctccaataccctaactgtcgacggttccactattctcgacaactccctgtttgtgaccggcgcatccacgctctccaattccctcactgtgtccggagcagccactgtcgacaactcccttctggtgatcggggcatccactctgtccaacaccctaacggtcgacggtgccactattctcgacaattccatgctcgtgactggcgcatccaccctctccaattccctcacagtggacggcgccactattctcgacaataccctgtttgtgaccggggaatccactctgtccaactccgtcgacgtgtacggccccgcaagtcttcagaatgacctcctcgtgatgggaacgtccaccctctccaataccctaaccgtcgacggtgccactattctcgacaactccctgtttgtgaccggcgcatccacgctctccaacaccctcatcgtgtctggagcagccactgtcgacaactcccttctggtgatcggggcatccactctgtccaacaccctaacggtcgacggggccactgttctcgacaactccctgttcgtgaccggtgcctcgactttctccaacacaatggccgtgaccagctctgcaagcttcctgagcaacgtgaccatccttggtgaactgagtgtggactctatcacttacaacctgagcaacatcgtcatctactcgtccgaggagattcgcagcaacttgttggtggagggtatcctagatgtgagaagcaactttagggtggagggaactagcatgctctccaacgagcttcacctgttttcatcggcgaccctgtacaacgaagagtccactgtgactctgagcaacttgggaggatcagcgactctgtccgcaagctccaacaactttggttttaacatgttccctaccagcaatgcggagtataccgtagacattaacggtgacatcaacttctcaggagagatctaccaaaatggggccgtttttaagtggctggaactccaaccagtggggcaactacatcaactcgaacgccgcattcagaggcccctcaaccgccaccgacgcgttgctagtgtaccagtctaacaacctcgcattctcattgagcaacacctcaggcttggtgtcaatgtatacatcgaacaaattcgtcggcatgggcacctctaatccatcgcacgagctagacgtggtgggatctgtgcgcgcaactgatggcgtctacgtgaacagcaacgagtccttcttcaggggcgtgcgatctgactgtgtggcaggagttgcaggcgcttccgtcttccgcggcgacgtgtgggcgagttctactacctacacaaccggcaccggtatcctcaacaaggtgcagctgttgggcagtggtgcaattgtcgacaacctcgcattggagaaatccgtccctggcacttctaacaggaatctcccgcttgtatgggacgagtttatcacctgcgcggggggtgacgttgttgccaaaaaccttttcaccaccggctcctcgatggtcgacggctcattgtccgtcatagggagtctgacaggaaatagtgcagttcttaagtcagtggtcatcagcggaggacattccaacttccacactgacgcaggatcaatctcatccaacacgaccaccgttctttccggtacattaccgatggcttcttcaaacgttgcattggggtctgtccttttcgaggtcaatggagacactgccctaaacagttctcttgccttgcgttctaacgcttttgttggcggcgctttgttcgttggctcgaacatgaactcgaatgctccttctctgcctaacgcccttgcccccgagttttctaacgttcaccttgacgttcagggtgacgtcgtgatagaggacggtctgtttgtgcgtcgaactgctgctttcgacgggcgtgtgggtgtgggtattcacgagcctggctaccccgtggacgtgcagagtagtgtggaaggtgtttccatgaactgttctgcgaaggtgatcgcctcagagttcgttgtcttctcagacgcccgtatcaagactggcattgaggcttatgttgcggacgacttgattgagcgtctgtccgtgaagcgattcgagtacgttgacaccgtggagcaccctggttccatggtcggtttcatcgctcaggaggtcgagagcgtggctcctgaatgcgtgagcacgacctcgtctttcgtgacagacatttatagctccctcccgattgtttctcgtgacgacagggagtgtgtggtctccatatctaatgtgtctctctccgctgagacgaacgcgcgcatcgtcgatgatgcagtgcttaagtgccgtgcccagggtggcgagacattcttcgtgaccgtattgcatcgtgagggtgacctggtgaccgttttgtcttctatcgcgatgcctggtattgaggaagaggacgtcctcttcgtgttgggaacacgtgtggatgacttcaagatggttcgcactgatcagattaacgctatcgccgtcgctacattgcagagccagaacaagcgaatcggcgcactggagtctgaggtccgcgcccttgtggagagtctcaagaagtaacattttcttggatacacttggttgttgtccaaaaaaagtgcattaggtttatgggttgggaaaaatatgagatcccaaaagacatgcaacattcgtacggggatattctccgggtctattattttagctatcttcgtcattgcattactgattgcattactctaccagaggatgttaggggcaagatatcgtgagacattcgaagaatcctcctctaacaaccagaagtacttgtctgtcgttcatacccagccttcgcatcgtgtgtttatcgatgacattgaagagtcaattacgaccgacgtcatgtctgtgttggccccattggatgcttatggtcttacggttgtccgtggttcgaagggacctgatgcgcttcgaaaactcgaaaaagaacgtgggtacactcacgtcacatatagcaaattgatcgttgcggatgctctctccgcttcgatatctttgcctacaggttcacttttggtcgttaccttgttcgactcttacagcatcttgttgttgtttgcgggcccctcgatgtcttctgcgtcatcctcatcaacgctccgtggaattgccgccgagaaggggtcatcatccctagttgtccattgtgtggggcaagtttcagctggagctgtgagtattctcgagaagctaatgcaacgccaaaataacacgaaacctgttgtgcccgcaatgacactaattaccggacctagaaatatagatccgatgctgactgctgctgatacttcatctaaacttcataaatacgacgttctggtagtatgggggtctcctgagttcattcgtgtgacggtgaatgcaatgggtagcaacactagcgctggtgttaggtgtttgcagtacacggacgttgatgacacggctgatttgatggcggtgtctccgtctgtgctcccatccgatgtcgatgtgaagaacattctgcctgatgcccgtatcggagtagagccatcgacccgagtgatggcggtgttcaagagctatacgtccatactcacgccaccaagcatctctacgtctgcttctgaatccgcatcgacttcggcgtctgcctccgcatcgacgtctgcttctgaatctgcatcgacttcgacttctggctccgcatcgacttcggctcctgtttctgtattgagtgctgaccctgctttgtccgcgcctatcatcagatcaacattcctgtctctgtctaatagcgaggatggtgccgaccacgtgggcatgacgaacttaactctttggcaagagtctttaaagatttctcctgctgtgaaggatgcgcttgcgcatgcgaacgagaagcttatgggtgggtccgtgtcccaagaaaaaacgaccgagacgtttgatgttggtgaaggtcgtcgtcagcctgattctattggaggttattatgactcagacgacactccattactgattgtgcctccttcgaatctcgagatgcgtttggtgcgcacggagttattgtttcaccgggggcggcgtgtggaccgtcaccgtacgtggcttgcttctgtgggtggcgacagcgccattgtccgtgctggtgacgtcgttgtcctagagcaacaggttgatgcgaggaggaatgggtcttactatgtgttggatgtgacctcttccacctggctgttgacgacacactgggtcttgcgtgaggagaattcaaattcagattcaaatgaaaaatcggactcagtttcggtggttaatgttgacctgcgtgcgcggcgcgcccaggttatagtgaataggggtgggcaccgtgttcggtggtggcgcggttccccatgcataatccgcttgcgttcttcctcctctgcttctacttcacagacttttctggtgggacgcatcgattcgtttgacatggttaagaacacccttgtcgtggatatagtatcggctcagccgacggaccgtgtgtccgacgaggatgccgttgtggaggacgatatgttcgggtctgggttcgtttgctccaccacggcgtcgtcttcgggtgtttttaatacgcgttttgcgtgtatgaattcaggtggtgtgtgggacagaccgtgcacggaaaacgaggattgtcccttttttcgtttgggtaggggtggcagcgtgcttggggggtgtcaagttccgtcgggggggacatgcgagataccgctaggagttcaacgcgaagggtttcgaaaatacaaagggaagcctgttgacacccccccattatttgcattcgaaggcttggctccgttgaattttagttagaatttcttttacgaacagggaatttctgttcgaactccgcagtggtaagttttgcgtttaacgatcatgtattttattgttccgttgactataggataatggagacgtcagaggatattctccaaattgctatagatcttattcgccgtagccagacctacgaacctaagataaatctggttaaaccagaaatctctgaaaaaccagatgtcggtcaaactataatttcaaacacaaacaacgagcccgaaaacacagatcccgacgggttcgtgcacgttgacgcttcttcgtacgctgtaggtacattcaaaggatctccagaaaaggatcaggttagcagagatcctctggatccggtcagcagagatcctcatgatccttattattgtggtagcaatcctagcgtatccggaagtagtcttgtaaacacgacagggagttcggcgttactttccatcgagtacgctgaattcgcccagaagtatccgtacctcttccgcatgtgcacgaacgttccttctccagaatcagcagataacttgatcaagattctgcctatgatgctgcgtcaacgagaccgtgtcattgttgcagaaggaaaaggtgatggtgacaataataataatagtaataatgttttatccgaccgacttaagtcggctacggagatggtcatgcagcgattgaatgacacgtacattgcccctctgggtatcaagcccgtcaaatcgagtaagaaaaagtaggtctctgactgtaattttcaataattaatgaaattgaataatctccggacctgtttctggtttaaggggatagggtgtcccaaaaatagttacaactattatgtacacgaaaaacccatgcattgacgtttttctcacggcaggaggcttaaaaggttcgtaccaatacgggttcttcaaggagttaataaatgtatgacatcgccgttagaaaattggcgttaagaatggtttccgaattgggtgtgttaaaaacttctgtgtttacgaacatcagtcgttctactctgtggagatggaaacgctttggtgtaaatcgaaaacgacgtgaatttgtaagcaacctttttgagacgaataaggatttgttaaaatcgtttttattgtcaactcaatgcacaaccgcaagaggcgttgttgcttttttcaaaagtactcacaatgtacgattatcaagtaaaacagtgtatcgtttcataaaactcattggttttacaataaaaaggagcaaactccgtggacagtgtaaaggagacttagttccacttgtcaatgaattttgtagtaggtacattttaggtaaatcaatgctgggaaaattttagtatcagttgacgaatgtgggtttagtgagcgtctcaagccacattatgggtattcccctgtaggaaaactactggtgggtgggtacaccacagtttgttgatggcagtttttttagatggtaggaaagagttcgttgtgaagaaaggatctgtgaagaagaaggacttcgttgcatttattgaatcattgagtttgtgcaataactcagtagtaataatggacaatgccagtatccataagaaattggtactcagtcaccccgtcaatatttgttacacacctccttacagtccagaattcaatgctattgagctatgcttcgctaaggtgaagagagactttcgtcgtttgaactatataccgaatgaaacaaagacgcacgtgtctgatatgatttccttagcattcggcaacctcactgataaaattattatgggttgttttgaacacgtttggaacacttatgtgtataaagcagtctgtgacctattgattatgaaagatggctacgaaacctccgacagtcgcgaaattgaaggagctactgaaattggctgaagtaccatactcgtcgaagtcaaacaaggacgatcttgtccgtttgtgcgaagacaatggtctcatcgccagaccccctccagaatacaagacggtggaaaagatgtgtgtcgtgaaatgcgccctaaagaaggcaatgagtcttgacgatgaagaattcggtaagtttagggagcatgtggaccagctcgtcaatgtggtgagccgcatgttacggcggtccagtctggtgctgactttccacatcacgagtctcttagagaagggtctggagattccagacctgtacaacatgaaagatacctactggaaggattggctccgtatcggggtagacggaatcttccctgatgaggaaagcaagatatcgtacgaagctgtgaaggactccatcggcgatgtaattggtaatgacgacgctgactacatcaagtcctatccgatctatttcgatcaggtattgaactatgcaggtcacacattgagcacggtcgtgtcaaacaacgcatgggttcctttgataccacgtctggccagactcacctccaccactttaaataaattaaatgccccgaagacgctggacacatcgaagatcattcggggatacgacgtgatgcaggctattcagcaagaagtccaaaacatggagggatggccagagtctgttcaagagtacgtcaatgaagttagggagatgctgagtgttccagatggaagtcgagtttatgataactatggcaaagacatggactttccgaccatggtccggtttaattattggatacagacacggttggaggatatggatgcacgtcgtatccgattgatgcccatcttcaatgtccaacgggtgcatgttcgccttgacctgaagaccctcgtgaacctgttcaggcacatgttccccaatgaccagaacatcgttgagctttccaagtgggaacatgtaaagaatcccgaaagcttcatgttgccccagaggcctgcacagaagaagaaaaaatcatgtggtcctggtgaatgggaggcatacaagtcggtcctgaagcagtacgatgatgatgttaaggatatcaaggctactgacgagtacagacatgcaaagggtttgtatgacacgcttgtgaacgcccgaaaaacagtcgcaggttccttcttcagaaaaccacctgtcaagaatgggtgggttttcgactgcagcatctgtactgacggagtctctttgagcatgcagtacagcaagacagtacatgtccttgtctcggatttgaagaagacctgtaagaagcctcgtaaagaagaaggtatcaagatcgcagaaaaatacgacggctcacttaaaacgatattgcccgatatgggtatcgtcgtcctgggtgtggacccaggacggagcaacatcgctacggtaacgtatttggcagacgataaaaataagacatggaagctgacacgtggtgcattttaccacaagtcgggtatcaagaagcagacaaggcagaaggaactgcgttttgctgacatgattcctatgtgggagtctctgcgtgaaaatggagcagctttgaggacatcgaggacggataagatctccgcgtacttgtcaaattacgctaagttttctgacgagtggtggagattggctttgcgacgccgagaatcccgtgacaacttgcagcgttacatcggaaaacgaaaggtcaaagactctttctgggcgggtatcaagcggtgcatgatgaaagaacttcctgatatgaaggtttgcgtggcctacggatctgccatcacgaaactgaagcctactggaccgggagaagttgcagttcccactggggccatgttcgcatcgtgtaaaagaattttcaaagaggacgtttctgtgacagatgagttcaaaacgactcttatgtcgtgggagacgggtaaagaaaaagaacgtgtttacaagatcccaagtgtttgttcagcagacgtgaagcttaggttgggtggtgaacgttttggtcacacgaaatcgaaaacgatgccaaaggtcgctgattgcgaccacttaggggtaaggttgtacaataaacgtaaaggcgcacaagagaagcacaggaggggtggcttcgccacttcccttgtcgattctcaaaaatcgatcgagcggtacccagaggtacgaggactgcgattctctccagaaacatgcatttactcggaccgggatcgctcttctgctctcacaatcgcaaggctgcactgcatggaattgatgggtctaggacgacctcttccatttgcccacagcagctctgttgttgttgaataaaaactcgtattgttgtagacaccactcggtccccctccggtggtcgcgacaacattaggttacaccgcaaggtgtgccgtacacgaagcggtacaatcggttcttagttcaaggcaaaaattcttacactttaaaggataatatttggcgtgttcttcgtaatggaagtattttcacgtcattgcgcatcgatgaggtagagaagttctggtggagatatgttcgcccttacggaacgcctggttggtcagaatgcgtggagatcgtttattaaacggcatattcgtgggccgcgaggatgtaaaacgtcacatccgtgcaaccagggaccaagaggatgacatgctccttgtcctcgacacgtgctcggatttgttaatttatgctgacgatagttactgcactgtcacgttcggtcctcgggttaccaaatcaaaagcgatgtcattttgcgcgtcagagatggacatcgatgccctcattgacgagggtgaacgggacgcgcgccgttttgacatacttttatcttgtacgaccaaccgcttcaatgagtgagtgcggtacacggggtggggagggccattgaagcggggaagaacgcggctagaaagataattgtcctcaataggagctcgatgttccttgcaagtgctggtgaagtggttcctcctgtgatctttgtcggaagaaaacggactagaacacgtgtccatgatgccatgggtaacaaagtgacgagtgcgaagacgaggcctgccactaatgatatcatgatcgctccccatggcacactcgtagtagtaggagtattggatttttgaatctgaggcatctttacctctttctgtagatcttgaagagacgcgtcagttggatcatggttgacatggttcatatttccggtattagtggggtagttgttgacatgatccacgcttccgttattattagggtcatacgtagcggtttgttgcaacgcaacttgttgttgttgatgttgattctgcataggttgcataggttgcatattttgcagaggtatgttgggggtgtacattggtggtggaggtgtctgcattttgttgtgttggttattactattattgttgtttgagttgatgaattcgagtgtttcgcggacggtatcttcgtcatcttcgtccaggtctgcgtccttcattttcgtagaatgcgggatgggcatgaacgtcgttgccatcgggttttgttgttggtggtggttgggatggggtggagatgcgttcagcatttggatttgaattgggatacaaaacgattcgtcacgaatcaacgcatgagaaaaaataggaacaacccggttgtcattgcggatagcgtgtggaatacctgcgtatcctttatcgtatcctttaacgtattgtggaatacctgcgtattctttatcgtattgtcgaatacctgcgtattctttatcgtattgtcgaatacctgcgtatcctttatcgtattgtggaatacctgcgtatcctttatcgtattgtcgaatacctgcgtatcctttatcgtattgtcgaatacctgcgtatcctttatcgtattgtggaatacctgcgtatcctttatcgtatcctttatcttattgtcgaatacctgcgtatcctttatcgtattgtggaatacctgcgtatcctttatcgtattgtcgaatacctgcgtatcctttatcgtattgtggaatacctgcgtatcctttatcgtattgtcgaatacctgagtatcctttatcgtattgtggaatacctgcgtatcctttatcgtatcctttgtttttgtataaggcgcgttgttgtacccgatgtgtatgcggaccgcattgtctattatcattgaaacgtacaatgcgaacatggtgactatcgttggggatataacgttcagcttccagaccttttttattatgcgcattgatccaatgtacacgccaactgcgatacatgtagcgacagtttgtatcagggcgatcgctccttgatgtaatgggcgttccttgatgtaattgatctttgatgaaaagaggagcgttgttgcgagtcctgccgttaccacacaaacgtacacgaacagttgttctccaatcatttgacaactacttgtgttttttttgcagtgctctgagcacgagtttctttccaccgccccacacgatacctcttgctccttgaagaaaagatatcgttatgacgaggagacatgtcttgaataggtataacaacacgatgtattgttgttgcgttgctaggaactcgccgatttcatttacttgcacgtgttgatgtttgcaaaacgcgtgcagagccatgaatgcgattcctgctataccggtgattacgtaaggaagaattgtctctgatgttgatcctgctgcaatcatgtttacaattactttacaaaatcgtacatcttactttatcatgtgcacatgaagggtcgcgcgtgattctcttggaccagtatgtcgttaacgcattgtgttgttgtacatttctcgtctaggaatacgcgtgctaggactcgtccgtacttgtcggacttattcggagtgcactctgcccatgcgaagtacgacgacgtaccgtcgttgaaacgcttcttcagtcttccttcatcgaggatgggtgtttccgaacggatcaagagttgcgctagacggttgcgggcatgtcgtcctcttactcgatcttccccgcgcatttccggagtgtcgatgccgaatagacgaaacctgaactttgcaaaacaggcagacgacgcctctaagttcccagatggcacctccgtgatagcggttattgtgtcaccgtcatacacgtcaacgacctttatgagaacgcggcctgtgagcgcgaagtaatcgcaattgtttgaccaaagcgattccattttgtacaaatgtttactttagatacatttataaaatactttatactttacattcaacgaaatactaaaatgaaacctaagaaatccacggggcagtggaacaccaatacgattttgaatcaacaaattgcaagatgttaacgagaatatcgtttttttttttagtattgaaggaccagcctcacttataagcgatcgcctcttccccggtaccgtggccaaaaataacaccgtgtattgggatgtttcattttaatgttccacagactgtagatacatttacacatgttcgcgattcccaagtatgtgatcctatcagttgtggccgccatgttatggggttcttcgcatgtcatcgacaaactcgccctgtctcacatgcctcctatctccgtaactatactcaaatatattggttgtttatttgtatcgttggttgcatttgcactattttttagtaattgtgtgaagtctctcagaaaaaataactcttcagagaataatattggcgttgtccgcatcccctcgcgcggtgtcgtattgtctttgatatcaggggtggtaggtgccataggtatgttcatgtttgtgaatgctctcctactgagctccgaaccccatctcgtctcatccatcgtgagcatcgtgccagtattcagtctgatcattgggttcttatttatcaaaggagtgcgcataagattaaaacaagtgattgcgatgatggtcattctagcaggggtggtgatgctggcgacctattcctgagaaatttaaaaaagtccgcttggaggcaggaaattttaaaaaaatcgccgagaggttgcaacgcccatttcatgtttaaattgcgtataaggattttcttctctcaatgataaacccaacatggctcctgtatatgccaaccatgcgtactcgtccgctcgagcgaaggaactgtacatagccttctaccatgatgccaagaccattttgcgaacgataacgaatgacgttcctcagatggctgcggaactaagcatcgttctcgctttgatgaaggtgttgaagaaggtgaatgttcgcttgccgttcaagtactactatgttatgatggagggtcccttcggggaccatttgcgcacgtgtgacaataaattcttcatggaggacccgcgtttcgctatcgatggatacgatgcgctgacgcaactcatccgcaagcagttgaatcttgtagacagtgagtacgtgtactccatttttgtatcgttatccaagttgtcggctcgatgcaatgatatcatcgagcataagaaactcaagtacgataactggaagccgcgggtagatatggaacagttggaagagaaccaccagtagaactacactcaaaatattgttttattgtacacattttacactcgacggaatactaaaatgtagcaacccaagggaacaccatcatgtttctttgtagcccatcaacaacacgcatccctgcaaaatggaagcggtctcccttgacccaacagttccatgcagtgcagccttgcgattgtgagagcagagtagtgtctccaccgccccgtccgtggtcgcgacaacaggtcttcggagccggcaatcaaggggtttctgcatacagttgttctaaaatatttctgaaatgtccatatctttatacgttaaaaaaagagaatgcaaatccgaatgacacgcctgtgacgactgagatcgtcattgcgttgcgcaggatggacaccatttctttatttttcccctcttctggagagtaggaaagtgtaaataccgctgtcactcctacggctagtactagaaactttctgaagaattcgaacgtcgtccacgaatcgtgtccgatagtgagccaacggatatttgtatatttctgatcgattttaccaaggacaaagctgataacggctactatcccgatctgcaaagcggctatgattactttaatgttctttatgttcgttttgggtaagacgtactttgcgagggaaaacattaaatgaataggcaagatcatagcacccacgaaccacggtacggcacggatgtctatgggactgggtacaatccatggaatcttacaaaagatattgtacaccaaagattggggtttcgatagaactatggacaatgccatagccggtgtttggcgtaaccgcctgaacacagaggccacatggcacttgttcgtgtccagtacgaacgatacaacgtaaatgaaggcagatatgcacaacactttaaatgaaaaccactctgcatcctccaggattctcgaaacttttttcttatcatccttgtggtaaacgtggatgactatatatagtagaacgattgcaatacatagtatcaggatggcatataactccatggcgtatgtgttattacaacgcgccataagatttaggcaacggcgaccggcttgtctgcaggttgttggtgctgccccttaataacggtgaaatgggggttgatgtacctctgcatgttgaagtagttaagaatcacgtcgtcttcgatattcagcagagccttcagctttgcgtcgggtacgataatgcgtccatcatttggagactgtaacttgttctccttgatatataggttcaacccctgtacgacatctttcctggagacctgattatcgaccgaaagacccaggaactgtgccatagactctgacattgagcctagggcgaccttgcgaggaacggtgctgcttggcgaagccttcttcttgcgtccgcttgaaatagaagcactgtgcaccttgcagatgcgcacatactccttttgcaggatcttggtaatagcgacggcgtccttcataacaatcgagatgctggcgatcttgtcggcgagctcacccaacttagatgtcatgacatccacctcagcgactgaggttgaggttgagggggtcacggtctccgtagttgtaatggtctctgcagtggtctccgcagtggtctcaggaatggtaacaggaatggtaacaggaatggtaacaggtggtgtggtggtagacgatgatgtggcaatgtcgccctttttgatatttgccatcttggtgactttcttgacgttgttggagttggagttggatgtggtggtggccattgcgttttcttttttgtttgggtagatgaagtattgcagaggaatttctttataccacttttcgggtgttgtcgggtcctgttttcataatgacgggatgaagtcccacctgacatcctcgcaaatttttttccatatctggtcttgttggtagagtttctctctggacttcagcagggggaagttcacgagatattgatccttctctagaagctgcatcatcttgtgtaggcagtacgagtacgacaagaagttctttctctttgggggctggtacttaaggaacgggatttggatggcgcagaacatacatcgtaccttgtcttccaggtcggggggcatgtggatagtggggattccgttaaggcggtgcattatgtgcgggatgtgttcgtagtacttgttgctatcgatcttcttgagtatagctcggatccgtttaggtgtcagtgtggccatgttcgtgatcttctgcttttttatctccatgatgatgttcatgaacacgtcctcggggatctccgttgtctccttcccctgaacctggttaagccactcgttcaagtgattgatgcgtttgtaggcaaagcacgcggcatccttgggagggtccttgtatgtcggtttgtcgtgatcgatcaatatgtattcgacggatctacactgcatgcacacgatgcacccgtcctgcatattcagcatgtgctgggtcgattcgcagtgagggcacacgcgatcaactcctgaggttccaaatgctcgtgtactatcatcctgttgaaccgtaggggtgcgcatagggccgtcatcgtaggctatcgctatgtatcggtccaataaggtagcacggtctgtgtcgttgggggaaatttggttgacgcgccctcgtgactcgatatggatggtgatgaggagactggtgaaatattgtgcgaataagaaagtgatgtcgctgtcgaaatcgatgttaaagatgcggatgtcgaaatcgtcgatgttggtgacgaggatgatccgaccttccccaaaaagtacgtcaaaataccagatgtagatgacgagtacgaattgagtgacgacgacggcgacgacacaaccgtgcttgtatccgatttctttggaaattgactctcaagaacgtcgttcccatcttttttggagtcgttcttgttcgagtcgatgatttcgtagtatttgtatagaatgtctcctgtgcggagaaagtagtcgttctcgtcaccactgttttgcaagtatttgacttgttgacgggtggtgtgcagacggtcggacagcgtcgcgaaacgctcgaaatcgtggtctgcccatgcgctcctcggcgtgttctccgtcattttatttagttcgctttggatgcaatcttggtcggaacgcattgacgcaagttgcgattgtttcatgcgcatgtgaccaagatgttttgtgtgcctagcatcaagggtcctctttacgtccacggatgatgatgatgcagaggaagaaataccgtgaatgttgcgtccgggcttgacatttttgtaggtacacgaagcaatgttgctattcgtgcggtggatgtcagaagtcatcacacagagcacatacagtataaaaaaaaatgtgcttatgcattattttggtcctttttaaacttagtggttggtaggagatcattgcaacaatgaacaatgtaagacgaaatgctatcgtgttgagaggtacagcgcctcgtatagaagctgacgccgcatctcttaacattattgtagcccaacacgacaacacattggtaggcagtaacatcagcagcaacattgattacaacaacaacactgcatctttcgtcttctcccgagggagcaatgtgacctacctcatagagagtcaatctaatgacggagttcacgtctgtgtcacagacctgaagtcgtctgaactcgggcctaccacatggccacgagcggatccttacatgtccttcaggactacatatgaccaagaggtcatgcgcattaacgcaggtgggctcaaatgcacgacgttcaacgccgacgtttacgcatccctatcgagctcattcaacagcgctaacgtgttccgccctcctagcgagtacgcgctatcggaagcctacatcaccctatcaaacatggtcgtcaaacgaacggtatcactttcaagcaacgctgttctggatgacttatcgattgtggactcttacatttcagaatctgtattggaggcgcctactgcatccgcccttagaggcgcctactactcgctcagcaaccaaatggctttgaacttcgctcatcaagccatcgctatgaaactcgactccaatctatttgaagctgcgtcgtcgatccctccgttccctgccgacggatatgtggctgacatcaaccgacgtgcaacccgcgtttccgattcgacaatgacggaagcacatggatagcgacctcgtccaacttgacatttttcgacaacgtgatgcagagacagatcgcaacactgtcaagcgacggctctctttttctgagaaaggacgcgaatttttgcggcgacctcacagtcgaagggggcgttagtctggggtcggatgtcgtcatcacacacgatggagcaacgtaggtgtcaacatgccgcacgggactgtgccggacatagcacgttccacgttaacggaagcgtattctctacgcaacaaattttcgcattgtccgacagacgtgttaagactgatatcaagcggatagatgacccattggatattgtagaagcgatcaaagggtacacgttcaaaatgaacggaaaacgcgtggtgggtgtcatcgcgaggaggtaaacactgtcatgcctgaagccgtctcgatggtcaataacggtaaggatgactcatgtccgtactcatacgacggttctcgtcggggtccttttcgaggcagtgaagaaactgtcattggatgtgcaggagctaggtgtcaaagattgtcacaagactctacgacactgccacaagactctacgacgttgtcacatgacctacgaagccggcttatgttcgttgcttgaatcggtaataccgttgtgtgtgtttgtgttgtttagtctcatgttcatattggtgtgtctgaggaatcaagttacgggacttgtgaagaacattcggttgttggacactttgtgttgttgttgttgtgttctgtgtatagttgagttgttagcagagttggtgggtacatcgtacttctcaaatgtcttaattatttcagtgaggtacgcgagcgaggactgcagctagcgatggcgcattcgacacgaaatagttgttgctgatggctatgaagttgatgttgcaacctggcgtctgaattcctctggaaaaccgtaagtggggtgctacattgagattgactgtctcggatggagattgtgatctgctacgcttggagacgcgcggttaaacgcgtactcccatgatgcaggttcgggtacatggtacatgtttacaaaagcacacaannnnnnnnnnnnnnnnnnnnnnnnnnnnnnnnnnnnnnnnnnnnnnnnnnnnnnnnnnnnnnnnnnnnnnnnnnnnnnnnnnnnnnnnnnnnnnnnnnnnnnnnnnnnnnnnnnnnnnnnnnnnnnnnnnnnnnnnnnnnnnnnnnnnnnnnnnnnnnnnnnnnnnnnnnnnnnnnnnnnnnnnnnnnnnnnnnnnnnnnnnnnnnnnnnnnnnnnnnnnnnnnnnnnnnnnnnnnnnnnnnnnnnnnnnnnnnnnnnnnnnnnnnnnnnnnnnnnnnnnnnnnnnnnnnnnnnnnnnnnnnnnnnnnnnnnnnnnnnnnnnnnnnnnnnnnnnnnnnnnnnnnnnnnnnnnnnnnnnnnnnnnnnnnnnnnnnnnnnnnnnnnnnnnnnnnnnnnnnnnnnnnnnnnnn

SEQ ID NO: 199 - DNA, 22379 bp, unidentified
  misc_feature 1..22379: note = Fanzor polypeptide
  source 1..22379: mol_type = other DNA
cattcaaatccatgaccgtgccgaacgcgatcatccccccccaacacaggaagagagcagccgaaaacaaaagcgagtgccaccatttttgggacacagggggctcaggcgattccgaaacaaccgcgactacagtgcccatcgtcagatttgtcaatcatacagctacaatacagctacagggacattttacagtcggagacgcaatttgtgggacaccctaccggtgacccttgaacctgctcgtaccgcttgcgcatcgagtacgagtaaaaaagaatctaactggcaacttgaatgcgaatacgatcaagcttggggataagtggacttaaagcggcgtgggtgacaaacatggcaatgacgactggttgcgactattcaataaagatgggactggatactacgggggtctggctgccgggctacgcaactcaacggtcccacgtccacgagagacatcaacgccaacggaaatgtgaatgtaacaggcaaattgaatgcgaatccgaatggaagaacagggaactcgaccactttttcgttcctgtaattcaagggtcaccggtaagggtgtcccataaattatgtctctgactgtaatattacgaacacatttcccatggaaatgaaagacatgctatcatcgtcatcttctcgctcggtctcagacgttgtggttgcttggtacaacgaaccgggggtggaacgatgggtatccgcgctggcttttgcgttttcggagcgtcctgcaggcgagcggtaccggatattcgtgttccacaagggtagtactgccgaagatgcaaagcaacgtttgttcgatgtattgggtacaaagtgtagtgatgtcgatgtctttttcgagcatctggataatgtgggtcgtgaggcagatacgtggttgcattacacggtggcgcgtttgcgtgctggcgacatgcctgtgaaccgtgtggccttcttgcagggtgatccttgggaccattttgggacgccgcatggtggcagggagaggaatctagatgtgttttcatcaaagcttgtgacattgcttgcgcctaccgctcatccgatggcatcgaaccctgagccattgttttgcaacctgatgagcgagtcgcgtgtcatgcggagagggctctcgcaccctcaacgtctggaccttgagcgggtttgggttgaggccttcggatgcgaatgtaaggtggacagttatgtgttcgctgcgggggcgcagtaccttgtggacgccatgcgcctttctcaagaaaagccattgtcttggtggacgtcccttcatcataaattgcgtgctgacgagatcaatgcttgggagatcgagcggttttggttgcatatttttggtgatggtgtataaaaacaaaatgcatgcttggaataagcatttcactccgctacagcatacagctagggacatttgattgtgggacaccttttattttgaaaagttgattatgggtataaggaaatgtgagtgaaatgttgtatcaccatgagaagaataagtagtgtcagacaaaggagagggggctaaaacgtttgagaagcagaagatggttgtaaataacgtcaaggtccactaagtactgcactgtcacaacagtgtcaaaagcgcatccaatgtggctatagtgcaacctggaacctagacgtgaactttgctgaaccttcttctgcttctgataacgtggagcgaccggatgtattctgtgttccctcgcccccccccctaaaaccccagcttccggagaggcaaatgtgagcgctcaaccaaccgacccacctgggtcagttagcagcttacaattgttatcctctgggccagcttaaatgctgaaatacgggatgaaggacacgaaggattgggaccttgatacaaaacctttagctgacctacccaatcaattgggttcaagggtcaccggtaagggtgtcccacaaattctgtctctgactgtatacattacttgtgtcgtacactcggacaagggaattatgttacataatatgccgagtcccccaaaatcctcttgtatgtgtttatcttctacacttcgctcgacactgcgttctgtaaggaacctgtcagattgtaatcaattgtgcgtcctaccacaacttccagttttcaatatttctttggcctcgcaagaattccggggcgggttgggtacattgtaaagcaattaatgggcgttcctgcctcccggccgattttgactggctgcgaaacatggtatggagaggaattgtgattccttggtgatgatgtctcaagctagagagtcgttcaggaggctctaaatcctgattagaaatttaaaaaaatcggccgggaggcaggaacgcccattaattgtggatgttaatggatcgttcagatgaagaggacacagaatggaaacatacaaaaaatgatttgttcgcgtttacattttcctggtaattgttttttcactgctggagacggccaaattgcaggcaaaagctatgtaaccaagttaagttcaagaaccactcttacaaaacctacagtcaatcttatttaagtacctatcactaaaatttaaattttctctattatttcgttcgtgttctgggcccgtgaaagagatcaggaattgcctttcacgtcgtcagaatgttctgttcaaaaacgtcgacgaacgcaacacttcttgtacttgccacggctgcttccagaagctcgtcaacatgaaggcagacagcgtcgtctggcgcagagttcaaaacgagccctccgccctcatcgacggggctcctacaacaacaacgattgagaagcagaagacggtggtgaagaacgtcaaggtccacaaagtactgcactgtgttgcaacagtgtcaaaagcgcatcatccaatgtgcgctgtggtgcaacctggaaccgagacgtgaacgctgccaagaatcttcttctgcttctgacgacgtggatggacgggaaagagcgaccagcggcattttgtgtgccctcctcatcgcccaccccaaaaaccacagtttccggcgtcttcgccaccggcgtctggccttgccgagtcaaacccgaagggtgattcgtcatcatcatagttctccggcaaatcttctgtttctggatcaaacacccggagtgaagtgtcgacttcgcgcgtgatactttgaagtcccgaccgccgcatgtgctcaaggcactggttgacgaggagatgggacatgtgcgcagattccaactttgcgaagtaattgactttgtagcacactgcgtccttcttgtatgcaattttcacagagttagacatcttggtcatgaagtcatcgcatacgccaggctcgaacaggtgttcgtgcatgacgtgcgccactgcggtatgaacaaatatcgtagacgtccgcccgcaaaagtgatagtcgagttcatccagaacgcacaagactacaccacaaatcgtcttggcaatcatgtgtgcacgtctagtgtcgatgccgtcgatgagcggttgtgccacttcgtgaagcatagtcttgacttcttcaatcacaatcctcttgagatgcgagctcccctcctccttgaacaacgcaggtgagagatcatccttcatcttgttcattcctttgtcctcagtattgcgaaaaacatacttcttcaagttgagtcgatgcgtagatgatgtcatctatctaaaattactatgagtcttctgtgaaagacaacctatttatactatttttcttgttgtccggggtttagggtttatttttaaatgcgggttgggggggcgcccaatgaatgcacatcccatcgaatacagtcagagacagaatttatgtgaccttaccggtgatgggtaggttgatgcagaagtaagacacaacgcatgtcatcaagcaatcgtgatctccacattcgatcgcgatgacgttgaaccaatggaagtgaagattgcgcgcgtgttcatcgacgaggctgatacaatctccgcctgtactgtcgctagggacgccggcttccactggtacgttacctccgacacaatttaagtacctatcactacatgtatcaagttgtacatagagaattgtaattgattcaatatactgtaacattattgaccggtctgagtgtaacatcaaacgaataccattaaaagatgatggcgctgtagaacattcaaaaaatccgcagtgaggcaggaacacacattctgtaccgcttgcagataccgccaggcaagtgcaaccaagggtttacagggtttatcccaactcagtatttatttataccatcctgtgcgcttgcatgcatgtataatcgaacatgcattcgcacacgcgatcatcgtttccactcctaacgtgtccctatgacattcttgatcgtattgccctattctcttccaacccaaagattgtattagtttgtaaaactctgcacaacagattttcgggatggccccttaccggattgatccaaccaccacagagaattggagagatgatggcgaaaggggggcgcgccgaccttctagcagtatgcttggtgtccaatcctattgtacagcttaagggggccctacaattgagggcgaaccaaaatgaaaacaagcttctctatgtggctgctaaggaaggtcacgcagatgtctgcaagctgctgatggatccagaggtggctggaattgagttcagggccagggcgaactctagcgacagctgggcattgtgggcggctgcaaacgaaggtcacgcagatgtatgcaagctgctgatggatccagaggtggctggaattgagtatagggcccgggcgaacactagcgacagctgggtcttgtgggcggctgccaaggaaggtcacgcagatgtctgcaagctgctcatggatccagcggtcgctggactggagttcagggcccgggcgacctctagagacagctgggcattgtgggcggctaccaaggcaggtcacgcagatgtctgcaagctgctcatggatccagaggtggctggaattgagttcagggccagggcgaacactttcgacagcagggcattgtgggcggctgccaaggcaggtcacgcagatgtctgcaagctgctgatggatccagaggtggctggaattgagttcagggccagggcgaactctaacgacagcagtgccttgtgggcggctgcaaaggaaggtcacgcagatgtctgcaagctgctgatggatccagctgtggctggaattgagttcagggcccgggcaaactctagcgacagcagggtcttggtggcggctgccaaggaaggtcacgcagatgtctgcaagctgctcatggatccagaggtggctggaattgagttcagggcccgggcgaactttagcgacagcagggccttggtggaggctgccaaggcaggtcacgcagatgtctgcaagctgctgatggatccagcattggctggacttaagtacagggcccgggcgagccatatcaacagcagggccttgggggcggctgcggccaatgcaggccacgcagatgtctgcaagctgctgatggatccagcagtggctggactcaagtacagggcccgggcgaacgctagcgacagctgggccttgtgggcggctgccaaggaaggccacgcagatgtctgcaagctgctgatggatccagcagtggctggaattgagttcagggccagggcgaactctagagacagccgggcattgtgggcggctgcaaaggaaggtcacgcagatgtctgcaagctgctcatggatccagaggttgctggacttgagttcagggccaggccgaactctaacgacagcagggcattgtgggcggctgcaaaggaaggtcacgccgatgtctgcaagctgctaatggatccggcggtggctggaattgagttcagggccagggagaactctaacaacagcagggctttgtgggcggctgcaaaggaaggtcacgcagatgtctgcaagctgctcatggatccggcggtggctggaattgagttcagggccagggcgaactctaacgacagcagggctttgtgggcggctgcaaaggaaggtcacgcagatgtctgcaagctgctcatggatccagaggcggctggcttgccaccttagagcaagtatttatccactctcctcaaacttttcagcaatgtgttcagtttgctaaagcgaaaatatatcgctgcgtgtgcccaattattccagataaatatttgattatgaggcaggaactctttaaaaatgattattgattcgcacgatgtgagccagcactttgacttttcaggctactttgaagatgtaacttctatatctttacagtccttgaatgtttctctcctgaagacaatatctgttgtattgacaagatcggttacaaaacttgatgaaacttgtcaatttgcaccagtacatttgttcctgcctcccggatggattttgactggtttcggagccttgtctggtcggaatcgcaattccgaggagagctaaatatctagttggcgagtgagtgagtcgttcgtacggctctaacttctgcttggaaaaatcaaaaaaatcgccgggagacaggaacacccattctgtaccgcttgcagataccgccaggcaagtgccgcttgcatgccaggcaagtgcaaccaagggtttatagggtttatcccaactcattgtttatttataccatcctgtgcgcttgtttgtacacacatgttcatcgaacatgcattcgcacacgcgatcattcctaacgtcggttccccatgacattcttgatcgtattgccctattctcttccaacccaaagattgtattagtgtgcaaaactatgcgcaacagattttcaggattgccccttgcccgactgatccaaccaccacagagaattggagagatgatggcgaaaggggggcgagccgaccttctagcattatgcttggtgtccaatcctcttgtacaggttaagggggccctacaatttagggcgaaccaaaatgaaagcaagcttctccatgtggctgccatggcaggtcacgcagatgtctgcaagctgctcatggatccagaggtggctggacttgagtacagggcccgggcgaacaatgacaacagcagggccttgcgggaggctgcacaggaaggccacgcagatgtctgcaagctgctcatggatccagcggtggctggacttgagttcagggccagggcgaactctagctccagcagggccttgtgggcggctgcctatggaggtcacgcagatgtctgcaagctgctgatggatccagctgtggctggacttgagttcagggcccaggcgaactatggcgacagctgggcattgtctcaggctgcctatgcaggtcacgcagatgtctgcaagctgctcatggatccagaggtggctggaattgagttcagggcccgggcgaactctagatacagcagggccttgggggcggctgcccatgcaggtcacgcagatgtctgcaagatgctgatggatccagcggtggctggacttgagttcagggccagggcgaactctagcgacagcatggcattgtgggaggctgccaaggaaggtcacgtagatgtctgcaagctgctcatggatccagaggtggctggaattgagttcagggccagggctaactccagcgacagcagggccttgcttgcggctgcacaggaaggtcacgcagatgtctgcaagctgctgatggatccagtggtggctggaattgagtacagggccagggctaactccagcgacagcagggccttgtgggcggctgcaaagaaaggtcacgcagatgtttgcaagcttctgatggatccagcggtggctggaattgagtttagggccagggcgaacaatctcaacagcagggccttgcgtgaggctgcacaggaaggtcaagcagatgtctgcaagctgctcatgaatccagaggtggctggactcaaattcagggccagggcgagccatatcaacagcagggcattgtgggcggctgccaaggcaggtcacgccgatgtctgcaagctgctcatggatccagaggttgctggaattgagttcagggcccgggcgaactctagcgacagcagggcattgtgggcggctgccaaggcaggtcacgccgatgtctgcaagctgctgatggatccagaggtgactggaattgagttcagggcccgggcgaactctgtcgacagcagggccttgatggcggctgccaaggcaggtcacgcagatgtctgcaagctgctgatagatccagcggtggccggaattgagttcagggcccgggcgaactctgtcgacagcagggccttgagggcggctgccaaggcaggtcacgcagatgtatgcaagctgctcatgtgatccagcggtagctgtccccgagtttagggccattgtgaaacttgaaagcaactgggtcttgtgttaggcaagacacgtttcttgccaccgtagagcaagtatttatttactctcctcaaacttttcagaaatgtgttcagtttgctcaatcgaaaatatcgctgcgtgttcccaataattccagatgtagcataaatattatttgattatgaggcaggaactctttgaaaatgattattgatgcgcacgatgtgagccagcactttgactttgcaggctactttgaagatgtaacttctacagtcggcggaacaataaaatgaaacatatatcagatggaaataaatgtacgacatcgccgttagaaaattggcgttaagaatggtcgctgacttgggtgtgttaaaatcttctgtgtttacgaacatcagtcgttctactctgtggaggtggaaacgctttggtgtaaatcgaaaacgacgtgaatttgtaagcaacctttttgagacgaataaggatttgttaaaatcgtttttattgtcaacttaatgcacaaccgcaagaggcgttgttgcttttttcaaacgtactcacaatgtacgattatcaactaaaacagtgtatcgtttcataaaactcattggttttacaagaaaaaggagcaaactccgtggacagtgcaaaggggacttagttccacttgtcaatgaattttgtagtaggtacaaggagacaatcaatgctgggaaaattttagtatcagttgacgaatgtgggtttagtgagcgtctcaagccacattatgggtattcccctgtaggaaaacctgttatcgttaaaactactggtgggtgggtacaccacagtttgttgatggcagttttttcagatggtaggaaagagttcgttgtgaagaaaggatctgtgaagaagacggacttcgttgcatttattgaatcattgagtttgtgcaataattcagtagcaataatggacaaagccagtatccataagaaattggtcctcagtcaccccgtcaatatttgttacacacctccttacagtccagaattcaatgctacagtcggcggaacagtaaaatgaaacatatatcagatggaaataaatgtacgacatcgccgttagaaaattggcgttaagaatggtcgctgattacaagacatcggatttctttaatcttagcgatgggtgcgtagaaagaacaggctttgcgttgttgcaatagattcaaatctttgataaatcacatggcaacttttgacaagaaaaataataggttacaccgcaaggtgtgccgtacacgaagcggtttcatttaagtattccgttgactgtattgagctatccttcgctaaggtgaagagagactttcgtcgtttgaactacataccgaatgaaacaaagacgcacgtgtctgatatgatttccttagcattcggcaacctcactaataaaattattatgggttgttttgaacacgtttggaacacttatgtgtataaagcggtctgtgacgtattgattatgaaagatggcgacgaaacctccaacagtcgcgaaattgaaggagctactgaaattggctgaagtaccatactcgtcgaagtccaacaaggacgatcttgtccgtttatgcgaagacaatggtctcatcgccagaccccctccagaatacaagacggtggaaaagatgtgtgtagtgaaatgcgccctgaagaaggcaatgagtcttgacgatgaagaattcggtaagtttagggagcatgtggaccagctcgtcaatgtggtgagccgcatgttacggcggtccagtctggtgctgactttccacatcacgagtctattagagaaaggtctggatattccagacctgtacaacatgaaagatacctactggaaggattggctacgtatcggggtagacggaatcttccctgatgaggaaagcaagatatcgtacgaagctgtgaaggactccatcggcgatgtaattggtaatgacgacgctgactacatcaagtcttatccgatctatttcgatcaggtattgaactatgcaggtcacacattgagcactgtcgtgtcaaacaacgcatgggttcctttgataccacgtctggccagactcacttccaccactttaaataaattaaattccccgaagacgctggacacatcgaagatcattcggggatacgacgtgatgcaggctattcagcaagaagtccaaaacatggagggatggccagagtctgttcaagagtacgtcaatgaagttagggagatgctgagtgttccagatggaagtcgagtttatgataactatggcaaagacatggactttccgaccatggtccggtttaattattggatacagacacggttggaggatatggatgcacgtcgtatccgattgatgcccatcttcaatgtccaacgggtgcatgttcgccttgacctgaagaccctcgtgaacctgttcaggcacatgttccccaatgaccagaacatcgttgagctttccaagtgggaacatgtaaagaatcccgacagcttcatgttgccccagaggcctgcacagaagaagaaaaaatcatgtggtcctggtgaatgggaggcatacaagtcggtcctgaagcagtacgatgatgatgttaaggatatcaaggctactgacgggtacagacatgcaaagggtttgtatgacacgcttgtgaatgcccgaaaaacagtcgcaggttccttcttcagaaaaccacctgtcaagaatgggtgggttttcgactgcagcatctgtactgacggagtctctttgagcatgcagtacagcaagacagtacaggtccttgtctcagatttgaagaagacctgtaagaagcctcgtaaagaagaaggtatcaagatcgcagaaaaatacgacggctcacttaaaacgatattgcccgatatgggtatcgtcgtcctgggtgtggacccaggacggagcaacatcgctacggtaacgtatttggcagacgataaaaataagacatggaagctgacacgtggtgcattttaccacaagtcgggtatcaagaagcagacaaggcagaaggaactgcgttttgctgacatgattcctatgtgggagtctctgcgtgaaaatggagcagctttgagtacatcgaggacggataagatctccgcgtacttgtcaaattacgctaagttttctgacgagtggtggagattggctttgcgacgccgagaatcccgtgacaacttgcagcgttacatcggaaaacgaaaggtcaaagactctttctgggcgggtatcaagcggtgcatgatgaaagaacttcctgatatgaaggtttgcgtggcctacggatctgccatcacgaaactgaagcctactggaccgggagaagttgcagttcccactggggccatgttcgcatcgtgtaaaagaattttcaaagaggacgtttctgtgacagatgagttcaaaacgactcttatgtcgtgggagacgggtaaagaaaaagaacgtgtttacaagatcccaagtgtttgttcagcagacgtgaagcttaggttgggtggtgaacgttttagtcacacgaaatcgaaaacgatgccaaaggtcgctgattgcgaccacttaggggtaaggttgtacaataaacgtaaaggcgcacaagagaagcacaggaggggtggcttcgccacttcccttgtcgattctcaaaaatcgatcgagcggtacccagaggtacgaggactgcgattctctccagaaacatgcatttactcggaccgggatcgctcttctgctctcacaatcgcaaggctgcactgcatggaattgatgggtctaggacgacctcttccatttgcccacagcagctctgttgttgttgatgaataaaaactcgtattgttgtagacaccactcggtccccctccggtggtcgcgacaacattaggttacaccgcaaggtgtaccgtacactcaagaaagcggtttcattttagtattccgtcgagtgtatgtctttacagatcggttacaaaccttgatgaaacttgaagaaacgtaagaaagaaagacaatttgcaccagtacatttgttcatgcctcccggatggattttgactggtttcgaagcctggtctggtcggaatcgcaattccgcggagagctaaatctctggttggcgagtgagtgagtcgttcgtacggctctaacttctgctttgaaaaatcaaaaaaatcgccgggagacagaaacacccgttctgtaccgcttgcagataccgccaggcaagtgccgcttgtcgcttgcatgccaggcaagtgcaatcaagggtttatagggtttatcccaactcagtatttatttataccatcctgtgcgcttgtttgtacacacatgttcattgaacatgcattcgcacacgcgatcattcctaacgtcggttccccatgacattcttgatcgtattgccttattatcttccaacccaaagattgtataagtgtgcaaaactatgcgcaacagattttcaggattgccccttgcccgactgatccaaccaccacagagagttggagagatgatggcgaaaggggggcgagccgaccttctagcagtatgcttggtgtccaatcctcttgtacaggttaagggggccctacaactgagggcgaaccaaaatgaaagcaagcttctccatgtggctgccaaggcaggtaacgcagatgtctgcaagctgctgatagatccagcggtgaccggaattgagttcagggcccgggcgaactctagcgacagcagggccttggtggcggctgccaaagcaggtcacgcagatgtctgcaagctgctcatggatccagctgtggctggacttgagttcagggccagggcgaacaatgacaacagcagggtgttgtgtgaggctgcctatggaggtcactcagatgtctgcaagctgctgatggatccagctgtggctggacttgagttcagggcccgggcgaactctagagacagctgggccttgtgggaggctgcctatggaggtcacgcagatgtatgcaagctgctgatggatccagcggtggctggacttgagttcagggccagggctaactctaacgacagcagggctttgtgggcggctgccaaggaaggtcacgcagatgtctgcaagctgctgatggatccatcggtggctggacttgagtacagggccagggcgaactctagcgatagcagggccttgcttgcggctgcccatgtaggtcacgcagatgtctgcaagctgctcatggatccagaggtggcaagacttgagttcagggcccgggcgaactctagagacagctgggccttgttgtatgctgccattaaaggtcacgcatatgtttgcaagcttctgatggatccagcggtggctggaattgagttcagggccagggcgaaacatctcaacagcaaggccttgcgtgaggctgcacaggaaggtcacgcagatgtctgcaagctgctcatgaatccagaggtggctggactaaagttcagggccagggcgagccatatcaacagcagtgcattgtgggcggctgccaaggcaggtcacgcagatgtctgcaagctgctcatggatccagaggttgctggaattgagttcagggcccgggcgaactctagcgacagcagggcattgtgggcggctgccaaggcaggtcacgccgatgtctgcaagctgctgatggatccagaggtgaccagaattgagttcagggcccgggcgaactctgtcgacagcagggccttgagggcggctgccaaggcaggtcacgcagatgtctgcaagctgctcatggatccagcggtgactggacttgagttcagggcccgggcgaactctgtcgacagcagggccttgagggcggctgccaaggcaggtcacacagatgtctgcaagctgctcatgtgatccagcggtggctgtccccgagttctgggccattgtgtaactgttacactcgacggaatattaaaatgaaaccgctttctgtagtgtacggtacaccttatggtgtagcaacccacggggcagtggaacaccatcatgtttttttgtagcccatcaacaacacgcatccctgcaaaatggaagcggtctcccttgacccaacagttccatgcagtgcagccttgcgattgtgagagcagaggagcggtcccggtccgagtaagtgctggtttctacagagaatcgcaattccgcggagagctaaatctctggttggcgagtgagtgagtcgttcgtacggctctaacttctgctttgaaaattcaaaaaaatcgccgggagacaggaacacccattctgtaccgcttgcatataccgccaggaaagtgcagcttgcatgccaagcaagggatttatagggtttatagggtttatcccaactcagtatttatttataccatcctgtgcgcttgtttgtacacacatgttcatcgaacatgcattcgcccacgcgatcattcctaacgtttccccatgacattcttgatcgtattgcccttttctcttccaaccccaagattgtattagtgtgtaaaaatctgcacaacagattttctggatggcccattaccgtactgatccgaccaccacagcgagttggagagatgatggcgaaaggggggcgcaccgaccttctagaagaatgcttggtgtccaatcctcttgtacaggttaagggggccctacaattgagggcgaaccaaaatgaaaacaagcttctctatgtggctgccaaggcaggtcacgcagatgtctgcaagctgctcatggatccagaggtggctggacttgagttcagggccagggcgaactctaacgacagttgggcattgcgggtggctgcacaggaaggtcacgcatatgtctgcaagctgctcatggatccagaggtggctggaattgagttcagggccagggcgaactctagagacagcagggcattgtgggcggctgcgaaggacggtcacgcagatgtctgcaagctgctgatggatccagcagtggctggacttgagttcagggcccgggcgaactatggcgacagctgggccttgtgggaggctgccaatgaaggtcacgcagatgtctgcaagctgctgatggatccagcagtggctggacttgagttcagggcccgggctaactctagagacagcagggcattgtgggcggctgcgaagggcggtcacgcagatgtctgcaaactgcttatggatacaaaggtggctggacttgagtttagggccctggcgaactctaacgacagctgggccttgtgggaggctgcaaaggcaagtcacgcagatgtctgcaagctgctcatggatccagaggtggctggaattgagttcagggccagggcgaactctagagacagctgggcattgcgggtggctgcacaggcaggtcacgcagatgtctgcaagctgctgatggatctagaggtggctggaattgagttcagggcccgggcgaactctagcgacagcagggccttgtgggcggctgcgaaggacggtcacgcagatctctgcaatctgctcatggatccattggtggctgggcttgagttcagggccttggcgaactctagcgacagcatggcattgtgggaggctgccaaggaaggtcacgcagatgtctgcaagctactgatggatccagaggtggctggaattgagttcagggcccgggcgaactctagcgacagcagggccttgtgggtggctgcacaggaaggtcacgcagatgtctgcaagctgctgatggatccatcggtgactggacttgagttcagagccctggcgaactctagagacagctgggcattgtctctggcttccaaggaaggtcatgcagatgtctgcaagctgctgatggatacagcggtggctggacttgagttcagagccctggcaaactctagcaacagctgggccttgcgtgaggctgcaaaagaaggtcacgtagatgtatgcaagctgctcatggatccagcggtggctggaattgagttcagggcctgggcgaattctagcgacagctgggcattgtgggtggctgcacaggaaggtcatgcagatgtctgcaagctgctgatggatccagaggtggctggaattgagttcagggcccgggcgaactctagcgacagcagggcgctggctgccagggcaggtcacgcagatgtctgcgtgctgctgatggatccagaggtgtctggaattgagttcagggcccgggcgaaccatatcaacagcagggccttgtgggcggctgcaacgaaaggtcacgaagatgtctgcaagctgctgatggatccagcggtggctggaattgagttcagggccagggcgaactctagcgacagctgggccttgcgtgtggctgccaatgcaggtcacgcagatgtctgcaagctgctgatggatccagcggtggctggacttgagttcagagccctggcgaactctagcgacagcagggcattgtgggcggctgccaaggaaggtcacgcagatgtctgcaagttgctgatggatccagaggtggctggacttgagttcagggccagggcgaactctagcgtcagctgggctttgtttacgtctgcgaatgaaggtcacgcagatgtctgcaagctgctgatggatccagcggtggctggaattgagttcagggcccgggcgaaccatatcaacagcagggccttgtgggcggctgcgaaggccggtcacgccgatgtctgcaagctgctgatggatccagcggtggctggaattgagtacaggggcagggcgaactctagtgacagcagggccttgtgggaggccgcgaaggccggtcacgccgatgtctgcaagctgctgatggatccagcagtggctggactcaagcacatggccagggcgaacaatatcaacagcaggcccttgggggcgtctgccaaggcaggtcacgcagatgtctgcaagctgctcatggatccagaggtggctggacttgagtacaaggccagggcgaactctagtgacagcatggccttgtgggcggctgccaaggctggtcacgcagatgtctgcaagctgctcatggatccagaggtggctggacttgagtacagggcccttgctaactctagcgatagcatggcattgtgggcggctggcaaggcaggtcaagcagatgtctgcaagctgctgatggatccagaggtggctggacttcagtacagggcccaggcgaactctagctacagcagggctttgggggcggctgcgaaggctggtcacgcctatgtctgcttacttttgatggatacagaggtgtctggccccgagtacagggtccttgtgaatcttgacagcagctaggtcttgtgttacactcagacacgtttctttctagccaccgtagagcaaacttttcagaaatgtgttcagtttgctcaagcgaaaatatcgctgcgtgtgcccaataattccagatgtagcagaaatatttgattatgaggcaggaattctttgaaaatgattattgatgcgcacgatgtgcgccagcactttgacttttcaggctactttgaagatgtaactaacttctgtatcttcacagtccttgaatgtgttgtgtcaatctcctgagttgacaagataggttacaaaacttgatgaaacttgaatttcttcgtgtaagaaagaaagacaatttgcaccagtacatttgttcctgcctcccggagggattttgactgttttcggagcctggtctggtcggaatcgaaattccgcatagagctgaatttctggttggcgagtgagtcgttcgtacggctctaacttctgctttgaaaattcaaaaatatcgccgggaggcaggaaaaccaattctgtaccgcttgcagataccgccaggcaagtgcctcttacagcttgccgcttgtcgcttttattccaggcaagtgccgcttgcagataccgccaggcaagtgcaaccaagggtttatagggtttatcccaactcattgtttatttataccatcctgtgcgcttgtacacacatttacatcgaacatgcagtcgcacacgcgatcatcgtttccactccttaagtgtccccatgacattcttgatcgtattgccgtttctcttccaacccaaagattttattagtgtgtaaaactctgcacaacagattttctggatggccccttaccggactgatccaaccaccacagcgagttggagagatgatggcgaaaggggggcgcgccgaccttctagcagtatgcttggtgtccaatcctcttgtacaggttaaggggggactacaattgagggcgaaccaaaatgaaaacaagcttctctatgtggctgccatggcaggtcaagcagatgtctgcaagttgctgatggatccagcggtggctggacttgagtacagggcaagggcgaaccatatcaatagcatggccttgtgggcggcggccaaggcaggtcacgcagatgtctgcaagcttctcatggatccagaggtggctggacttgagttcagggcccgggcaaactctagaaacagcagggcattgggggcggctgcatatgaaggtcacgcagatgtctgcaagctgctgatggatccagcggtggctggacttgagttcagggcccgggcgaactataacgacagctgggccttgcgtgaggctgcctatgcaggtcacgcagatgtctgcaagctgctcatggatccagaggtggctggagttgagttcagggccctggcgaactctagcgacagcggggccttgcgtgaggctgccagggcaggtcacgcagatgtctgcaagctgctgatggatccagaggtggctggacttgagttcagggcccaggcgaactctgtcaatagctgggccttgtgggcggctgcacaggaaggtcacacagatgtctgcaagctgctgatggatccagaggtggctggacttgagttcaggtcccgggcgaactctatcgacagcagggccttgtgggcggctgcctatgaaggtcacgcatatgtctgcaagctgctgatggatcaagaggtggctggaattgcgtttagggccctggcaaactctagcagggccttgtgggtggctgccaaggaaggtcacgcagatgtatgcaatctgctgatggatccagaggtggctagacttgagttcagggcccaggcgaactatggcgacagcatggctttgatggcggctgccaaggaaggtcacgcagatgtatgcaagctgctgatggatccagatgtggctggacttgagtacagggcccgggcgaactctagcgacagcagggccttgggggcggctgccaaggcaggacatgcagatgtctgcgtgctgctgatggatccagaggtggctggacttgagttcagggccagggcgaactctagcgacagctgggcattgtggctggctgccaaggaaggtcacgcagatgtctgcaagctgctgatggatccagcagtggctggacttgagttcagggcccttgcgaactctagcgacaactgggccttgcgtgaggctgccaaggaaggtcacgcagatgtatgcaatctgctgatggatccagcggtggctggaattgagttcagagcccgggcgaattctatcgacagcagggccttggggtcggcggccaatgcaggccactcagatgtatgcaagctgctcatggatccagaggtggctggacttgagttcagggccagggcgaactctagcgacagctgggcattatggtatcagcttggataacactccggagagtggacttagtgtgtgcagcacgccaatctataaatgcggagacgagaataaatattacaaaagatagtggaaccataaagggacaccagcggaggaaaggggggcggtagcctggaacctgatcagggtacaggttagacagcgcgtgtcagaagaaccgatgacgcagtcaacagtaagctgacatagtactgtcaggaccgatagttctaaggaagtacataagtagtcaccaagtcataaaacgcgtgagagcaccgcaattcatgctgacactccacctatgacacaggtgacatacaatactacttctccacctatggcactggtgacatagaactatatgtaacagattgaaaaaaaaaaatcaaagaactccgaaaattcgagagaacttcaaatggaaacccaaaggtttataggaaggaatgaaacacggcaaaaaccaaaatttgccaagttagaaaaggatgaaaaccgaatatcaaagatgggtaacaacggtatagaaaacccgatccgggaataggaacctaatgccatacaatgataaccaaagaaaccgatgtaacaaaaaaaaaaaaattatataccctaagaagaagcggtcatcccaagcatccgcataaacctccagaacacagcaggatcaaggggcttggtgaaggggtcagcacagttgtccttggtgttaacataggcaacatctagtgaaccgtcctccaccagctccttgatgtagtgatgaataacatcaatgtgcttgctgcgagggaggagctgccagtcattggcccatctcagagaccctatgttgtcaccctgaatggtaactaaatcacaaggcagacccagatccaccctcaacttcttcaaccattgcacctccctggcagcctgagacagggcctgatactcagcctcacaagagctaatggcaactgtaggctgcctcttgctcatccagttcactatgcaccctccagccaggacagcaaagccagtctgagatctcctgtcagacccatcatcagcaaaggatgagtcactaaagacagtaaaagagaaatcagggctgtgtgtgtaagtgagtcccaggtgggaatgtgacctcaaatacaaaagcaaacgcttggctgccccccacagggggacggtagggtgagcagaaaacctggacaggtagctcacagcaaaggcaatatcaggcctggtgcaagtagccaggtatagcaaagcaccaacaagagagaggtactggctattagaggacaggggttctccaggtgggtcagtgacggtggacttgtccatgggggcaccaaacctgggcttggcagcagcagtcagaccaaactgctccaccagatcaacaatgtaggagtgctgggagaggttgatctgaacacacctgccgtcagagtcaagtgtacaagccatgtccaaggagaggaactgaaccggcacacccatctctttgacctcccagccagctttctccatagccttgatcagcaaaacatacctatccagctcactaaaagcacagataaaatcatcaacataggttaggacatagctccacccaccattagaatccctcctaaaatacagagcaggttccgccttgcacataataaaaccatgtgcaaccaaaacccgcttgacatccatactccaagccctgggcgcctgtttcaaaccataaagggacttgatcagcttgcatacaaggggaacaccgttaggaccaagtaacttaaagccctcaggctggtggcagtacaggtccagaccaggttcaaggggagcattcagaaatgcagtcttgatgtccagctgccgaacaaacatcttcctatgagtgatggcagccaggagcaccctcagacctgctttagaagaaacgggggcatatacatcatgaaaatccaacccaggacgctgcagaaaaccacgaaccacaaaacgtgccttgaagcgaataga

SEQ ID NO: 200 - DNA, 22379 bp, unidentified
  misc_feature 1..22379: note = Fanzor polypeptide
  source 1..22379: mol_type = other DNA
tgacgaatgtgggtttagtgagcgtctcaagccacattatgggtattcccctgtaggaaaacctgttatcgttaaaactactggtgggtgggtacaccacagtttgttgatggcagttttttcagatggtaggaaagagttcgttgtgaagaaaggatctgtgaagaagacggacttcgttgcatttattgaatcattgagtttgtgcaataattcagtagcaataatggacaataatgggcgttcctgtctcccggccgattttttaaaatttctaatcaggatttagagcctccggaaagactcgctagcttgagacatcagcaccaatgaatcacaattccgctccataccatgtttcgcaaccagtcaaaatcggccgggaggcaggaacgcccattcaatgccagtatccataagaaattggtcctcagtcaccccgtcaatatttgttacacacctccttacagtccagaattcaatgctattgagctatgcttcgctaaggtgaaaagagactttcgtcgtttgaactacataccgaatgaaacaaagacgcacgtgtctgatatgatttccttagcattcggcaacctcactgataaaattattatgggttgttttgaacacgtttggaacacttatgtgtataaagcggtctgtgacgtattgattatgaaagatggcgacgaaacctccgacagtcgcgaaattgaaggagctactgaaattggctgaagtaccatactcgtctaagtccaacaaggacgatcttgtccgtttatgcgaagacaatggtctcatcgccagaccccctccagaatacaagacggtggaaaagatgtgtgtagtgaaatgcgccctgaagaaggcaatgagtcttgacgatgaagaattcggtatgtttagggagcatgtggaccagctcgtcaatgtggtgagccgcatgttacggcggtccagtctggtgctgactttccacatcacgagtctattagagaaaggtctggatattccagacctgtacaacatgaaagatacctactggaaggattggctccgtatcggggtagacggaatcttccctgatgaggaaagcaagatatcgtacgaagctgtgaaggactccatcggcgatgtaattggtaatgacgacgctgactacatcaagtcttatccgatctatttcgatcaggtattgaactatgcaggtcacacattgagcactgtcgtgtcaaacaacgcatgggttcctttgataccacgtctggccagactcacttccaccactttaaataaattaaattccccgaagacgctggacacatcgaagatcattcggggatacgaagtgatgcaggctattcagcaagaagtccaaaacatggagggatggccagagtctgttcaagagtacgtcaatgaagttagggagatgctgagtgttccagatggaagtcgagtttatgataactatggcaaagacatggactttccgaccatggtccggtttaattattggatacagacacggttggaggatatggatgcacgtcgtatccgattgatgcccatcttcaatgtccaacgggtgcatgttcgccttgacctgaagaccctcgtgaacctgttcaggcacatgttccccaatgaccagaacatcgttgagctttccaagtgggaacatgtaaagaatcccgaaagcttcatgttgccccagaggcctgcacagaagaagaaaaaatcatgtggtcctggtgaatgggatgcatacaagtcggtcctgaagcagtacgatgatgatgttaaggatatcaaggctactgacgagtacagacatgcaaagggtttgtatgacacgcttgtgaacgcccgaaaaacagtcgcaggttccttcttcagaaaaccacctgtcaagaatgggtgggttttcgactgcagcatctgtactgacggagtctctttgagcatgcagtacagcaagacagtacaggtccttgtctcagatttgaagaagacctgtaagaagcctcgtaaaaaagaaggtatcaagatcgcagaaaaatacgacggctcacttaaaacgatattgcccgatatgggtatcgtcgtcctgggtgtggacccaggacggagcaacatcgctacggtaacgtatttggcagacgataaaaaaagacatggaagctgacacgtggtgcattttaccacaagtcgggtatcaagaagcagacaaggcagaaggaactgcgttttgctgacatgattcctatgtgggagtctctgcgtgaaaatggagcatctttgagtacatcgaggacggataagatctccgcgtacttgtcaaattacgctaagttttctgacgagtggtggagattggctttgcgacgccgagaatcccgtgacaacttgcagcgttacatcggaaaacgaaaggtcaaagactctttctgggcgggtatcaagcggtgcatgatgaaagaacttcctgatatgaaggtttgcgtggcctacggatctgccatcacgaaactgaagcctactggaccgggagaagttgcagttcccacaggggccatgttcgcatcgtgtaaaagaattttcaaagaggacgttttctgtgacagatgagttcaaaacgactcttatgtcgtgggggacgggtaaagaaaaagaacgtgtttacaagatcccaagtgtttgttcagcagacgtgaagcttaggttgggtggtgaacgttttggtcacacgaaatcgaaaacgatgccaaaggtcgctgattgcgaccacttaggggtaaggttgtacaataaacgtaaaggcgcacaagagaagcacaggaggggtggcttcgccacttcccttgtcgattctcaaaaatcgatcgagcggtacccagaggtacgaggactgcgattctctccagaaacatgcatttactcggaccgggatcgctcttctgctctcacaatcgcaaggctgcactgcatggaattgatgggtctaggacgacctcttccatttgcccacagcagctctgttgttgttgatgaataaaaactcgtattgttgtagacaccactcggtccccctccggtggtcgcgacaacattaggttacaccgcaaggtctaccgtacactcaagaaagctgtttcattttagtattccgtcgagtgtataagatcgacaacctgggccttgagattcgctcaattgacctcggctgccagcagtagattctgcccccttaaattcagtgacaagtggaactaagtcccctttacggagttttatttttcttgtaaaaccaattagttttatgaaacgatacgaagagacacgtacgaccgtcattcaagtaatcatcgttccaatgtaaaacacttcaaacgtcatcatcccacagggtgatacaagggaattatgttatctaccggtacaggtctcgtcgtcttcgcccccgaactcttccgcatttcgtggaaaaagtgaataacgtgttatctttcggaccacactttgacaaccggccggttcttgaacgtgcctgtattctgcatgtaattctcaaaggtcagcttgaatggcataggatgattcaaaaaatgtccccaaacaccgaatactcacatttcgaatacacacggttgtcgacgacttgtcgtcgtttatgatcattagcattaaggggatgactctctctaggccactgcgcatgcttctagtattgacagtcgcggcgagtttggtgatgcccgaaaaccgtgtctctatactatcgaatgcgtctagcgtgacgtacatagcggtgccgaagcaccccaaccattcccccccattattgtacacacgcatgatctccttttgcgtttccgaagatagagcgcccatcgtctgcatagtggcctcctcgtgtctgaagttgctcgaaaagtgccacaggaacctgaagccgggggtgtgtagggcaatagactcaggtataggttggttcaggaacatagcgtcgtgaatgaccagcgccgtctcgaacaagcgcttagtgaacatgtagtacaacggaatgatctcaccagcccccgcctgcaagtccgattcaatcacggtaagatgaggtatcgtcccttcgatgggtatgcatgctgcgcgcatgtccgggtccgagtggtcgtctacgatgaccaccggcatggtcgggtgcaccgctcggatgcggtgcacgcacgtgtgccaataccacatgtgcaccggttttttcatgcatcgcagaatcacgatgccatccacacttctatgaatcatcatttacagtaataccggtacatctttttaagcattttggatcaccggaaatggtgttgactgtctcctctcctactacagtcggcggaacagtaaaatgaaacatatatcagatggaaataaatgtacgacaacgccgttagaaaattggcgttaagaatggtcgctgacttgattggctttgcgacgccgagaatcccgtgacaacttgcagcgttacatcggaaaacgaaaggtcaaagactctttctgggcgggtatcaagcggtgcatgatgaaagaacttcctgatatgaaggtttgcgtggcctacggatctgccatcacgaaactgaagcctactggaccgggagaagttgcagttcccacaggggccatgttcgcatcgtgtaaaagaattttcaaagaggacgtttctgtgacagatgagttcaaaacgactcttatgtcgtgggagacgggtaaagaaaaagaacgtgtttacaagatcccaagtgtttgttcagcagacgtgaagcttaggttgggtggtgaacgttttggtcacacgaaatcgaaaacgatgccaaaggtcgctgattgcgaccacttaggggtaaggttgtacaataaacgtaaaggcgcacaagagaagcacaggaggggtggcttcgccacttcccttgtcgattctcaaaaatcgatcgagcggtacccagaggtacgaggactgcgattctctccagaaacatgcatttactcggaccgggatcgctcttctgctctcacaatcgcaaggctgcactgcatggaattgatgggtctaggacgacctcttccatttgcccacagcagctctgttgttgttgatgaataaaaactcgtattgttgtagacaccactcggtccccctccggtggtcgcgacaacattaggttacaccgcaaggtgtaccgtacactcaagaaagcggtttcattttagtattccgtcgagtgtacatcaatcagtccgtttcattttactgttctgcctactgtagaatgcgtcgctctgttcatcattgcgacgagatatggtgcgtccaattttgacttttctaccaatattttttccgtagcatccaattcgttgtacatcgcttcccacgcctcctggttggtgttcgagaacgcgggcggtccttcgtcgttcgaccgcggatgcatgagggctgtgacggagtgggcgaagtactctgcgtgaaggctcttcgcgaagtcctgcagcgcaccgaacgcggtggcggatgatgcattgcgtgtcttcagggatgaaatacccgcctgggacgcgatgtaggtggtgtacgccttgggtaatggggcgtgcgctccctgctttcgtacggcgtcgagcgcggcgttccagtggggcgagagggtggcggcgtgcgtggcgaagaaggcttgggtgtctgggtcagagtcggcgttatcatgccatattttttcgacctgcgagacggcggctgctcccaatagcacgacgaggtgaagcacatgatcgatttggtgcgtgggcatgttgtcgatcgctcggaactcgatgccgacgagttccttcccccaccgcctcgcgtcaataggcgcgttccgcgacaccttgaccttaggcgtcccctctccatgcacaaaccggagttccagtgtgtcgcggacgcggagccagaggggcacccaacccttcttcagggacatgtctaaagagtcgcagagcctgctgcggatgtcggcccccgtccctgcctctggactcctatgtaatgggatattccaagtgtaattagggtaataatacccgttccgcatatgtgagccaatgcatgctgtgaacgggacctttttgccatcgatccacacgaatagcttggacatgtcgtcgcgctgcatgcgtgccccgcgtcttgccagcatgtccgactcgttttcgaaccacatgacctggaacccggtaatcgaatcgacgtccggccctcgtgcgatgtacttcacggctgtggtgccatatccggcaaagttactggtgtccgcgcgcatactggcgcggttgtgcgtgttcttgtcgtcgccaagggcgcgggggtcgcccgagaaaagactcatgagtaatggctcaaccgtctgcagcagatggcccaggtacgcgtgctgcagttgcagcagcttgtactcgcgcaaggtcatgtctacattgcgatcgtgcgggagcgtcacccagacgtggaagctgccctcgtataaggcgtctccctgtggggtgattctgccgctccacggaaatatctgcgcgccggtgattccctcctcgttcgcgcgtgccaggaccgctgcttcggcgtcgtgcagctgtctcgccacgccggcaacggtcgcgtttttgtgctttgtgctgcgagtctccaggaatgggccgtccacgtcgtaagttttgtttatttttgattgttgttgttcttgtttttgttgttgggatttcttcgataccttgactgcgcggagcgcgcacaggctgcgcagtgtgtcctcatcggacagcggtgtgctaggtcgcttttcgttagggatcaccgtgatcgaatatatgtcgtcatagcagcaggtgacaaacagtgtgtccccactgtaaatgctcgtctgtacggtatccttgccttgcttgcgcatgaaggttttaatcgacaatgacctggacgcgttagactttgctttttcggagtccaagaaaagcccgtccagtcctgcgatgtgctgcaggtgctcgcggatcgcctttgtgtccaggtcgacgcctgcgggtgcgcgcacggcagacacgctctcatcgttttttatcgaagagtaatacgacccgccttggccgtactcggggaggacctttgacggaaggagcgtttgcgcacgcggggaagaagatagagagacgttgaactcgtgctcaacaccgagtccccactgcattatatgtattgttatacactcggacaagggaattatgttacgtaataatcctctaaaagtcctcttgtatgtgtttatattctacacttcgatcgacactgcgttctgtaaaatttacacatcaatacaatattgcaacagttgtctttacacatcaatacaatattgcaacagttgtgttaacttgtattccgccaccgcatcgtgtgtaatgaatggacggacggatggattcgacagttttctgccggttattgtaggtttctgcaactgaatccatcttcctgctccacgggacattcgagactactttaccgtttttccgtcattttcagatcaatcaacgaagtgagcccggaaatcggtgatatgtcgcccacgtcggtgttcgaaatgtccaggtgcaccaatgaagtgagtcctgccagtggtgatatgtcgtccacgtcggtaccctccatgttcaggtgaaacaatgaagtgaggccggaaagcggtgatatgtcggtcatgtggaggtgcgaaatgtctaggtgaaccaaagcagtgaggccggaaagcggtgatatgtcggtcatgtggaggtgcgaaatgtctaggtgaaccaaagcagtgaggccggacagcggtgataagtcttcgatcctgtcttcgatgttcggaatgtagaggtgaagcaacgaagtgagtcctgacagcggtgatatgttgtccacacgtgtgtacgacatgttaaggtgcgtcaataaagtgagtccggacagaggtgatatggtgtccacaagcgtgttatccatatccaggtgaatcaacgaagtgagtccggacagcggtgataggtcggcaacgtagatgtgcgccatgttcaggtgcgtcaacgaaatgagggcggatagtggtgatatgtcttccacttcgttgaacgacatatccaggtgaagcaacgaagtgaggccggacagaggtgataggtattcgctagcggaggtgtacgacatatccagataaaccaacgaggtgaggccggaaagcggtgatatgtattccacacgtgtgtaagggatgtaaaggcgaatcaacgaagtgaggccggacagtggtgatatgtcaaacacgtaggtgtgctccatgttcaggtgcgtcaacgaagtgagtccggacagaggtgagatgtcttccacttcgttgtacgacatgtacaggttaagcaacgaagtgaggccggacagaggtgataggtcttcgcccgctgaggtgtacgacatatccagataaaccaacgaagtgagtccggacagcggtgatatgtcaaacacgtctgtgtgcgaaatgtctaggtgaaccaacgcagtgaggccgacaacggcgataggtctacgcccgctgaggtgtacgacatatccagataaaccaacgaagtgagtccggacagcggtgatatgtcaaacacgtctgtgtgcgaaatgtctaggtgaaccaacgcagtgaggccggacaacggtgataggtcttcgccctctgaggtgtacgacatttttttgtagggtacgacgtctttcccacgattgatacctattttcaactcttcgagcctgcaaatgcgtgagacatagtccaaacttgtataatgtctcaggtggatccttgtgatacaccggggtgcgacgcatctccactgtttgctaacgagagacacttgtttgaggtggcattcgttcgaaatcgcattggatagaatgatctccaatacatcttcattgatttcgtcaaaagaactcattcgtttgtgttactgaagaattaatggttgtttacacatcatttgatgacgagaagtcgccgtcgccctcccagaggacgacgaaaccaccgaggacgttggcacggggtgcatgaaacagcgtgaggcgtacctcgccaccaagctagctacgctctacgagcttgcaattgagcttcgctccatgtccctcgtcttcctggcgctcagttagtaaaacctctttttttgtctcattttgtatatttttgatatgcctctgttttttttcttcccgaccgtgacaacgatgggtgtatttgccttgtcacacggacgcagattcatcgaagatgttcagtagcaattttactgtgcggattaattacatgtgcaaggagatgtatgataacttgcggggcatcgagggattcgctacagtgcggtgcccatggagggattcgctacagtgcggtgcccattatgggtattcccctgtaggaaaacctgttatcgttaaaactactggtgggtgggtacaccacagtttgttgatggcagtttttttagatggtaggaaagagttcgttgtgaagaaaggatctgtgaagaagacggacttcgttgcatttattgaatcattgagtttgtgcaataattcagtagtaataatggacaatgccagtatccataagaaattggtcctcagtcaccccgtcaatatttgttacacacctccttacagtccagaattcaatgctattgagctatgcttcgctaaggtgaagagagactttcgtcgtttgaactacataccgaatgaaacaaagacgcacgtgtctgatatgatttccttagcattcggcaacctcactgataaaattattatgggttgttttgaacacgtttggaacacttatgtgtataaagcggtctgtgacgtattgattatgaaagatggcgacgaaacctccgacagtcgcgaaattgaaggagctactgaaattggctgaagtaccatactcgtcgaagtcaaacaaggacgatcttgtccgtttatgcgaagacaatggtctcatcgccagaccccctccagaatacaagacggtggaaaagatgtgtgtcgtgaaatgcgccctgaagaaggcaatgagtcttgacgatgaagaattcggtaagtttagggagcatgtggaccagctcgtcaatgtggtgagccgcatgttacggcggtccagtctggtgctgactttccacatcacgagtctattagagaaaggtctggatattccagacctgtacaacatgaaagatacctactggaaggattggctccgtatcggggtagacggaatcttccctgatgaggaaagcaagatatcgtacgaagctgtgaaggactccatcggcgatgtaattggtaatgacgacgctgactacatcaagtcttatccgatctatttcgatcaggtattgaactatgcaggtcacacattgagcactgtcgtgtcaaacaacgcatgggttcctttgataccacgtctgaccagactcacttccaccactttaaataaattaaatgccccgaagacgctggacacatcgaagatcattcggggatacgacgtgatgcaggctattcagcaagaagtccaaaacatggagggatggccagagtctgttcaagagtacgtcaatgaagttagggagatgctgagtgttccagatggaagtcgagtttatgataactatggcaaagacatggactttccgaccatggtccggtttaattattggatacagacacggttggaggatatggatgcacgtcgtatcagattgatgcccatcttcaatgtccaacgggtgcatgttcgccttgacctgaagaccctcgtgaacctgttcaggcacatgttccccaatgaccagaacatcgttgagctttccaagtgggaacatgtaaagaatcccgacagcttcatgttgccccagaggcctgcacagaagaagaaaaaatcatgttgtcctggtgaatgggatgcatacaagtcggtcctgaagcagtacgatgatgatgttaaggatatcaaggctactgacgagtacagacatgcaaagggtttgtatgacacgcttgtgaacgcccaaaaaacagtcgcaggttccttcttcagaaaaccacctgtcaagaatgggtgggttttcgactgcagcatctgtactgacggagtctctttgagcatgcagtacagcaagacagtacaggtccttgtctcagatttgaagaagacccgtaagaagcctcgtaaagaagaaggtatcaagatcgcagaaaaatacgacggctcacttaaaacgatattgcccgatatgggtatcgtcgtcctgggtgtggacccaggacggagcaacatcgctacggtaacgtatttggcagacgataaaaataagacatggaagctgacacgtggtgcattttaccacaagtcgggtatcaagaagcagacaaggcagaaggaactgcgttttgctgacatgattcctatgtgggagtctctgcgtgaaaatggagcagctttgagtacatcgaggacggataagatctccgcgtacttgtcaaattacgctaagttttctgacgagtggtggagattggctttgcgacgccgagaatcccgtgacaacttgcagcgttacatcggaaaacgaaaggtcaaagactctttctgggcgggtatcaagcggtgcatgatgaaagaacttcctgatatgaaggtttgcgtggcctacggatctgccatcacgaaactgaagcctactggaccgggagaagttgcagttcccactggggccatgttcgcatcgtgtaaaagaattttcaaagaggacgtttctgtgacagatgagttcaaaacgactcttatgtcgtgggagacgggtaaagaaaaagaacgtgtttacaagatcccaagcgtttgttcagcagacgtgaagcttaggttgggtggtgaacgttttggtcacacgaaatcgaaaacgatgccaaaggtcgctgattgcgaccacttaggggtaaggttgtacaataaacgtaaacgcgcacaagagaagcacaggaggggtggcttcgccacttcccttgtcgattctcaaaaatcgatcgagcggtacccagaggtacgaggactgcgattctctccagaaaccagcacttactcggaccgggatcgctcttctgctctcacaatcgcaaggctgcactgcatggaattgatgggtctaggacgacctcttccatttgcccacagcagctctgttgttgttgatgaataaaaactcgtattgttgtagacaccactcggtccccctccggtggtcgcgacaacattaggttacaccgcaaggtgtaccgtacactccaaaaagcggtttcattttagtattccgtcaagtgtaatgtaatgtaaggaggttcacgccatctttcgtgccaccgcatcctccttgcgtgtagacgcataacgaagtgaggcgtgacagcggtgatatgtcgtccacaagtgtgttcgaaatgttgaggtgaagcaacgcagtgagtccggacagtggtgatatgtcttccacacgtgtggacgacgacatgttcagatgaaccaacgaagcgaggccggacagaggtgataggtcggtcacgtaggtgtacgatatgtccaggtgaaccaacgaagtgagtccggacagctgtgatatgccgtccaccatgtttgtgtactccatgttcaggtgaatcaatgaagtgaggccggacagaggtgatatgcatcccacgtcgttgtacgatatgttcaggtgaaccaacgaagtgaggcaggacagtggtgatatgtcggccacacgtgtggacgatatgttcaggtgaaccaatgaagtgagtccggacagcggtgatatatcgtccaccatgtggacgtaatccatgttcaggtgaatcaatgaagtgaggccggacagaggtgatacgttgcccacgtcgttgtacgatatatccagatgaaccaacgaagtgaggccggacagtagtgatatgtcgtccacacgtgtggacgacatgttcaggtgaaccaactcagtgagaccggacagctgtgatatgtcgtttaccatgtgggtgtactccatgttcaggtgaatcaatgaagtgaggccggacagcggtgatatgtcgtccacacgtgtggacgatatgttcaggtgaacctatgaagtgaggcctgacagcggtgatacgtcgcccacgcgtgtgtacgccatgtcgaggtgaaacaacgcagtgagtccggacagtggtgatatgtcgtacacacgtggggacgacgacatgttcaggtgcaccaacgaagcgaggccggacaggggtgataggtcggtcacgtaggtgtaagatatgtccaggtgaaccaacgaagtgagtccggacataggtgatatgtcgagcacgtcttccgaccttttttcataggattcgtctttcccccgattgatacagattttcaactcttggagcctgcaaatgcgtgagacgttgtccaaactgttataatgtcttatttgaatccttgtgacacaccgtagtgcgacgcttctccactgtttgcttacgagagccacttgtttgaggtggcattcgttcgaaatcgcattggatagaatgatctccaatacatcttcattgatttcgtcaaaggaactcatggaaaattaaattcattcgtttctgtcactgaagaatgaatggttgtttacacttcattcgatgacgagtggacgagaaagccgtgacccttgaacccaatttgtttaagaacgtgcgtgcatgaatcagactccctcacagcgtgaggcgtacctcgccaccaagcgagctacgctcgacgagctacgctcgacgagctacgctcaacgagcttgcaattgagcttcgctccatgtcccgcgtcttccagacgctttagttacactcagaccgtgtaccgtacactccagaaagcagtttcattttagtattccgttgagtgtaaccaaaggtgtgtagtgtgtcagcaactcttgagagagagagtattgtgaactattaactttatttatggagtctttagcttgtaaacgcttgacatgaagagctagacataaggctagattcggcaattaaacaccgccgcattctccgtagtgtcgtgtggagacagatggacgatgatgacggagtctgcgaacgcctccgtgtccatgtgtacggacgatatcactattgggtttctgcttgtgattgtgcggtaactttggatgaccccattaccacagtgaaagcggttgcgtaagatgcggaggctcatgcaaaacacggaaacacaaaaacacaccaatttacctaagggccttgtctggtgcatttcagaatccccaaaatacaaggtgtcgtcaaaagtagtgatatttcaccggcgccgtaaagctcccacttattttacagcgtaaatatatattatttcttgcaggacgacgatcgccatgattaccagattttttgagtatggtgattcgtacgaattctttggtgtgcacaacaagtgctcaagggacggtttcgaattccacgaggtgtgggtgcccggattatcatccgtcattggtggtggggagaacattggatgaagcgattgaggcagctgcagtgatgctgacgattattcttacggggatgcaatcacatggagagatcatacctagaccgttgagccaggaatcggtaaaacaacgtggtttgatggaggagaaagtgcagatgaacgggttcgattctaagttttgtgatgttgtaacagtcaagtctgtgccaccgggttgtgtaccacagttgtcggagcaggaactgcaaattctggaggatgaggccagggaaatttgggccaccctgtcgactgaccgataggagtgtgatactggtgctttggagcttgtagtcaatttaagatgttttacaaaataatgagctaccggcggcaaaataatgaactaccggcaggaacgtccatttattcgcattgtcagtgaaatttggatatttaaacgtttgttgcgttgacaatatcctctgagacaagtgtcaccgatgtaaaaacttgcctcatcaatgctgatggcggaacaatcagatactctgtacaaaaactgtcgacagaagatttgtgatcattcatgtgtcgaacagttttgtctgcgcgcttacgggtgtatccaagtatgccaggacacttctgccaatacgcttttacaagtcagtgtccacccgcagttgtgtgccaggcaaatgtgaacgctgaactaacagcagtttactatttaatgagcgttcctgcctcccggccgattttgttaaatttctaatcaggatttaaaacatcttgaaccactcgttagcttgagacataagcagcaaggaatcacaattccgatccatatcatgtttagcaatcaggcaaaatcggccgtgagccaggaattaattattagcctctgggccagctgaaatgctgaaatacgggatgaaggatacgaaggtttgggaccttgatacataacctttagctgacctaccctatcaattgggttcaaggatcaccggtaagggtatcccataaattctgtctctgactgtgtacacattaattaggttgcttgtgtcaacgagtcgggtacatgacccttcgtcatcatatcaacattgtctttgataactgcatccagtgtgacgtaatcttctggacatctctcctgaaaaaaaccagatccaaatatttttctgtaatatgcatataaaggaaactcttccaatctttcgaaatcaaaagctaacttccaatttggtataacattgacaacactgtgaatccatcctggagccacatgaactacctgtccatggctttgggaaacaattcggaccaagttggggacttggcgatgtaattgaaacatttcatccgctgacaacaaggggaagtcagtttttagtctaatagcttcctcaaacttgtctctgactaccttcagacaattgccagactgcacaaaagctataaattcttcaaatccccaaggggggataaaaagccaatatgctaatggaccagtcacacctggggtcaatgagaaagcaacattaagtccccgggtaatatcccaatgtaaaccagttccatctcctccttgcgttgtaagaaacaacatagttttcatacgtatgttctggtcagggcggatatttactgcagaagcgtccataaatagagccttcgctatactatctagctgattgttgtgcaataaatccaatgtggtttggaagtatacacgtgcgatgaaatactcagtattttggacagtcaatttagtgacacgaggaatattaattcttattttctcggaaagcatgttaaacttctcttcagaatcgaaggagttctgaatgattctgaacagctcggatgctgtgggtaatacctcccacgatgttgagacaatagtgggagcgtatctgtgcatatcaatcgtaattgccgcattagaaactaactccatcaccttcctagctacagcagagatgtccttatccaaaaatatagtcacgtgaggacccaacactctcatatcccaacataatgggcacacaagatggttatcattggcgtatgtcagaatttcggttttaatcctgcaatacatacagcctgcacttgaatcggaattggacgccttcacgcgagcgtctctgatgtcagtctacaaaaaaaaggatacagtaaataagataaacgaaggagagtaaattaattttgacaatacaagtgcttgacatgacattaacagtacaatcaagaacaaccaatgaatttgacaatggcacaaccctgtttgaagacacatctcactgcaccagtcatcctacaagtaggtctgacaattgccaatgaattcgtcaattcatacataagtttatgccaaggcatcatccattaattgattcagtatgaccatacacaagtgcttgacatgacagtaacattacaatcaagaacaacctatgaatttgacaagggcacaaccctttttgaagacacatctcactgcaccagtcatcctacaagtaggtctgacaattgccaatgaattcgtcaattcatacataagtttatgccaaggcatcatccattaattgattcagtatgaccatacacaagtgtttgacatgacagtaacactacaatcaagaacaacctatgaatttgacaagggcacaaccctgtttgaagacacatctcactgcaccagtcatcctacaagtaggtctgacaattgccaatgaattcgtcaattcatacataagtttatgccaaggcatcatccattaattgattcagtatgaccatacacaagtgcttgacatgacagtaacattacaaaatgcaaaggtagcatccattacttgcatctgtatgaccatacacaagtgcttgacatgacagtaacattacaatcaagagaaacctatgaattaaacaagtgaagtacgtcacacaaatcaaactcactaggggttgcttgaagaaatcagcttctgggttgaatgtagcgtgcaggattcctttggtgttaacctcaatgaaggctgctcccatgagaattgagatggtcattatgcacatcaacaactctcctcttcgtgtggacttcagaatggacttcacagtcatccctgtgcaatggggttccatggggaatgcagtgtgtcggtttaaggacaacaacaattcgatttattgtgataacaggtgaatcccgaaaaagtattttgtgacggaaggacggacatagaggcatagttgatttttttgatacggatgggcgtttctattgtgtacgtaggattgaacacatagtcttgacagcctggacacgtggcatctgaattatggtcaaccgctacattaaagactcaaacggtgatcacacaaaacaactggctacacatacatggtcgcactgttatgtgctagtacatacacacatctggcaaacacaagtacatacacacacacatcaggcatccatgctatccatgtactgccacacagcaatgtgctagtacatacatacacatctggctatccatgcactacaagacaaccccatgcaaacatgaacacactcaaatacacacgctcgcatgcacaaaattgccatccttacacttccacacttcactgtgcattccccacacacacatctggatgtccatgcactacaagatgaccccatgcaaacacaaacactcaaatacacggatatgcaagcagaatacaaattaatacccatgcacttccacacagaactgtgcacacacacacacatctggctactaataaatcattattatcatttcaaattactcaccaagattggatgtgtcttctttaaaagcatcagcccccccacttccttcaactaccaaggctgatccgaacaatgaaggactacgcattgactcggaggctgcagcctttagctttgcagctttcctcacacctcttagggacttattcgagggtcccttactattctgggctacctgggttgacttgggcatgtttcctgtgttacgaaacaatggagcatataatcagtcagggaggaaggcggtgcagcagcagcatctaacaactatactgtaagctatatccgaccagctcgactcgatctagcatcctgtcagttatcgaacagtcgcaacatcgcatgcaggcattgcagcagcagcatctaacaactatactgtaagctatatccgaccagctcgactcgatctagcatcctgtaagttatcgaacagtcgcgacagtgcaggcaggcattgcagcagcagcagcagcatctaacaactatactgtaagctatatccgaccagctcgactcgatctagcatcctgtcagttatcgaacagtcgcgacagcgcaggcaggcattgcagcagcagcagcagcagcagcagcagcatctaacaactatcctgtaagctatatccgaccagctcgactcgatctagcatcctgtcatttaccgaacagtcgcgacagtgcaggcaggcattgcagcagcagcagcatctaacaactatcctgtaagctatatccgaccagctcgactcgatctagcatcctgtcagttatcgaacagtcgcgacagtgcaggcaggcattgcagcagcagcagcagcatctaacaatcctgtaatctagatccgaccaacttcacctggttggttgaacaaacacgattgagcgagcgagcaagcacttcctgagcaatgcgatcaagcacttcctgagcgatgcgagcaagcaattcctgagcaatgcgagaaagcacttcctgtgagagcgagcgagcacttcctgagcattgcaattcaaattagcgaacaggcgatgcaactcgtcgcgaaatcatgggagctatttcaaagacacctcaccttgggcttccgaatttccaggaattgagtggtatccagcgaaagatgtggtgcttcatcgctggaccgagcatatgaaaccctactaaacccttatcatgtttcagctcgcgcgacgtttgcggtcagccagcattccgacgaacccgtccttttcgtccttttcgtccttcgtctacttctaaaaactactattctactattcttaagtttcgatgaagaatgtgaggcacattcttctattctactccttttcttctaggactcctgcatcgagatggaaacttctatgcatgtggtgagtgcgcgtgtgttttcccagctactgacgactgcgtgcgcgcgtgttttcccagctactgacgactgcgtgagcgcgtgttttcccagctactgacgactgcgtgagcgcgtgtttttgttggggcactgatttcactgtttacactgctttttattgctggcgcagatcgtcatcgacctgacaaacttgtcgtcatcttcggatgatgaggacccccccttctccccatcggagttacttattgggggagctacttgcaactcccccaatgtggcctttaagcttgagggccatcatcccctgtccactggctctactcgctatcatcccctgtcccctctccctcgccctcctcccctgtcccctctccctcgccctcctcccctgtcctctctccatcgccctcatcccctgtccactggcgctactcccctgtccacaggcgctactcccctgtccactggagctactaccctgtccactggcgctactaccctgtccactggcgctactaccttgtccactggagctactaccctgtccactggcgctactaccctgtccactggcgctactaccccacgccctccgcacctgtcgcccacgtcatcctcgctggaagtcagcgtgagtacccccctgccttgcgtttttcttgagtcctggtgtcctgttgagacatgcagtgaagatggagaagactgagtgtatgtgtgtggtagtggtgtgggcaggggtggggttatgtgcatgagagagtgtcctgggggcactggttgttgacacatgcagtgaagctggagaagactgagttttaaattcaattcaattcattgggtgctgcaggttgatagtattcgactatcttgcaaaggtcgtcacgtaaactttttcagtgatgatacaagatactcggtccacagcattgtggatgtcaagatgagatttgggaacgattgcgttggtattatagaccatcactacctgtttatcccaatgttccaagtaagtaatgggtggtcctgcctcacggcggattttttgatattactgactgacttactgactgacttactgactgactaactgactgactgcttgattgatattactgactgactgacttactgacttacttactgactgaatgcatgatattactgactgacttactgactgactgcatgattgatattactgactgacttactgactgacttactgactgactaactgactgactaactgactgactgcttgattgatattactgactgacttactgacttacttactgactgactgcatgatattactgactgacttactgactgactgcatgattgatattactgactgacttactgactgacttacttacttacttactgactgactgcatgattgatattactgactgcatgattgatattactgactgacttactgactgactgactgacttactgactgactgcatgattgatattactgactgcatgattgactgactgactgactgactgactgactgcatgattgacacacattattcacgttgtgcgcaggtgcggtggaaatcctacactgaagagcacgacacctgggagccggtcgacgatctgctggacctgcaagtgttcgttgacttcatgcgcagcgacacctgggtggcgttcgtgaaggagaatgcggatgcggtcaaggggtgggagaggatccgtcaataatattttgctacacaacctgtgtccgcactagcacatgtgcggaggttgggaacgcattaatgaccctgaccctggaaaaaactatgttccgccgactgtagtggtggttatttgttttggtggagttggacacatgtctgtcgagcctcacacctgagatagtggtggtgatttttttggtggtgttgacacatgcctgtcgagcctcacacctgagatactggtggtgatttttttggtggtgttgacacatgcctgttgagcctcacacctgagatagtggtggtgatttttttggtggtgttgacacatgcctgtcgagcctcacacctgagatagtggtggtgatttttttggtggtgttgacacatgcctgtcgagcctcacacctgagatagtggtggtgatttttttggtggtgttgacacatgcctgttgagcctcacacctgagatagtggtggtgatttttttggtggtgttgacacatgcctgtcgagcctcacacctgagatagtggtggtgatttttttggtggtgttgacacatgcctgttgagcctcacacctgagatagtggtggtgatagctaattttggtatcatcgtatggtatatacctgaatgataaggacacaatttatttcattttgttgcatacacaaaatttgattatcgaatttgattacaccaaatttgtttcatttggtt

SEQ ID NO: 201 - DNA, 22379 bp, unidentified
  misc_feature 1..22379: note = Fanzor polypeptide
  source 1..22379: mol_type = other DNA
tctgacttgtttacactcgtttttcgaggcgcatgaggaacacttgtcggatctgacttgtttacactcgtttttcgaggcgcatgaggacactgtcggatctgacttgtttacactcgtttttcgaggcgcatgaggaacacttgtcggatctgacttgtttacactcgtttttcgaggcgcatgaggaacacttgtcggatctgacttgtttacactcgttttgaggcgcatgaggaacacttgtcggatctgacttgtttacactcgtttttcgaggcgcatgaggaacacttgtcggatctgacttgtttacactcgttttcgaggcgcatgagggaaacgtgttggatctgacctgcttacacgcgcgcttcgaggcgcataccacggcggctttcgcatcctcattgtctcgtccatttgtctccacaagacaccacggtggttttataaaaacgagtgtaaacggaggggggatcattccatccatccgttaatccaacagcagcaccatctgcggataatcgagtgaagatgatagcttgcagtctcacggaacgcttttcgcgcggcgcactagaacatgtcatggagcactgggagtcgtgggacttccgcccggataaggacaagtcgaaatcgcttgacaccatccaacgatactttgctgcagcagacggagactcggtacacgtggaatacgcaaagaataaacacggaagggggaggctgtttgcaaaacgcgggctttccatgcagtgtgtcatgcgggaggtcaggaacgcggtggcgcacccgttttatgtcgacctcgattttgtcaactgtcaccccacgctattcgcgcaacgctgcaggaaacggggggtggcatgtccgctcctcgatcagtactgtgggaaccggacggaggtcctaggcgacatcgatgcggacgcggctctggggaagacggctgttctatccgtcatgaatggaagcaagactgccgtatacaagcatcaggattcagtatggctgcgcgactttcagaatgagatgaatcaggccagggatgagatcatggctccgggaggagcggacgagttttacatagatattgcgcgcaaggacaggaacacatatgcatcggctgtcaatctaatgttatgcgatttggaaaacgagtgcctcatggcgatgctagaatacctagacaaaaaatcattcaaagtcggtgtgctggtatttgacggagcaatggtcgagaagaaaaaggagtttgcagactccaaggatggaggggtcacgcaggagatgctcgatgaggcgtcagattacgtgtgggacaggacggggtacaggcttcaaatcaagattaaggacatgacgatcgatatgctggacgtaccggcatctgcgtacatgggcgcacccgtacatgcacctaggtacgcaggaggagacgacgttgcagcaaagatactgctcaaggatttgggggggaagctggtcaaatccaaaggggtcgtctttggaaaacatggagacgtttggaccaatgacaaggatgtcgtcgaatccttcatgttcacggcgtgtcaaagggcgaacattaagtttgtcgacgaatctgggatttcaaggaagtacagctgcctgtacacaaaggctatcaacattgtgaagacggccaagcattacatcccggtagacgacaactttgtaaagaagatatgggagtcaaacctgggagtcctatgcttccgaaacggagttttcaggttccgggacaagtcattcgcccccttctcggagaggccggaggtaatgcccgtcattgtcatcgacagggactttccaagcgagaggccgactgacgaattattggaacacgtcaaggagaaggtactcgtatcgactctgggggaagaggggagggtcaatacctaccttcagatgatcgcacgctctatggcagcaaaacaccaagataaacagtggggaatgctaattggggagcgcaactcgggaaagggcctgttgcaggcgctgaatgagagggcctggggtcagtatgtcaacacgatcgattcaagcgtcctcatgctcaacaactttacgaacgacgtcaagtcgcagggttggatgatcgagtgtgagttcacgaggcagacgtacaccaatgaaatcaaggtggaccctgggaacaagcacatcaagctggacggggggctcatcaagaaatttcaatctggaggagacgtcctgaaggcacgccagttgtacgagaacgagagggcgctcaagagcgcttcacgattattcatgaacttgaatgacctccccgagatttcagcagtggatgctctggacacggtggttgttatagagttcccgcacaagttcgtcaatcctaaggacgtagatgaggcaaaatggttgaagttcttcaggcctgcagacccctcgctcaaggacggattctgcgcacgggaggacgtgagggatgcgttcatatggctcgtgatagatgccttcgatcaagagcagccactcaagatatcagatgtcgtccgtcgggacacagagaagctcaggatggatgagggggacgagctctcgctgatcaatgcgcacttcaagataacaacgaaccttgcagacgtcgtgacggtggctgatgtcaacgagtttgcaaaggataaaaagatgaaaacgcgcggattgaggggaaggttggagaaaatgggggcagtagcggatcgaatgcgtcaggagggggggatttcaagttcgtgtactcaggaagatcgtcttatctctacttggtgatgaagatgatggattacatgagagtatgattttacagagatgaagatgatgacaaattgtgacaatgtgacaaatgtgacaggttatagacataactattatctgatagacctcattaacaaaatagtatgccatatgtcaatttatagtttggtaaaataacagtctcattgtcacatctgtcacattgtagttgagattggggaaggattcaagttcgtgtactcaggaagatcgtcttatcgctacttggtgatgaagatgatggattacatgagagtatgattttacagagatgaagatgatgacaaattgtgacaatgtgacaaatgtgacaggttatagacataactattatctgatagacctcattaacaaaatagtatgccatatgtcaatttatagtttggtaaaataacagtctcatctgtcacatctgtcacatttgtagttgagattggggaaggattcaagttcgtgtactcaggaagatcgtcttatcgctacttggtgatgaagatgatggattacatgagagtatgattttacagagatgaagatgatgacaaattgtgacaatgtgacaaatgtgacaggttatagacataactattatctgatagacctcattaacaaaatagtatgccatatgtcaatttatagtttggtaaaataacagtctcatctgtcacatctgtcacatttgtagttgagattggggaaggattcaagttcgtgtactcaggaagatcgtcttatcgctacttggtgatgaagatgatggattacatgagagtatgattttacagagatgaagatgatgacaaattgtgacaatgtgacaaatgtgacaggttatagacataactattatctgatagacctcattaacaaaatagtatgccatatgtcaatttatagtttggtaaaataacagtctcatctgtcacatctgtcacatttgtagttgagattggggaaggattcaagttcgtgtactcaggaagatcgtcttatcgctacttggtgatgaagatgatggatgacatgagagtatgattttacagagatgaagatgatgacaaattgtgacaatgtgacaaatgtgacaggttatagacataactattatctgatagacctcattaacaaaatagtatgccatatgtcaatttatagtttggtaaaataacagtctcatctgtcacatctgtcacatttgtagttgagattggggaaggattcaagttcgtgtactcaggaagatcgtcttatcgctacttggtgatgaagatgatggattacatgagagtatgattttacagagatgaagatgatgacaaattgtgacaatgtgacaaatgtgacaggttatagacataactattatctgatagacctcattaacaaaatagtatgccatatgtcaatttatagtttggtaaaataacagtctcatctgtcacatctgtcacatttgtagttgagattggggaaggattcaagttcgtgtactcaggaagatcgtcttatcgctacttggtgatgaagatgatggatgacatgagagtatgattttacagagatgaagatgatgacaaattgtgacaatgtgacaaatgtgacaggttatagacataactattatctgatagacctcattaacaaaatagtatgccatatgtcaatttatagtttggtaaaataacagtctcatctgtcacatctgtcacatttgtagttgagattggggaaggattcaagttcgtgtactcaggaagatcgtcttatcgctacttggtgatgaagatgatggattacatgagagtatgattttacagagatgaagatgatgacaaattgtgacaatgtgacaaatgtgacaggttatagacataactattatctgatagacctcattaacaaaatagtatgccatatgtcaatttatagtttggtaaaataacagtctcatctgtcacatctgtcacatttgtagttgagattggggaaggattcaagttcgtgtactcaggaagatcgtcttatcgctacttggtgatgaagatgatggattacatgagagtatgattttacagagatgaagatgatgacaaattgtgacaatgtgacaaatgtgacaggttatagacataactattatctgatagacctcattaacaaaatagtatgccatatgtcaatttatagtttggtaaaataacagtctcatctgtcacatctgtcacatttgtagttgagattggggaaggattcaagttcgtgtactcaggaagatcgtcttatcgctacttggtgatgaagatgatggattacatgagagtatgattttacagagatgaagatgatgacaaattgtgacaatgtgacaaatgtgacaggttatagacataactattatctgatagacctcattaacaaaatagtatgccatatgtcaatttatagtttggtaaaataacagtctcatctgtcacatctgtcacatttgtagttgagattggggaaggattcaagttcgtgtactcaggaagatcgtcttatcgctacttggtgatgaagatgatggattacatgagagtatgattttacagagatgaagatgatgacaaattgtgacaatgtgacaaatgtgacaggttatagacataactattatctgatagacctcattaacaaaatagtatgccatatgtcaatttatagtttggtaaaataacagtctcatctgtcacatctgtcacatttgtagttgagattggggaaggattcaagttcgtgtactcaggaagatcgtcttatcgctacttggtgatgaagatgatggattacatgagagtatgattttacagagatgaagatgatgacaaattgtgacaatgtgacaaatgtgacaggttatagacataactattatctgatagacctcattaacaaaatagtatgccatatgtcaatttatagtttggtaaaataacagtctcatctgtcacatctgtcacatttgtagttgagattggggaaggattcaagttcgtgtactcaggaagatcgtcttatcgctacttggtgatgaagatgatggattacatgagagtatgattttacagagatgaagatgatgacaaattgtgacaatgtgacaaatgtgacaggttatagacataactattatctgatagacctcattaacaaaatagtatgccatatgtcaatttatagtttggtaaaataacagtctcatctgtcacatctgtcacatttgtagttgagattggggaaggattcaagttcgtgtactcaggaagatcgtcttatcgctacttggtgatgaagatgatggatgacatgagagtatgattttacagagatgaagatgatgacaaattgtgacaatgtgacaaatgtgacaggttatagacataactattatctgatagacctcattaacaaaatagtatgccatatgtcaatttatagtttggtaaaataacagtctcatctgtcacatctgtcacatttgtagttgagattggggaaggattcaagttcgtgtactcaggaagatcgtcttatcgctacttggtgatgaagatgatggattacatgagagtatgattttacagagatgaagatgatgacaaattgtgacaatgtgacaaatgtgacaggttatagacataactattatctgatagacctcattaacaaaatagtatgccatatgtcaatttatagtttggtaaaataacagtctcatctgtcacatctgtcacatttgtagttgagattggggaaggattcaagttcgtgtactcaggaagatcgtcttatcgctacttggtgatgaagatgatggattacatgagagtatgattttacagagatgaagatgatgacaaattgtgacaatgtgacaaatgtgacaggttatagacataactattatctgatagacctcattaacaaaatagtatgccatatgtcaatttatagtttggtaaaataacagtctcatctgtcacatctgtcacatttgtagttgagattggggaaggattcaagttcgtgtactcaggaagatcgtcttatcgctacttggtgatgaagatgatggatgacatgagagtatgattttacagagatgaagatgatgacaaattgtgacaatgtgacaaatgtgacaggttatagacataactattatctgatagacctcattaacaaaatagtatgccatatgtcaatttatagtttggtaaaataacagtctcatctgtcacatctgtcacatttgtagttgagattggggaaggattcaagttcgtgtactcaggaagatcgtcttatcgctacttggtgatgaagatgatggattacatgagagtatgattttacagagatgaagatgatgacaaattgtgacaatgtgacaaatgtgacaggttataaacataactattatctgatagacctcattaacaaaatagtatgccatatgtcaatttatagtttggtaaaataacagtctcatctgtcacatttgtcacatttgtagttgagattggggaaggattcaagtggttgttggttgccgcatgtgtggcgtgtagaaagagagggagagagagatctattgcatcatcattgtactcgttcgttgtcaatcatcagactctctcacacgtgtcatttcaaggcgacttcaagcatacctcaagatcgaaaaacgcggagattatgatcgatcgatatacattcttacacaggccgcatcatcattgtaatcgttagttcgttgtcaccgggatgataggagcccaccccgcacacacgcacggcgtgggattctgtcttgtcgttccatggccacccacccaccccctcaacaggacacggggggattctcactcacccctcccaaccccaaccggagtataaacactggggggcattcactgtatcaacaaatctgaatgagaataaaggacatgacgacgatcgatatcgatatcgtcacgccgtctgcgtgcatgatgggctcacacgtacgtgcacctaggtacgcaggaggagacgacgttgcagcaaagatactgctcaaggatttggaaggaaagcttgtcaagtccaacggggtcgtcttggtcaaatatggagacgtttggaccaatgacaagaatgccgtcaaagacatcatgttcagggcgtgcgaagaagcaaacatacatatgataaacgattcggggaaatcaagacagtacagcagcacgcgcgcaggtgcacaaaatattgtgaagacagccaaacactacatcacggtcgacgaaaacttaaacttgacacagaagatacatacatcatgatacatacatcatgtctgaagtcgtgcggattgcggggggggatcacgatgacttgcatatactcattctcacacgtgaattcaagcacactcttgctcgacaactctattggtttctgaagggggagactgccaatacctccaagcaagagtgataggcgaacggaggaaacatgtcgcatactcggtgcattagatagatcggatggattggataacgcacgcacgcacgcaatcacgacacacgcacggcggcggatgtcgaggtgatgctgttgatgttgccacgcacccactcgcactcgtattgtcacgaagcatgacgcatcatccatccgcacccactcgcactcgtattgtcacgacgcatgacgcatcatccatcctcacactttaatacctacgccaccaaaacggtggttgggagtttggtttgtttgtcctcgacacacccctgatgtaatgggtttttttgctttgtgggtgctttttctttttgtttaaagcacagagtctcatacaccctcgcggtgtcaagtagactttaacatgtaatgtaatgtaatgtaatgtaatgtaacagcctgggacgcagacgcggcgttggacgccggggtactctttttgaatgacatcagccaccatcgcattctcattgtccattaatgagcgttcctgcctcacggccgatttttctagatttctaatctggatttagagcctcctgaacgactcgctaccttgagacatcagcaccaagaatcacaattccgctccaagaccatgtttcgcaaccagtcaaaatcggccgggaatcaggaacgctcattcattatcacacatgacacgtcggctttcgcatcctcctcgactgtggtggtgcccatcctccattctctcacacgccacggcggctttcgcatcctcctcgattgtggtggtgcctatcctccattctctcacacgccacggcggctttcgcatcctcctcgattgtggtggtgcctatcctccattctctcacacgccacggcggctttcgcatcctccttgtccatacagctagggacatttgattgtgggacaccttttattttggggattctgaaaagttgacgtacatttattatgggtataaagaaacgtgggtgcaatattatatcaccatgagaaaaagaagtagtgtcagacaaaggagaaggggctaaaacgtttgagaagcagaagatggtggtgaataacgtcaaggtccacaaagtactgcactgtcgcaacagtgtcaaaagcgcatccaatgtggctatagtgcaacctggaacctagacgtgaacgctgccaagaaccttcttctgcttctgacaacgtggagcgaccggatgtattctgtgttccctcgcctccccctaaaaccccagtttccagagaggcgagtgtgaagaaaggatctgtgaagaagacggactacgttgcatttattgaatcattgagtttgtgcaataactcagtagtaataatggacaatgctagtatccataagaaattggtcctcagtcaccccgtcaatatttgttacacacctccttacagtccagaattcaatgctattgagctatgcttcgctaaggtgaagagagactttcgacgtttgaactacataccgaatgaaacaaagacgcatgtgtctgatatgatttccttagcattcggcaacctcactgataaaattattatgggttgttttgaacacgtttgggacacttatgtgtataaagcagtctgtgacatattgattatgaaagatggcgacgaaacctccgacagtcgcgaaattgaaggagttactgaaattggctgaagtaccatactcgtcgaagtccaacaaagacgatcttgtccgtttatgcgaagacaatggtctcatcaccagcccccctccagaatacaagacggtggaaaagatatgtgtcgtgaaatgcgccctgaagaaggcaatgagtcttgacgatgaagaatttggtaagtttagggagcatgtggaccagctcgtcaatgtggtgagccgcatgttacggcggtccagtctggtgctgaccttccacataacgagtctcttagagaaaggtctggagattccagacctgtacaacatgaaagatacctactggaaggattggctccgtatcggggtagacggaatcttccctgatgaggaaagcaagatatcgtacgaagctgtgaaggactccatcggaaatgtaattggtaatgacgacgctgactacatcaagtcgtatccgatctatttcgatcaggtattgaactatgcaggtcacacattgagcactgtcgtgtcaaacaacgcatgggttcctttgataccacgtctggccagactcacttccaccactttaaataaattaaatgccccgaagacactggacacatcgaagatcattcggggatacgacgtgatgcgggctattcagcaagaagtccaaaacatggagggatggccagagtctgttcaagagtacgtcaatgaagttagggagatgctaagtgttccagatggaagtcgagtttatgataactatggcaaagacatggactttccgaccatggtccggttcaattattggatacaaaaacggttggaggatatggatgcacgtcgtatccgattgatgcccatcttcaatgtccaacgggtgcatgttcgccttgacctaaagaccctcgtgaacctgttcaggcacatgttccccactgaccagaacatcgttgagctttccaaatgggaacatgtaaagaatcccgacagcttcatgttgccccagaggcctgcacagaagaagaaaaaatcatgtggtcctggtgaatgggaggcatacaagtcggtcctgaagcagtacgatgatgatgttaaggatatcaaggctactgacgagtacagacatgcaaagagtttgtatgacacgcttgtgaacgcccgaaaaacagtcgcaggttccttcttcagaaaaccacctgtcaagaatgggtgggttttcgactgcagcatctgtactgacggagtctccttgagcatgcagtacagcaagacagtacaggtccttgtctcagatctgaagaagacctgtaagaagtctcgtaaagaagaaggtatcaagatcgcagaaaaatacgacagctcacttaaaacgatattgcccgatatgggtatcgtcgtcctgggtgtggacccaggacggagcaacatcgctacggtaacgtatttggcagacggtaaaaataagacatggaagctgacacgtggtgcattttaccacaagtcgggtatcaagaagcagacaaggcagaaggaactgcgttttgctgacatgattcctatgtgggagtctctgcgtgaaaatggaaaagctttgagtacatcgaggacggataatatctcagcgtacttgtcaaattacgctaagttttctgacgagtggtggagattggctttgcgacgccgagaatcccgtgacaactttcagcgttacatcggaaaacgaaaggtcaaagactctttctgggcgggtatcaagcggtgcatgatgaaagaacttcctgatatgaaggtttgcgtggcctacggatctgccatcacgaaactgaagcctactggaccgggagaagttgcagttcccactgggcccatgttcgcatcgtgtaaaagaattttcaaagaggacgtttctgtgacagatgagttcaaaacgactcttatgtcgtgggagacgggtaaagaaaaagaacgtgtttacaagatcccaagcgtttgttcagcagacgtgaagcttaggttgggtggtgaacggtttggtcacacgaaatctaaaacgatgccaaaggtcgctgattgcgaccacttaggggtaaggttgtacaataaacgtaaacgcgcacaagagaagcacaggaggggtggcttcgccacttcccttgtcgattctcaaaaatcgatcgagcggtacccagaggtacgaggactgcgattctctccagaaacatgcatttactcggaccgggatcgctcttctgctctcacaatcgcaaggctgcactgcatggaattgatgggtctaggacgacctcttccatttgcccacagcagctatgttgttgttgatgaataaaaactcgtattgttgtagacaccactcggtcccccctccagtggtcgcgacaacattaggttacaccgcaaggtgtgccgtacacgaagcggtttcatttaagtattccgttgactgtatgagtccctagtcttcgatgacaacacactgccattgtatttcattcggtacaatccgcacgcattcagggtcggtggtgaactacaaaaaacaaagactgtctttcgtcaacaatacttagtggatgttatcaactccatcaattctacaactgttaaacgaatgaatatactgtacatgtattttgattgtgatacactcttagatggaaacattcgattgtctgttcacacagacccagagtataacgatacaatgaagaagtgctgtctacacccagtgtattagtagttacagagaactttcggtttctgaagggcaagggactgttgcaggcgctgaacgagtgggcatggggaaggtacgtgaacacgatcgattccagcgtgctcatgctcaacaacttcacgaacgatgtcaagttttcaagtacggatcgtacatcacggtatatcggatgagaagacactacaaggcgtcaagacttcgcctgaattttctacaaaaaaccattataagactacgactaccgttttccaacgggcatcatcgatgtttgcaagctttccgcagctatcacacttgtgccaccccccctttccatctttccacaaacgcaactgataccttaagttcactgcactaccgcatccatcgcacgacaatgttttcacacgcgaccatttagctccgcatgacacacacgttctgactcatgtgtccacgttgtgtgtcacaagagaggacgcgcacttaccacaacttacttctcggtccatacagttgttctcaaataattttgggacactcagtataatttgaatgatatccccttaaaccagatatgtgtcatggtccgttgttcactacaaataaatattcttttgaggagtctgaggaaggtttgtaatatattctctcgttacacctgtcggtcgacctgtccagaccatgtttcgcaaccagtaaaaaccgttcggtaggctgcaacaacgcccattaaatccttgttctcctcaactgaactcaatgcaagtgtttcttgatgacaagtaccttactgtgcggtcgctagagcgcacaaggatagtgctaccacatataagtcttgcatccaaagtgaacgcatctatacccccgctctgtactagcatcagaacatcctccatcgtgaagaagggtgcaggcgcggacagaccgtagtacacgccggtgctggactcaaacaccaccgagcacggagcggaacggaatacggacgagagacgcgggcagagcaagagggacacgaacactgagtccaacacaggcgccttaattatcacacgcaaatcggatgaagaatccaatgaaggatcaggaacaggaggagttttaggtggcggagacatatcaacgggagaaggaggaggatgtttaggtggcggagacaatgtcatatcaaccggagaaggaggaggatgtttaggtggctaagacaatgtcatatcaacgggagaaggaggaggagttttaggtggcggagacatatcaacgggagaaggaggaggatgtttaggtggcggagacaatgtcatatcaaccggagaaggaggaggagttttaggtggcggagacaatgtcatatcaacgggagaaggaggaggatgtttaggtggcggagacaatgtcatatcaaacgtagaaggaggaggatgtttaggtggcggaggcatatcaacgggagaaggaggagaaggtttaggtggcggagacaatgtcatatcaaccggagaaggaggatgaggtttaggcggcggagacaatgtcatatcaaacgtagaaggaggaggatgtttaggtggcggagacatcatatcaacgggagaaggatgaggaggagtattaggtggcggatacaatgtcgtatcagaaactggtgacgaaacgaactcgcatgttgggcaacacgcgtgtgtgaaaggttcgtatatggagtaagtgcatactgagttgttgccgcataacttaaatggagtattgcaagggggggtcaagtgtatgcagaaaacgctacccaatatactgtcgtagttagacttgatgcttgtcacgacgatctcagcgaaaccagtgtagttgcgaaagtaaattccgccacccttgcggacaccgttgatagacacaagatccacgctcccagaacaaacgtcaaccgtctttatggcaaccttctggaatgtccgacgaagggcagtgcagcagtcgacacctgtatcaggagagatgcaggaattcggtagtacagtgaaacacattaaattatcggaaaaagagggcgcaagaacgtatggactactgctcggtgagctgcaactcggcggtttgcaacttcctgcagggaacctcgtgtacgcgcacgcaggagataaagcagataatagggacgccaaagcaaagcaaactattgcaagtgatcttgacatcaatcaataagaagaaggcttacttacttacatacattttaaagtgggcgttcctgcctccctgcggatgttttggaatttctactccggaacgactcgatatcctgagatatcagcacagaggaacaaaaattacgctccataccatgtttcgcaaccattaaaaatccgccgggatgctggaacgcccattctgtgttaaaaacttatttggtgtaaatcgaaaacgacgtgaatttgtaaacaacctatttcgtttgaactacagaaatttttaaaaatccaccgggagtaaggaacgggcgggcgtgagctcttggacacgttgtttacattacaaaccttcctcatactcctcaaaaaaatatttgtagtgaaccaaaaaaaatattatagtgaaccacaaaaaatattgtagtgaaccaccaagtaaaggtcaggtggcgtgggttaaaggttgcaagggcaacatggagtggcacatggcaaattaggttaaagataatactgttctttaacctcgtgtgacaacatgactacagtcggagacgcaatttgtgggacaccctaccggtgatccttgaacccaatgggtagatcagctaaaggcgagcacatatttttgcacttcatctctgtatttcagcatttaagctggcccaaatgataacaaggcaagctgctgacaaacccaggtgggtcggtcggtttagcgctcacactcgcctctctggaaactggggttttaggggggaggcgagggaacacagaatacatccggtcgctccacgttgtcagaagcagaagaaggttcttggaagcgttcacgtctaggttccaggttgcactctagccacattggatgcgcttttgacactgttgcgacagtgcagtacttgtggaccttgacgttattcaccaccatcttctgcttctcaaacgttttagccccttctcctttgtctgacactacttctttttctcatggtgatataatattgcacccacgtttctttatacccataataaatgtacgtcaacttttaagaatccccaaaataaaaggtgtcccacaatcaaatgtccctagctgtatggagagtgatgtacgtggcaatagggagagtgatgtacacgtggcaagtgctgacgtggcaactgtaacgatagagctagggtaatataaggtaagccctaccaagcagtgccagcctggtagggctcgcctcatcgttcgaacggtgggcaaaaaaactaaaccgccaacaaaagcttttagcaaacatggcaatctccttgtctacctttagggttatcagcatataatgggcgttcctgcctcacggccgatattttaaatttctaatcaggatttagagcctcctgaacgcctctctagcttgagacatcagcaccaaggaatcacaaatccgctacataccatgttttgcaaccagtcaaaatcggcccattatatcagaatatcagcatataatgggcgttcctgcctctcaggcgatttttaaaatttctaatcaggatttagagtctcctgaacgactctctagcttgagacatcagcaccaaggaatcaccaattccgctccataccatgtttcgcaaccagtcaaaatcggccgggaggcaggaacgcccgtagctatctatcagatatcagagatctcagagaatcatcatcagttgattgaaggggggaaaaacgggatcattgatgtaaggaggtttttttgatggactggacattttgtagaaccatcaactcatactgttacgctgaatttagtgctccatcaagcagaaatcgttgaaatcatcttgtaaggatattttgtcaatttctccacaattcctcttgcagttctggaacatagtatacacagtcctgaaaccatcgtagtgggtttctgctgagacaacatggtcttcgtcatcacagaatggcgtcgtagcaacttggtcgatactcgaaaagacgtcgtcacggtcgagcacatagtctgttgttgcaggggtgggggcggttacggctgcagagacaacatggtcttcgtcatcacagaatggcgtcgtagcaccttggccgatactcgagaagacgccaaggtcgagcacatagtctgttgcagcaggggtggaggcggttacggctgcagagacaacatggtcttcgtcatcacagaatggcgtcgtagcaccttggccgatactcggaaagacgccaaggtcgagcacattgtctgttgcttcaggggcggctgcagtggcagtggcagtggcagtggcagtggcaggggcggctgcaggggcatgggtggctgcaggggcaggggcggctgcagtggcatgggtggctgcaggggcaggggcggctccagtggcggttactgcagcatcactacgaatagttcccacaaactttgtagcctcgtccgcgtagattgcgctccggattttacgaagattgaccatgaacacagtcactgcattcttaggagaattctcaatcaatcccattttgcgcatctctctagagacatgttgttgttgtccatggggtgtgccaccatagctttccagctctctgtacagaaccgccttgttgtacgttaacgtatcgtgtttgtacttgactggcaccacgtcgtccatctcgtcgatttggttcgttgtcacctgaatgagcgccagtattgtactgcgcaccatggattccctgctgacttgtccacaattaggcccaacgttcttgaatctcttgagaacaaacgattctcggacgacctccaataccagcatatcgtcggtcaaatcacatgggcgaggaaggtacacaagtgtagggggcggtacatcatgtgcagtagcagtattgcacgccgccttgcaagtgcaaaagtcgtccttcacatatggccatacaataagcatcatgctatcgccacaacgctgttctcctaccacgaagcagcagacttccttctccacatcattgatagtcttcccatcaagctcggccaacgcctccaatatcagagggttgcgtgacgcgtagtgtccaggagtaatatacgaagaagactcagcagccgcgttcatatcttcaggttgagccatgttgttaacccaggtatgttcgtatcacgacgccgggacttggacctgttctgggacagggaatccattgacgatggaagaagatgtatgtatgacgatggaagatgatgattatgcagtttatactaacaatacaacgaatatgggcgaaatgctgtgaatgtgactagtaatacaaccaatgcggttttgtgtatgggaccggcaatacaaccaatgcggttttgtgtatgggaccggcaatacaaccaagtcgattgtgtatggtggggatgcggcaatacaaccaatgcggttttgtgtatggtggggatgcggatgcggatgcggttgcggttgcgtttgcgtttgcgtttgcggttgcagttgctgttatcgatttccaccaccacacctttgtaagcaacagcgcccacaaccatccagcctttcggaagcccatgatggcggtctccacccaccggatgttgattcgcagtcgctcccgcgcatcgaggtgatttccatgggcgtacccgttagaagccgcagtttcgctcgcgtggaatacgcgcgtggcgaaaccgcttttcacacgcctaccatgcgcagtccactcacgtggcgtgaagtgactggaggagcgcataggcgttggccagatgcttactcgccacaagcggtcttcaccagggtagtacagacgcgtgtagaactcagccttcgcgcgatccagtgactccaaacaaggacgcacaacaagaggatattgactcagacccacatcgagtaaccttcccatattagttatattactagtactactaccaaacacagaccgcatctcggtcagcaaaacagcgaatgcaaaacgagccgcctgaggcacgatcgcatttcccaaggcctgccactgaagcgtcagagaccggacatcagcacgagactcggtgccaggcgaacgcgtcacgaggcgaggcatctccgcatccaattttgcaaatggataggacaatgactgagaaatcgaagaggacagacgggtcctgctcaagtaagggaacaacataccagcgtctttgtcacgagcagcgagtacccaaatacgagaccggacgtgacgggcacccatgtcagctgcagatagaataccatagcgcacactaaaaccacgagtctcgaaagcttcgcaaatcgcatccaacccacggtatctcaacgccggagagttctcaagaaagacggcccgaaccgaaggaagaccgtccaaaacatggaatacctcccacacaagtgaagaacgcgtaccggacaaaccaccgcccttcccagccatagaaacgtcctggcaaggaaatgatgctgtgatgagatcgggtccgagagcagctccgacacgagaagaagacgcaatcacatccaacgggtccagtgtggtgacatccgatatgatgggaatccccggaaactgagaggacaacacaccgcacgcgaaagaatcgatctcgcaaaaacaacaaggacgcgccaaccccttcaaagcaacagcatgcccaccgataccactgaacagatccgcgtaaacaagcatgtgtatcaataataaattcaacggcggtttttttcacacaaaatgtcacttgatcagattgaaccggccaaaacggttcagggaagtcttgtaaaggtaatgaacaaggcgatcgtagacctcgtcgggattgctcatgtgcctgctaccagaaccacgctcgaggtgagtacgcagacaattccaaatacattccacgaagtactcgtgacgcgaataccaatcgtcaagcgacatcacggaaggagacctggccatcttcggaaccaacggaggaggatcacgacgcacatgaccttgaacatgcaccatattattcttacttacacacatattgtcatggacccaaaaacctttatgcacgagttcgattattattacagttgtcaaaattctgggtagacatttcaaaaaatccgccatttgttctcaaattatttagtaatacagtaaatacgatgaaggaccttgcgattgcgcttgctttttacacgatcgcggaggccgtttggctcttcgggatgaagggattttacgtggcccaattcgcgcggttctctgtgaatcttgcggtgcaatcttggcttgcggtttgcatggtgtacgcgttgctcttagctgcagcatacttattgttgcgccctaatccatcggtcaggatgggcgcattgttcggggggaccgtgtacggcgtgtacaacctcacgaacaaggcgacgatacccgggtactcgtgggggatggtggccgtggacaccacatggggagccttagttttcgccacagtatcttacattttcaaacggttccgctgaaaaaaagtatgagaacaaatgtagacccaaaaacatgtcaacacacgtcatctcaaaaacaagagagttgctgcacgcgtgggaaaggttctgcgaccaacaatccaaaatgcacgatactgctcgagcacactacaagtttttacaactatatgatcgcaatacctgcaatcctacttacaacaataagcggagcaggaagtataggaatttcgagcaatgaagtagcactatcttacgtaatgggatcactttcactaaccgcaggggccatgttctcaatccatcgttacatgaacattccagaactacaacagttacacgatttttacagcgacgagtttctaaaactgcgcaataacattcgccttcatctagttatcacagacgacgaagacaacaaaacgttctcttcacttgtcgaattcagcaaacacataaataccattcttggacaactgcatcgacaaatcaccatcattgcccccccatggttgtcggtttgaaaaagaaaagtatggggaataagttctactcaaaaaggatgtttaacgatgattcatacgctttgtcgaacataaagaagatagaacaaacccaatgtacagtcgacggaatactaaaatgaaaccgcctcgtgtacggcacaccttacggtgtaacctaatggttagcaaccaatggcgttcctgcctcccggccgatttttttaaatgtctaatcaggatttatagccctttgacgactcgcctaagccttgagatcatcagcagagcaggaatcacaattccgctccatcaatgtttcgcaccagtcaaatcggccggatgcaggacgcccattaacccacgggcagtggaacaccaataacgatttttgaatcaagaatgcaggatgttaacgagaatataccgtggcccaaaagaacacgtggtctttgttgatgtgcaatgtcatgtttcattttactgttccgccgactgtagacatattcatatcaaaataagcatcctcatcatcccatacttgaaatgacactgttgaggacaagcgtgcgcttagccttaatctggatacgagtggaagcaatgtcagactcggtatccgacaactccttgtaaagactcgccaaaagaacatttgcacgtgtcaaccgattgtcccagttacaaacacatccttcaaaacacaaccttcaatggtcagggtgagatctggggtccgccatttgtgctcgcaatggaattcatatgtgcaactcggaccgggcacgctccagctcatactttgaatgccctctgttcattctgagctccgaattaagtcgtctccagctcagacttggaatcccacacgctcttgagctccgaatatacaatatcaatctcagacatcactcctgaaagctcggacttcgtgttcgcaagctcggacctcgtgtccacaagctcggacttcgtgttcgcaagctcggacctcgtgtccacaagctttgccaactcgtcctccaacgaagaaccatccgcccgcgcatgcacaaccttatgccgagtctcctccaccgacaaaagcgtacgctcaagatcagcattcgcatccaccagctccgcaaaccgcaccaaccgacgagcgtcgcgtctccccaaacccacaccgccactcgatctcagacgaggcgcacgcaaccgctccctaagttcttccaaaccagctcagcctcacacgagagcccccatcacggaaaccaaccaactcgtctttcatgacctaatctgtccggagcggcagaccgtgcttggccgacagcttggtccttggtgacgaatacgtttcatctccaacgaaatctctagtcaccgcgacgagacgacaagctcatccttccccttgcca

SEQ ID NO: 202 - DNA, 22379 bp, unidentified
  misc_feature 1..22379: note = Fanzor polypeptide
  source 1..22379: mol_type = other DNA
gcaaaaaacccagtgtagcctcgtgggacattgtctcgagtaacccggacaaaccatgggactggcgtggattgagtttaaaccccgggatagccacctgggacattgtctccagtaacccggacaaaccatgggaatggaattggttgagtgtaaaccccggggtagccacgtgggacattatctccaggaacccggacaaaccatggaactggtatgaattgagcacaaaccccagggtagcaacctgggacaatgtcttgagtaacccggacaaaccatgggactggcgtggattgagtgtaaaccacggggtagccacgtgggacattgtatcgagtaacccggacaaacaatggaattggtattggttgagtgcgaatcccagggtagccacatgggacaatgtctccagtaacccggacaaaccatgggactggcatttattgagtagaaaccgcaacatgttggtatccgtccaagacgcgtaccgtttagtgcgaagacgcagagccgcagcgactattcaggaaacatggagacacgtgaatacaaacccgagttatgttgtgtgccgacaccgactcttgaaagaattcagtacactcccgtaggtgagtacaatgcaatggtcgaaacagtagggcgtcccacaaatccgtacttggagctacagtcggcggaacagtaaaatgaaacatatatcagatggaaataaatgtacgacatcgccgttagaaaattggcgttaagaatggtcgctgacttgggtgtgttaaaaacttctgtgtttacgaacatcagtcgttctactctgtggaggtggaaacgctttggtgtaaatcgaaaacgacgtgaatttgtaagcaacctttttgagacgaataaggatttgttaaaatcgtttttattgtcaactcaatgcacaaccgcaagaggcgttgttgcttttttcaaaagtactcacaatgtacgattatcaactaaaacagtgtatcgtttcataaaactcattggttttacaagaaaaaggagcaaactccgtggacagtgcaaaggggacttagttccacttgtcaatgaattttgtagtaggtacaaggaaacaatcaatgctgggaaaattttagtattccgtcgagtgtagttagcatatttatatgggcggtaatagcttacccagatacagatacagatgtcgccgactgtccgcccaacaaaaatattccttcgtcatccaacttttccggtgtccgtgatgtacttgtaataagatccatggctcgcagcctgagttttactgatgcggcttgttgttgatggtctacaacaacataaacgaatggtcccactttatttaattgcacacaataatgctcgacgccgaaattaagagtcacatactggatcgagtcaaatccggagaatgcaaatgggattggggtcacttgagtaataatccatacctgacatgggacgtcgtgtcgagtaacccagacaaaccgtgggattggagtaatttgtgcttaaaccccaatgtcgtcacgtgggacgttgtgtcgagtaacccggacaacccatgggactggcatttattgagtgcgaatcccagggtagctacgtgggatattgtctccagtaacccggacaaaccatgggattggtattggttgagcacaaaccccagtgtagcatcgtgtgacattgtctcgagtaacctggacaaaccatgggactggtgtggattgagcttaaactcgagtgtagactcttgggacatcgtgtcgagtaacccggacaagccgtggaactggtgtggattgagtgtaaaccccggggtagacacatgggacattgtctccagtaacccggacaaaccatgggattggtattggttgagcaaaaaccccagtgtagcctcgtgggacattgtctcgagtaacccggacaagccctggaactggtgtggattgagtgcgaatcccagggtagccacgtgggacattgtctccagtaacccggacaaaccatgggattggtattgcttgagcaaaaaccccagtgtagcctcgtgggacattgtctcgagtaacccggacaaaccatgggactggcgtggattgagtgtaaaccccggggtagccacctgggacattgtcttgagtaacccggacaaaccatgggattggtattatttgagcacaaaccccagtgtagcctcgtgggacattgtctcgagtaacccggacaagccgtgggagtgggatggattgagtgtaaaccccggggtagccacctgggacattgtctcgagtaaccttgacaaaccatgggattggttttatttgagctcaaacaatagttgcgtggtcacatgggacaatgtcttgagtaacccggacaaaccatgggactggtgcagattgagtagaaaccgcaacatgttggtatccgtccaagacgcgtgccgtttcgtgcgaagacgcagagccgcagagacgattcaggaaacatggagacacgtgaatacaaacccgagttatgttgtgtgccgacgcagactcttgaaagaattcagtacattccctacactgcacacgtaaacaaatccaagaaaaacacaggaggggtggattgcccccctctcttgtcgacaacaactcgatcaagcggtacccttaggtacgaggactgcgattctctccagaaaccagcacttactcggactctactcgcacaatcgcaaggctgcactgcatggaactgttgggtcaagggagaccgcttccattttgcagggggtgcgtgttgttgatgggctacaaaaaaacatgatggtgttccactgccccagtgggttgctacaccataaagcggtttcattttagtatttgagaacaaccgtgagaacaataatgcacggcgacgaaattaacagtcacatactggatcgagtcaaatccggagaatgcaaatgggattggggtcaattgagtgataatccatacctgacatgggacgtcgtgtcgagtaacccagacaaaccgtgggattggggtaaattgtgcttaaaccccagtgtcgtcacgtgggacattgtctcgagtaacccggacaaaccatgggattggtattggttgagcacaaaccccagtgtcgtcacgtgggacatcgtgtcgagtaacccggacaaaccatgggactggtgtggattgagcacaaacgccagtgtagcctcttgggacatcgtgtcgagtaactcggacaagccgtggaactggagtggattgagctctaacgcgagtatttcgtgggacatcgtgtcgagtaacctggacaaaccatgggattggcggggattaagtgcgaatcccggagtagccaattgggacatcgtgtcgactagcctggacaaaccatggggttggtatttgttgagcacaaaccccagtgtagccacatgggacatcgtgtcgagtaacctggacaaaacatggaattggtggggattgagcacaaacaccagtgtagccacctgggacatcgtgtcgagtaacccggacaaaccatgggactggtggggattgagcacaaaccccagtgtagcctcgtgggacattgtctcgagtaacctggacaaaccatgggattggcgtggattgagtgcgaatcccggagtagccacctgggacattgtctccagtaatccggacaaaccatgggactggcatttattgagtagaaaccgcaacatgttggtatccgtccaagacgcgtgccgtttagtgcgaagacgcagagccgcagcgactattcaggaaacatggagacacgtgaatacaaacccgagttatgttgtgtgccgacaccgactcttgaaagaattcagtacactcgtaggtgagtacaatgcaatgggtcgcaacagtagggcgtcccacaaattgcgtcgccgactgtccgcccaaaaaaaaattccttcgtcatccaacttttagctacagccgggcattgtgggtggctgccaaggaaggtcactcagatgtatgcaagatgctcatggatccagttgttgctggaattgagttcagggcccttgcgaactcctacaacagttgggcattggtggcggctgccaaggcaggtcacgtagatatctgcaagatgctcatgaatccagcggtggctggacttgagttcagggcccgggcgaactctagagacagctgggcattgtgggaagctgtcaaagaagggcacgcagatgtctgcaagctgctcatggatccagatgtggctggacccgagtcaagggccagggcgaattctgacgagagcagggccttgtgggcggctgtcaaggcaggtcacgtagatatctgcaagctgctcatgaatccagcggtggctggacttgagttaagggcccgtgcgaactcctacaacagttgggcattgcattaaggcaggtcacgcagatgtctgcaagctgctgatggatccagcggtggctggccctgagttctttgcccgtgctaactctgtcaacagcggggccttgtgggcggctgccaaggaaggtcactcagatgtcttcttgctactgatggacgccattgtgaagcttgacaacaactggttcttgtcactgtaatcccccaaatacaaggtgttccactctcaaatgtccatacagctgtagtttagtataaagaatgaatggccaaataaaacacattcattggaatgaaaaacattgcattgcatggcatggcatgcctccccagggacatccagatcagaatattgtctcagtgcaatatggacatacgccgcatatgtgggataaaaccaggaaagatgcaactgccctcacaattgcagcagaagctagatgacatccttcagagacaaatacaatacgtagccaagtggaaaactgcttacaactaccttcgagcaggccatcataacctttttctaatgtgtttatgtagtctcacacaccatgagattactaaaaccaaaccctggtgagctcatgatgccccgaagtttgttggagaagcaagtcgccaaaaaccatccactgtaacgcaaacctcaaaattggttatgattcttaatgggatcaattaatgggcgttccttcctcccggcggattttttgaaacgtctactcataatttaaagccgttgcgacctccggaacgactcgtcacaagtccacctcaaagtacaactcagagctgggaaggtcaaggaagacatgctgtctccaaacaccttccatgggactgtctaccagtgctatttgtcgttcatctaccgacatactcatcaacatgcgaatagaaatttcagacggcaacaccataaagcgaaggccatcttcatgcggcgaggccgcaccaaagcctgattcatgattgcgggatacgactgcatcactcaacaagtagtcgtcagcagacgccaaggggactgccactcctacgggtccatcattgaaagcccatattgataatatcttgaatggtgagattggctccctcttgtacgcagccctcagctgcaggtgctcaccaagctttgcagatgctgttcgcatgatgtcagcaactgaagtcgtaccagggtcaagcgtaacaaaacaacggtggatggacttctggaacggatttccaggcgttgcaagtcgtgagaggtccaacttgggcacaaatgacaacatcattcttctggtatccatttggacaatctgtcggcaagacaaaccgcgggtgtcagtgccatctcatggagcatcatgacatcatcgcatgcacagctcagcgcaattccatgcagcatgaaattgccaacgaggcttcaaaagccaccgtgtcgtgggtgagaatgaatgaatgagaatgtacggacggggggatgcgcaagccgccatgtcatgtgtgtgtgtgcggtctggacacctctgaaaagaacgccgtgcggtgcactgagaaaaaataaatttaggtcaaaaaccttgaggaacccttgcttggctgatggtgccgccacagtgaggccagaaagtttgaggctttcggtgtaatcgatgcaacgtcggtcagtgtgtgggaagaacgggtcttcaaagaaattgcaagatgtgccgcaatatttgaagacaaaaatgaacaagctcagttttttttgcgagaggaactgaagtggaacaattttacaggacataaatacttccagtctttacaatcgaatgcaaaaaatgtttatgctaagcacaatagaccgtatctttgtatcaaggatgtctctggtaagaagcgggaatgatgcttgaatgttcagatagccacatgcatatgccgatcaaaccatacaatacaaacccgatttataatgcgtgtcgacgtagaatctttagggaatataatgaaatggacaaatcgggccattggccagtataaagatacttgtgggtatactattatttagttatcataaaatttacaatcataatttttatgataatgattacagcggaaataaataaccacatctcgagaaggctcaaatgcctagaacacaagtggaagtggagtttattgagttataactcatctttaacgtgggacattatcgaatgcaatccagacaaaccttgggactggtattggatcagcagaaacccttgcatcaaattggcgtttgtcaaagcaaaccctgacaaacattgggactggcgtgggatgagcggaaacccagatatcacatgggagattatacaagataatccaaacaaacaatgggactggtatgagttgagcgcaaaccccaacatcacatgggacattatcgaatacaaccccaacaaaccgtggaattggttttggatcagcagaaaacccgacatcacgtgggatattatcaaagccaaccccgacaaaccatgggactggcttggattgagcgcaaaccccaacataacgtgggacattgtcaaagccaaccctgataaaccgtggaatatgtataggatcagcagaaagcccaacatcacgtgggatattatacaagacaaccccgatataccatgggattggcgtggattgagctcaaaccccatcatcacatgggatattgtcaaagccaacccagacaaaccgtgggactgggactggatcagcagaaaacccaacataacgtgggatattgtccaagcctacccagacaaaccatgggactggcttggatttagcgcaaaccccaatatcacatgggatattatcctatccaatcccgacaaactatgggacttgtatgagttgagcagaaaccccaacatcacatgggatataatcgaagcctaccccgacaaacaatgggactggtttggattgagcagaaaccccaatatcacatgggatattgtacaagccaatcccgaccaaccttggtgttggtatgaattgagcactaaccccaatatgttgctatcttcccaagacatatatgatatcatacgcagatacatggcagtaagaactatacaaaaaatatggcgacatgtcatcacaaacccgagttatgttgcatgtcaaaacagactctatatggaatataatgaaatttacaatcttaattttttataataatgatatcagcggaaataatgtgccttgtaagaagcgggaatgatgattgaatgttcagctagccacatgcatatgccgatcaaaccatcgatgtcccagcagatggtgtatccggaatgttccaccagaaagcaaggagtctgcgaaatccgccgtggcgtgtgagagaattaatggacggatgtgaaaaaaaatgggtgcgaaagccgcatgtgaaaaaaaaattgactgaattgtcataaaagaaaccgataaccatctacaaaatacccacaaacacaatggcaaactttactgaattatacaacgatgttgccaatgacacttcgggcattccgtcggatccattttgcgatcgcgcaagagaactcattccgcccatggcgcgcgtttggaaggtacttgcaaagctcgccgttcaatcgtgggacaacgaaatacaacaggtctgccaatggtcaactgctatgactgccaaagacttcacagacggaaaccacgccaagctgtttatcaaccatctgattacagaaccgccggccggattcacatgctatccccgcttccaaggcatgtttcttggtttggaagccgtcttcccgtacacttcttggtgttccgtagattacattaccctcacaagcaatattttaagcagcctgttcattgagttggatgagttcagtatcaattgtgtggcatctgatggattcgccaatcatgaatgggacattgtacagaacatagcgtcccagtggttgcgagcgtggtgctcggcgcgcaagatccagcgcacgtaccgcaagtacatcgagtacaaagagatccagcgccaaaagcgccttctcatcacaatccccaggatcgtgtcattgctcaaggattgcatgggtcgcgaataagtaattattcgagaacaactgtttttttttaaccttcgatgatgaagacaatatccggtttaatgctcagaaaatgtagaaatgttctgtgaaagtgtaccgaagatctctctttcatcctcgaagtccagacactgcatcacccggctcggatgccaggtccgacgaatgagctcctccctgatgacgtccagtgacgctttcttcatccggaccatgacgcgccagtcgggccattctgtcgctatgaagatcatcactttgtcgtctgagtgggaagtgtagttgagtaccaagcatgcaaacggtacattattaatctcgtcgagcgcttcgcaaaaaagattgaacgtggggaatatcccgccgtataaattgtacaatcgcttccgagtgctctcgatcatctccctgaagataaatatatagtcgacgctcatgatgagatagggtggcactactacagtcggcggaacagtaaaatgaaacatatatcagatggaaataaatgtacgacatcgccgttagaaaattggcgttaagaatggtcgctgacttgggtgtgttaaaaacttctgtgtttacgaacatcagtcgttctactctgtggaggtggaaacgctttggtgtaaatcgaaaacgacgtgaatttgtaagcaacctttttgagacgaataaggatttgttaaaatcgtttttattgtcaactcaatgcacaaccgcaagaggcgttgttgcttttttcaaaagtactcacaatgtacgattatcaactaaaacagtgtatcgtttcataaaactcattggttttacaagaaaaaggagcaaactccgtggacagtgcaaaggggacttagttccacttgtcaatgaattttgtagtaggtacaaggagacaatcaatgctgggaaaattttagtatcagttgacgaatgtgggtttagtgagcgtctcaagccacattatgggtattcccctgtaggaaaacctgttatcgttaaaactactggtgagtgggtacaccacagtttgttgatggcagttttttcagatggtaggaaagaattcgttgtgaagaaaggatctgtgaagaagacggacttcgttgcatttattgaatcattgagtttgtgcaataattcagtagcaataatggacaatgccagtatccataagaaattggtcctcagtcaccccgtcaatatttgttacacacctccttacagtccagaattcaatgctattgagctatgcttcgctaaggtgaagagagactttcgtcgtttgaactacataccgaatgaaacaaagacgcacgtgtctgatatgatttccttagcattcggcaacctcactgataaaattattatgggttgttttgaacacgtttggaacacttatgtgtataaagcggtctgtgacgtattgattatgaaagatggcgacgaaacctccgacagtcgcgaaattgaaggagctactgaaattggctgaagtaccatactcgtcgaagtccaacaaggacgatcttgtccgtttatgcgaagacaatggtctcatcgccagaccccctccagaatacaagacggtggaaaagatgtgtgtagtgaaatgcgccctgaagaaggcaatgagtcttgacgatgaagaattcggtaagtttagggagcatgtggaccagctcgtcaatgtggtgagccgcatgttacggcggtccagtctggtgctgactttccacatcacgagtctattagagaaaggtctggatattccagacctgtacaacatgaaagatacctactggaaggattggctacgtatcggggtagacggaatcttccctgatgaggaaagcaagatatcgtacgaagctgtgaaggactccatcggcgatgtaattggtaatgacgacgctgactacatcaagtcttatccgatctatttcgatcaggtattgaactatgcagctcacacattgagcactgtcgtgtcaaacaacgcatgggttcctttgataccacgtctggccagactcacttccaccactttaaatagattaaatgccccgaagacgctggacacatcgaagatcattcggggatacgacgtgatgcaggctattcagcaagaagtccaaaacatggagggatggccagagtctgttcaagagtacgtcaatgaagttagggagatgctgagtgttccagatggaagtcgagtttatgataactatggcaaagacatggactttccgaccatggtccggtttaattattggatacagacacggttggaggatatggatgcacgtcgtatccgattgatgcccatcttcaatgtccaacgggtgcatgttcgccttgacctgaagaccctcgtgaacctgttcaggcacatgttccccaatgaccagaacatcgttgagctttccaagtgggaacatgtaaagaatcccgaaagcttcatgttgccccagaggcctgcacagaagaagaaaaaatcatgtagtcctggtgaatgggaggcatacaagtcggtcctgaagcagtacgatgatgatgttaaggatatcaaggctactgacgagtacagacatgcaaagggtttgtatgacacgcttgtgaacgcccgaaaaacagtcgcaggttccttcttcagaaaaccacctgtcaagaatgggtgggttttcgactgcagcatctgtactgacggagtctctttgagcatgcagtacagcaagacagtacaggtccttgtctcagatttgaagaagacctgtaagaagcctcgtaaagaagaaggtatcaagatcgcagaaaaatacgacggctcacttaaaacgatattgcccgatatgggtatcgtcgtcatgggtgtggacccaggacggagcaacatcgctacggtaacgtatttggcagacgataaaaataagacatggaagctgacacgtggtgcattttaccacaagtcgggtatcaagaagcagacaaggcagaaggaactgcgttttgctgacatgattcctatgtgggagtctctgcgtgaaaatggagcagctttgagtacatcgaggacggataatatctccgcgtacttgtcaaattacgctaagttttctgacgagtggtggagattggctttgcgacgccgagaatcccgtgacaacttgcagcgttacatcggaaaacgaaaggtcaaagactctttctgggcgggtatcaagcggtgcatgatgaaagaacttcctgatatgaaggtttgcgtggcctacggatctgccatcacgaaactgaagcctactggaccgggagaagttgcagttcccactggggccatgttcgcatcgtgtaaaagaattttcaaagaggacgtttctgtgacagatgagttcaaaacgactcttatgtcgtgggagacgggtaaagaaaaagaacgtgtttacaagatcccaagtgtttgtttagcagacgtgaagcttaggttgggtggtgaacgttttggtcacacgaaatcgaaaacgatgccaaaggtcgctgattgcgaccacttaggggtaaggttgtacaataaacgtaaaggcgcacaagagaagcacaggaggggtggcttcgccacttcccttgtcgattctcaaaaatcgatcgagcggtacccagaggtacgaggactgcgattctctccagaaacatgcatttactcggaccgggatcgctcttctgctctcacaatcgcaaggctgcactgcatggaattgatgggtctaggacgacctcttccatttgcccacagcagctctgttgttgttgatgaataaaaactcgtattgttgtagacaccactcggtccccctccggtggtcgcgacaacattaggttacaccgcaaggtgtaccgtacactcgagtgtatgtagatcatcactttgtcggctgagtgggaagtgtagttgattaccaagcatgcaaacggtacattattaatctcgtcgagcgcttcgcaaaaaagattgaacgtggggaatatcccgccgtataaattgtacaatcgcttccgagtgctctcgatcatctccctgaagataaatatatagtcgacgctcatgatgagatagggtggcactactacggggaccaccatcaccatcaccatttttgccctaaagaatcgcccgttcatgaacaaatatctgatcgattcgtgcttcgtccatcgattgttgtaaatgcagttttcaaagaggatgcagttggctttattttgttgcttcaactgtttccactcagtcttctgcattgcgagaaaattgtcgacgatatcctcagcgtactcaatgtgatgtgcgatgtgtgggatgctcgggatgctctcgggggcgtattcttgtttgtccatctcagtcggattgataatctccgcgtgcgagcagttcaggtgggggagcaattcctttaccagggaagtctttcctacgtatcgctttccgatgatgatgatgttgtgcatttcactcgcatgttcgtgcgggtcaaaactcttgaatcgagtcatcaatacaaattcttcaaataaagtggacatcccttacattcgattggagtcagatggacgagaaggaggcgacaggtttccgcagtttgcggttggtaattcggagaagcctcaaagttggcgtgtggtggatgattataaggtgtgtccaactttatttgagaacaactgtaagtgtattatggcactttgatgcgaccattcctgcccgaagaatgaacgattcatcaggggataatatcattcaaattatacagggtgtctcaaaattatttgagaacaactgtatgctcaaggcgacagccaagcgcagtggggtgtctttcttcgaacctgacccaaccttgtttgatgctgtgcacaaggagatgagaggcatagcgggagatgaggcgatgtttagcatcaccgtgcccaacgtggacttgccagtcgaccttgggttcactcaggactttgatctgaagctggcgattggggacgatggagatgtcgtggtctgcggacggcactggactttgtttaccactgtcacccagcccatggcagactttgaagcggcgtatgggatcatgcaacagactgcaatggtctcttgtgcggcagctgcagcagcggaaccaccgccgctcgacatcgacgactcctgcatgccattcgataagcttacatatgcagtagttgtggcactggaggagatggtggacaacagctgctgccccaacacgcgtgtgtttgcgtggctgtatgccaagcacctgcgggcagccgacatggatttcatggacttgctgcaaactccggccatcgccaatatggcatctacagcgctggacgcctggtttgtgcggcacccgatgttcagggcacaggcgcatgaggcacaggatctgctgatcactgtgctggatgactacacgccatcgcgtccgcggtacgagccatactgggtgagtgagacttaatgggcgttccttcctcccagcggattttttgaaatttctactcagaatttagagtctccggaaagactcgctagcttgagacatcagcaccaaggaatcacagatccagtaaaaatcgaccgggaggcaggaacgagcattatttctcaatttcttcatgtctcatttctcaatttcttcgctcgacaccgaaattaagagtcacatactggatcgagtcaaatccggagaatgcaaatgggattggggtcacttgataatctaacccagacaaaccgtgggattggcgtaaattgtgcttaaaccccagtgtcgaccttgggttcactcaggaatttgatctgaagctggcgattggggacgatggagatgtcgtggtctgcggacggcactggactttgttcaccactgtcacccagcccatggcagactttgaggcggcgtatgggatcatgcaacaaactgcaatggtctcttgtgcggcagctgcagcagcgaaaccaccgccgctcgacatcggtgtaagtagtcgatgtaacaccgcagcatactactttgaagtgtaaacaacacagcgtacccttcttcattgtcagcacacttcacaaacactacttctttgcgacagaggacgcgatgctcattccagatgtaataaaagacaattggtacaagggagactacggtctgggccaggtcgcgcacttcttgttgaaagggtccgtgaagaagactggggctggccgcggaggctactacatattcgaggaggacacgtgccagtgggtcaaggtggatggagggagggtgaagagcgtggcggtcgaggccatggaggcggcgctgagggatgtggacgcctggatatcaacctcgatgatggtagcggacctggatttgaagagaagagaagttttaaggctgatccggtacacaaggtctcatcgcggagtgacaaacgtgatggccttcgcaggcccgatgctgagggacgagacgttcgaggtgggtgggggaaatgacactgacgatgatgatgatgatgacccgtcctccatcacagagatggtgcttgcggagaagttccggtacgccgccccagaattcttcagacgaatcaagtttgtgccagaggtcaagaagaaagaatgtgtaggcgacatgtattactgcgaccccgctaccaatcgctggtcgaactgcagcaacaccaagataaccaacgcaatcgcaaccgagttcaactccaaattcccttcggagaagaataacaagaagattcggttgtttttagacacggtgcgggggcgctctgcgtccttcaatccgttgcatgtctcgtcctaggacgagacattcgctgataacctagataacaacccggatctctttgcggtcaacaacggcgtcttcgacagctcgtcgagggacacagtcgtgttccgaaacgtcgagatgaccgacaacattagtaggtgcgccaagtgggattaccagggagaggacaactaccacctccaacgatgcaaggaggagctagatgacttcttgaggaaagtcatgcctgtggacgaggagcgtgacgtcgtgctcgcattcttcgcggggctcctgtccggtcgccgcaaggagaagaagttcctcgccttcaccgacaagacgtccggggacaacggcaagagcacacttatggccctactgggtagcttcttcgacgagtacgggagcagcaatgggacaaagtttatgacgaagggatctttcgccaggagtcgtgatgaccacgacgcgggtctcaagccaatgaagggcgtgaggctactggtggccgaagaaatgaaacccaacatcacgctggacgaggcgtttatcaagcgcattgcggggggagagggtgtgcgtgtttgcgggagctcatgtgacactgggaactcattcgacttcttgtggcaggcagcgctttcgtaaagaggatggtcgtggtaccaatgcgatccaactttgtgctacaccccgacccacagcgcgagcacgagtttgagcgccgcgacgaccttgcagatgccctgccaacttggcggtctgcgctggcgcagctgctcatcgatcactttcgtcgaccggggcgctccagcatcttcgacaacttgccggtctctatgaccgagtggaaatctggtattgcggactgcgccaaccccctgactgagtggctagaggaggtggtggagatgacgggggcgtcttcggacgcggtgtggatcggggacctcaaggtccggtggaaagagtcccactatggtgaagtttcagtcttcagcacgaagctggtcaaggcgttctttgtgggcaaacagggaaccgagtggaaagagactggaagaatcgatacgaaagtcaaatacggggtgataagggggtgtaaacttggcaaagtgaagtgaagaacaggccgtgcgatggcttgaggtccggtggcggctcggccacacatcatgcatgcccagtggtcgccgtgtgactcgacatgatccgccgtgacgagagtggtcaaaaaatccaccgggagggtttttttcattcaaagccaatataaaacataaacaaatggatattagtattgacttcttgtgcaacggtaagaaatcattgcaacctttgatgtgggatatgcttgcggccgggggtaatgaatcttgcaaggagcttttaaacaccttccgagtagcttatgctaccggtctgatcgattacatccgccagatgtgtggggatgatgtttgcaacccgaaacaggtcgggactgtaaacgtcaactactcttctgacatcgacgtgaatctgaacttcaatggggaaattctgcataatgatttggatcgcatcgtattaattttcaaatcaatcaaagattaccattatcaacgcttcaaacgtaatttcaccgacatgtttgatatcaacatttacggatctcatttcggcatgctcaacaaccccaagagcgcaaaaagcaaggaagagatttaccttatttctaatgatccgcaacaacgtctctttgccatgggtaagttggcaatcatgtgcaaatggagcgatagagaagacatgttgaaggccagagatttcattaagaagcagccgacatacaacagtaataacaatgagaagttgtacacttcttatttgaaaaagtatttcgcaattgatagaaataatacgacgactacgacgtcgctcggggctgtatccggtatagtgaaggtgggtcgtattttctcgatgacgaagctccttgagaacgatgtttactggtccgttggtgcgtttctccatattgtttcgggaaggaaggaccttacagagagcatgtacgtggactcgatgttggacaacacggggttcattgtttccaatttgcgtaaaaagcacgtttgcaaaaaagaggtttccccgtacaccactgtgctccgggttgcaaagtacatggagagggtcctggatgcttacatgttgtgtcgacatgtcaaatcagaagcccacttacagaaattattgaccatgtgctctaagttgaacattgagaggaagagaaacgtgattgacgatgaaacgattaataatgtagatacgttcgtttcattgttgggacttaagatgtcgaatcggatatcgtttttgaagtttgaaaagaaaattgtggattttgccttcgatctggtggacaatttacactagtttttatgaaaaacatgtgtactcgtttttcgaggaacggacggcggatcatgcgagtcacacggcgaccatgcagtgaagtgcatcgtcagttaaaacatatgtcaagcaaggtctacttattttcggaaaggaaacctgttctgagcaaacacgacggttacgcaggcgaccgtcccagacaccaaggccgcaattcccacgatcgctagcaactgctgctgttgctgttgctgttgctgttgctgttgctgttgctgttgctgttgctgttgctgttgctgttgctgttgctgttgctgttgctggtgctgttgttgttgctgttgctgttgctggtgctggtgctgttgctgttgctgttgctgttgaattggttgagaattctctggacaagcggctcctccgcaagggagccatgagttgttcaggctccggaggcccaagtagtaatatgggtcaacgtagctcaacgcggaacgcggaatgttgtatcggtcgtcgtacacgcttggatacgagtagcgtacgttctccgtgtgcgtgtggtgcgtgttccctcctcccccccaacctccgttgccgctgcctccaccaccaccaccattgttgtttgtgttgttgttggtcacggtgatgttactgggatgtggtggtggggggggctcggaagcgggcggaggaggctcggaatcgggtgaaggaggctctgaagcaggcggaggaggctctgaagcaggcggaggaggctctgaagcaggcggaggaggaacatctccttctgaaaattgctctcggatgtactgtgaggaaacgttacggcagttattggtgatcagggtaatcactgacgccaacactacaagaataatgaagattgctaccaaccaaagccagatgccagggactcccttggacgaggttcgcgctcgcgaagtgaccatattgtatgtatgtatacatttgttctcaaataattttgggacactctacaaatattttttgaggcttttacgttccacgatatccaataatccagtccgtgtcgtctgcgtgttgatggattttataaaatcgtattgttgtagacaccatcgcacagagacgtttcatttatatattctgttgagtgtaaatggatatcatccctcggattcaccaccagcgtgggaggaaaaggcaacgtccagagttcaaactcagagaagagcttataaaccgcaataggggcaaacacatttggaaatgtggtctacttgaaatgtcagaattacaaccatacagatgcatgaaatgcaacctgacaatggcagagctgcaggaacttggcaacactggagtttgctcctcggaaattgactttacaagcaccgtgattgccgaggatggccgactgttattggatttaggcacatccatcgtcatccgtgattggatagggtagagcgtttattttttcgcagagagcgtttattttttcgtagagagcggccaagaaatttgttggtcgctctctactatgcggtttgctggtccctgaactctttcttgaggtaaaaaactatcttccgaattcgaatgtgcttctttatattcatcatctcttttgaatcagttttacaagggtcggatgcctgtccctgaccaagcattctctggtgagtacgtaccattgttttgcggacacctgtgtcgatggatgcatgttatctaccaccccaattttttgtattactattattatattcaaaaacgtacacctaaaaacgccacctaagaactctactcataactatactcataactctaaacctcagcagaatggaggaggtatgttctcaaccactgtgacctcaaagacggtgcagaaggaactagcaaagatccccccaggagacctcatcaaccgtatgagcatcaacatcaacacaaaccaaatcaagaagacctcaaccctagaagagcaggatgcaatcacaaagctcgtgcagatcatcgagacagctacgaagcagaaggatgatttcgataaggccacacgcgacttctataccgtctacgataagctcaagattgcaatcatagaagcgtgcgacaccggccccaagttgtgcggcaccgttaacagcgcaatcaaggcccagaagaagaactcgtaaatttcccgacaataaaaacacacacaaaatgtagacgcgacgcaaaaataaactatgcactacactcccgacgccgcagccgcacccatcatggacgcattcttcaaggaacgcgagaaacacttcgctacacaacatcacatcgactcgttcgatgacctactaggaacgtgtctaagagcgatcgtacgcagcatgaacccaatcacaatggttcgcgaagaccccaacacgaaaaccaaacacactgtgaaggtgtacgtaggaggagacgaaaaactccgccccgatcacgacgtgcacataggagacccaaccccgactctaccatcacaagcccgtatagcaaaccaaacgtacggtgcggacatcttcgcagacgtccacgtggtctatccggacgacaacgacgagacacgagacttcgaacgcgtgcacatcggattcatgcccatcatgatccactccaaagcgtgctctctaagagggctaaatccgcaccagttacgagcacgaggagaatgcccatacgatatgggcggatacttcgtaatagacggacgcgaaaaggtcatcgtgacacaagaggaacgcgtcccgaaccgactctacacacgacgcggagagaaaatagaatacgacaaactcatcctaaaagcattcatcaggtgcgtgtccacagacgcacgcgacgtgttcccacgcacaagcgtcttccgagtcatgacttcgggtgaaatcacagccacggtcacccacatcaacgaaggacccgtgcccgtcacaactctcttccgagcactcggcatcgaaagcgatcgcgccatcctcaaaaccatcttccacgaagatccaggagaagagagaaacaaggtcgaaatcgaattcatgcacgcatccatagcctcaggacacaagtccggagtaagcagccagagaggagccatagatttcctcataccacgcacacgattcaagtcccaactcgacctcaaaagcgtcctcacagacgacctcttcccaaatgtaggacgcacgttcgaggccaaagcaatcgccctaggagaagtcgtgagacatctcgtaagagccgctctaggaaaagaacccatgtcggaactcgatcactacgccaacaagagactcatgtgctcaggtgcaatcacagccaatctcttcagagacgcgtacctactatcaatcgcaacaaccctgcgcacgctcaacgaagagttcctcaccggaccatggcgcgtcgcaaacgatatacacacgctcgtcaacgaagccaacctgaaaaatatattccaaccaagaatcatccgagaagccctcgtacgagcactcaaaggatcgcgacgcggcgatgacaatgcacgcgcgcccgtccaagaactcagcagagtctcatatctaggatacatttcacacatgagacgagtaaacaaccccgtcgacaggaacgtcaagatagcagacacacaccgtctaaggccgtcgcactggggagtcatctgcccagtagagtcaccagacggacccaacgtaggcctcctcacgcacctagccacgcttgtcaccatatcacttgccataccagaacccgtcgtacaagaaaccataagacccgccatagacaaatacacgagacatctatcaaacagcacactatccccacaatcaaccgcggtgcactttaacgacacatggatagcgatcacagacacacccaaggaactagtcgatgcactacgaaaaatgaggacggaagacaccagactgaacactcggtgtcacatgggacgtgtggaggaacgacgtggcaatccgcacagatgcaggaagatgctgcagaccactaagaagagtacaggaaggaaaggtcgtaccaatcaacggcgatccgtcgtggaccgaattgatacgcagcggagcgatcgaaatgatagacgtcgaagaagtagctacatgtctagtggcactgaacgaggcagacgtcaacaatcgagaccctatcccaggcagatacacgcacgcagagatacacgcaggaagcacactctcaatggtaagcaacacctacccactacttaaccacaacaacggggcgtacaactcactatgtctagcgcaatttaaacaagcgctaggcacgaccatgacatccatcagggacaggttcgatactaacacattcctactacaccacgcccaacgccctctggtaagcacgagcttcgcagaccgactcttcggaggacgtttcgcgcacggcgagaacgtcgtggtagcaatcgccacatacacaggatacaaccaagatgacgccatcatcatcaatctagacgccgtgcagcgcggccgactagcactcacagtattcgaaaccatccggtacga

SEQ ID NO: 203 - DNA, 22319 bp, unidentified
  misc_feature 1..22319: note = Fanzor polypeptide
  source 1..22319: mol_type = other DNA
aaattgttggttagacacgattgagggggcatgctttagcatcatcatcatcctcgtcgaacatcgtccatctgacgcgatcgaacacacgccggatttcgaaccctcgtacactcgtagacgagtataaacaagtcttattcactaactgacaacagcacacttctttattcgatgcattcacggtactgatgctgagggacgagacggtcaagcaacgccttgacatcgtggacacggatggtctcattggcggggaccgtcctcaagttcctgtggaaggattatgtcccattacagtcggacacatctcgtccacaatatcagacttccactctgtcatataatagagtggaagtctgatattgtggacgagatgtgacgtcttgtcagcttcagtcttcaacaccaagctggtcaatggtatttgttatttgttctttgcgggcaaacaatagaatgcaagaatcgataaaggggtgtcaacttgtttcactgtacacgtacacacgcaaacggaggaacacaacacaacactcactgtcgacgatgatcaaaaaacatctgagtacacgcgcaaagagaggaggaacaccaatgtcagccaattaatcagactgaatacacaagacacgcacgcacgcactctatcacgacacatcatgccgcatcctcacatgccgacaacaagtcgtggttgtgtgtgcgaggcgaagtatgacagtcgcgcaaggtatgctctgcgcctgttctgggatcgttcaagcagacagtggatgatggttgttgccacctgggtggcgtcttgtgcgcaaggacctcacgccactcaacgcgcacgccaccgatgccatttcgggtcacgagacgtccatgtacagacagccattggcaaacaacggattgtattcaacaagcgcggagcccctttcacctcttcccccaggggagcccccacaaaggagtccgcgaggaaccgagcgggtgggcgaccggaggggagcccacagttcacatcaagcattagacatacacactactgtgcaactacagtcggcggaacagtaaaatgaaacatccaaaaacaaataaaacaaatagacaaccgttttttgtattgtctatttgttttatttgtttcagcttggttgggtatccagggccaccacgtggaggtgctgattttggcccctttgtttctttttcaaatacttgaaacagaaacaccttctcatccagattacttcttgatatgggacatccctttgcgagttaacacaggcttggtgacgacgaaagtcgggttgtcgtaaatgacgaataccttgggtcgggacgcaatgattgcgaagacgtcagagattccaaacatttcgtatgacagatgcagtatattaaggggtgtgaggaggttgttgttgttgttgttgtattcctaacgttccgaaaaacctttcaattttttttgtatttaaagattctcagaccacgcgatcgaggactcggggatgataccggcactcacctgccatcgctggtgcttagccaactgcttcaccaacttaattccgttcttgcgagtctcataagaagtctcaatcgtgtctacgaaacggtcaacaagaacgtcacttgtaaaagcacactgacgcaggcaactgaacttttcgaaagaaagaatatcctcgatgttcttgctactacacaactgagctagggcaatggacaaattacccttcgtagtgctcataaccacttgaaacccctcgcgactgatgttcatatgcaaaagggggatgatacccttcacataatcactcgagtgaaggaagccctccttctcggaaaaatgaatgtcgtgtgattgagcgttcaacatgaacacagccagcttagctgcaaaagtcgcatctccagaagtcttcttacgttttgaagtagaagaggaattgcggggtgttgaagacatttacatacacatgtatacatgtatataaaaataggaacgactcgctacagtcggcggaacagtaaagttgatcgtacgcaccttttcatgcgctccggcgtgatccagagtttgtgatcaactcgttcactaccgccgtgatgccttcgcattcgaacaccaagctgtgatatgaatcgtcagcatggcaaaccgtatgtttgccgaaactacgcagtgtggcatacaatccgatgcggtctccgacatgcaacggcgtgtccccagtggtgcatgacaggctgcatgtgcccttgccagcatcactcgtgtcatagatggtggtgtaacgaggcacggacactgtgatggtccgtggtggcaggaacaccgcctcgtccacatcaaaccatttcttgatcatgtctcttcgtagggcgtctaccgcatgccatgtgtgttcgtcacctattttgagttccagggtggcaccggtcttgaatgtgccgtcgcctgacggactgaatatctcaacgatttctcccataggaatggtgacaaaggcgcacgggacatgactggggaacttctcacaggcaccggtggcatctgccccgatcacgatcatattggtaaacccttacagttgttctcaaataaagtgggacacaccttatactcatccagactgcagatcgttgcttttgggcaacgttgggggggtgcagcaggttgaagaggttctcgaagatgatattccgagtagactctttggtaaaccgttcaaacgtctgtgtctccatatcagtatcagggggtggggttgtcgaggaacttctcggcgcgtctcggcgaaacgcgagaggacgctctctctcaaagacttggtgaagtgtaagcatcaggatgttcctggaagcgttcacatcgcggtcccaagtcttccagcagtgaagcataccaccgctctgttggcgtggctctccgctttgactgcttttgcagtggagaatcttatgaatccgcttgcgtcattctgtacattcccaacctgtaccgtcttgtttcttacgatgagtgagtgccaccgtgttgcaaatgtggtccactcatcgtaagaaacagaatcgagcctcgagtgcagtttgtggctcacgcccgactgcaggtcaagctgttgcagctgtatcgcacacgcagtacatgaaccacgcaggataccagcagacgtatgtgtacgaacgcgggtgtcagtgccatctcttggagcatcacgacatcatcgcatgcacagctcagagaaattccatgcagcaagaaagccgccgtgtcgtgggtgagaatgaatggacggatggggggcatgcgaaagccgcatgtgaaaaaaaaattgactgaattgtcataaaagaaaccgataaccaccacaaacacccacaaatacccacaaacacaatggcaaactttactgaattatacaacgatgttgccaatgacacttcgggcgttccgtcggatccattttgcgatcgcgcaagagaactcattccgcccatggcgcgcgtttgggaggtacttgcaaagctcgccgttcaatcgtgggacaacgaaatacaaaaggtctgctacggagaatttttgactgccaacgactacacaaacggaaaccacgccaagctgtttatcctcaatctgatgacagtctcgccggacaatatcatatgcgatccccgcttccaaggcatgcttcttggtttggaagccgtcttccagtacaatcctttttgttccgatcaccctcacatcacacgcaagattgtaagcagtctgttcattgagatggatgacgagatgatcgattgggtgtcctctgatggattcgtcaatatggattgggactttgtacagcacatagcgtcccagtggttgcgagcgaggtgctcggcgcgcaagatccagcgcatgtaccgcaagtacatcgagcacaaaaagatccagcgccaaaagcgcctcctcatcacaatccccaggatcgtgtcattgctcaaggattgcaagggtcgcgaataagtaattattcgagaacaacttttgtttttttacctttttcctcaaagtccagacactgcatcacccggctcggatgccaggtccgccgaatgagctcctccctgatgacgtccagtgacgctttcttcatccggaccatgacgcgccagtctgtattccgatgagcaaactccagtgttgccaagttgctgcagctctgcaattgtcaggttgcatttcatgcatcggtatggttgtaattctgccatttctagcagaccacatttccaaatgtgttttcccctattgcggtttagaaggtcttaactgagtttgaactcgggatgttgcattcttgtcctcccacgcgggtgttgcattctggggatgatatccatcttcagatacgcttactacaaaactaaaaagcaatctggtccagaacgacgaacatcttcctaatctttgtcggcacatactgagcgtcgatggtaggagattctgcgcgtagcgcattcgcgtctggctcccctaccatacttattatgttctctatcacgtcaggtggaattgatgacaatagggttgggtccaactgtctggcaagacaagtggtttcgtttgggcagaagcggatcacggaatcgcccacaacagcgtcggatgcaatgatgcgggttagtctcctttctaatacattccactccacataaatctcaacaatgcatgccctccgtctaggtccatccttattgttctcccatgctcgcatgtgctccaacagtgtcagtctcctcataagcgcacagacgagtccattgagattgcatttgcggatatgaatattctcatgccacattttttgagggtctaagggtatgctatcgtccttgacgtacgcctcgaacgcattgcgttgtagaaacaaaacctgcaaacggtcaggaaatccaaacaattgacgcacatcggcataccttgcacattgcactccaatgttcaacgatttaaaacccaccttgaaaggcatacttgattatacatgcacagctttttactccttatgttgagcagtcagtaccaacatccaggagtcatttctcgaatccgcgattcattttttcattaactgccgtctcaagcaggcgtctgcttaacaaactattacgggatcatgaaagggaatcgcgggacccacggagtggggtaggggaattcagatgcggactcgcggaaacacgtgtcctaggatctgacttgtccatcggaggaggacacacgcaaacggcggaacactgccgaatgtatcggaggactcacgcaaacggcagaacactgtcgactgtatcggaggacacacgcaagatgcggaacactgtcgaatgtaatgatgcgggaggggggcggctccatgttcatgtccctaaacgctatatataacgtacagagacaaagtgctgacgattgaatgcaatctcatgcatctcaatgtcagagcaatccaaagaatccatgcacgccggcggatcctcgtccagactcatcacgcacacgcacagaactgatgcggcggcggcggcttatcgcccagccccatcacgcacggcagaggcagcgtgtagtccatccttatcacacatcatgccacgcggcggcttgagaaggccacactgcagcataacaacaacacagcgtcaaaaaggaaattacagcgtgtcccactttatttgagagtaggagcacatgatggcgtccgtgaagactcgtcgcgccttgttaatttttccaagttactacgtagacgggttgggacccgtgcttatgcacacattgcaagagtgtggtacgctgccaagggacttgaaggggtacagatgtggcggagccatgaaggaccatgatgtttttgtcaacaaggttttgggttctggtatggagatcaatgttctcgaaggcaccgtgtgccggaggtctgtcatggaccaattggcttggttgttggagccctcagtggacgtttctcttttgttattctgtgggcatggcatgaatgaggggtcgccacgtcacggtacattggtatgttcttacaaacagctggtgtcagctgaggccatcgatgcggtggtggcagcgcaacttttttgcggcacactcatccgcgtgctcaacatgtgcgaagaaaatgccattgcccccgcccctggtctgccgttccagcacggaagatctctgcttgacgcatcaagagcagatcatgatgcacagttccatcgcgttgcacacaaggacgtgatgttgttggcaactgggacttttgaagaaacggcaggtggcaaggcaggcacacccttcatcgctgccctgggcagaatgtttgacgcagagtcgatcttaacctacgagcgccttgatgagctcttgcagaggcactggcctggtggcagtgggagggcactgctgtatcctgcaaggttgaaagggatcttcggatggccggctaatggttcacaggcgagtggcgattctgcttgaatagtaatatagggacccagtcccagaaaaggccctttgttacactcagaccggtcaataatgttacagtatattgaatcaattacaattctctatgtacaacttggacagacggtcgattgttgtacacatgtacacattgctgcaaagtttgaggagattggctatacttgcgaatataagccacatgacagtctcgaggtggatctcaaaccccactaaaaaagtgtacaaccggaataaacctacaaaatcggatgtggtcatagagttcttaaaggcgtcattaaaaatagatccattcgcatctcttgctgttcttcgtcataaggtaaaggatgctttcggatttgaggtatcaaaagaattgattcgcgttgtgataaaaaggcttgggctcacaaagaaaaaagcaaagttcttctccaggcctgataacttatatgagaaaaccacgtcattcataagccaaagggaacggttaaaagaggaagggaggaattttgtatcgatcgacgaaacttcatttggaagacatacgagagacgtgtttggctactcaccaaagggagagctactggttgtaccgaggttgagacctagggtgacgacaatgtcggcactttgtcttattcaacaaggaaaaggagacatttattttaacatcaggcaagggtctttcaacacgcatacttttgttgagtttttagaaaatttggactgtccaactgacacagtaattatacttgacaacgttgcttttcaccactccaagaaggtcaaaacacttgcagcttcaagggggtgggagtcctatacactcctccctactcaccttggttcaacccaatagaaggggtgttctccatcgtcaaacgcgatttctataaaagccaagatgtgtataaggctttgagttctgttaaagagaaacacgtaggctttttttcgaaagtcattgaatacaatttctggaccttgatacaaggaaatagatacattggctactaaatggagacgatagtcaataaagagcctccggacaagcgtacgcgaccggaccgggcggccaaaattaaggacaggaaaaacggcgaggagaacgtggtaaagtgtacactgagtcggatcatagcggtaaaggacaacaaggacgttatcaccaaggtgattaaggatcgggtcgacagcgtatccaagaggacttatcttgccggtgttgcggtgaaccggatattaaaagaagtcttcgaaggggtaccagatgcgcaacttcacactgtaagtgtccctagcgtcgaccagaacactcgaaggaaaacaggatcttggccaaggagttcaaagatgagcacggcattgacgagaccgtattccaccgatacctcctctacgatatccactcttggggagtaaaggaagacctcatagcgatacattcgctcctaccggagcgaacaaagatgttgctgaagattcagcactcgatcatcggacgagacgagatcaaccgacagtggcttaagagcgtttccaacagcgccaagatgatccggtacaaacgtctttatcaatcgatacctcgaggccacagaggacgagggctacgccaagctggtcaacatcgctcccatcccaacagtcaagcactccttcatcacgatagacaccgacggcctactgggcggtcctcaaggacgtgggtctcgtcgagagtctcaaaagacgctgacgaacaaggagcactgggagtcggtcttcgatgtggaaaacatccgttctactggaaaggtgtgtttacatgcaccatagacactgacggcgtaatggaacgtcaaagggaggagagacgttgagaggcggggtgcgaatcaaactaaggggtccgaccaagaagtggttgtctaaacatcccaggctgccttgacgacctaaggaacaacatccagaagcgcgaagaacatcggtcctaaatcgtttggagggtgcctgtactgtgtgctggtcagtgggcaaccatttgatctcgaggaaagtgtagtagtgttgccaattcgcagtggtggctcgcagcgcctgtcggctctacgggggggaaataggggggtaagaacgtagcgtagcacggttgcgtaataaacaaaaacagtcggcaccggcggatgtcgaatgaaagaaaaaactggtgtccatcgcatactttcttcgtaatttttgcccctgtgggcaagggtgaacttgtctgtcctaccgagtacgcgttcaattcgttttacggaccgtttcaagggcgagttgccgtcatagacgaattccgtacactaagatctggcacaaggacagcaccaccgtcctccagagtgtgcagtccgaaaaagaagggcgcacggttcgaggcttgctatggtgcagttccaccatggagaacagcaagttgtttgtaaaccgtgacctaaatgcagccattaacatccacaattgctttacaatgtacccaacccgccccggaattcttgcgaggccaaagaaatattgcaaactggaagttgtggtaggacgcacaattgattacaagctgacaggttctttacagaacgcagtgtcgagcgaagtgtagaagataaacacatacaagaggattttgggggactcggcatattatgtaacataattcccttgtccgagtgtaaaggggaactaaacaatgtttagtaaatttgtgtgtttttgtgtttccgtgttttgaatgagccaccgcatcttacgcaatcgcattcacggtaggtccgtaggactgtcatccaaagaaaaccgaatggtcccaagcaggcttctgctggacaataagtgggtatttacatggaatcgttttcaccccatatatttgtttctgaagggggagcgcgggcagattggattcattttgatgactcgcgtacaccattcactgtaacgcttgggcttctcactgtaacacttgggcttctcaccttacatcaggcagaggcccctgtaggaaaacctgttatcgttaaaactactggtgggtgggtacaccacagtttgttgatggtagttttttcagatggtaggaaagagttcgttgtgaagaaaggatctgtgaagaagacggacttcgttgcatttattgaatcattgagtttgtgcaataactcagtagtaataatggacaatgccagtatccataagaaattggtcctcagtcaccccgtcaatatttgttacacctccttacagtccagaattcaatgctattgagctatgcttcgctaaggtgaagagagactttcgtcgtttgaactacataccgaatgaaacaaagacgcacgtgtctgatatgatttccttagcattcggcaacctcactgataaaattattatgggttgttttgaacacgtttggaacacttatgtgtataaagcggtatgtgacgtattgattatgaaagatggcgacgaaacctctgacagtcgcgaaattgaaggagctactgaaattggctgaagtaccatactcgtcgaagtccaacaaggacgatcttgtccgtttatgcgaagacaatggtctcatcgccagaccccctccagaatacaagacggtggaaaagatgtatgtcgtgaaatgcgccctgaagaaggcaatgagtcttgacgatgaagaattcggtaagtttagggagcatgtggaccagctcgtcaatgtggtgagccgcatgttacggcggtccagtctggtgctgactttccacatcacgagtctattagagaaaggtctggatattccagacctgtacaacatgaaagatacctactggaaggattggctccgtatcggggtagacggaatcttccctgatgaggaaagcaagatatcgtacgaagctgtgaaggactccatcggcgatgtaattggtaatgacgacgctgactacatcaagtcttatccgatctatttcgatcaggtattgaactatgcaggtcacacattgagcactgtcgtgtcaaacaacgcatgggttcctttgataccacgtctggccagactcacttccaccactttaaataaattaaatgccccgaagacgctggacacatcgaagatcattcggggatacgacgtgatgcaggctattcagcaagaagtccaaaacatggagggatggccagagtctgttcaagagtacgtcaatgaagttagggagatgctgagtgttccagatggaagtcgagtttatgataactatggcaaagacatggactttccgaccatggtccggtttaattattggatacagacacggttggaggatatggatgcacgtcgtatccgattgatgcccatcttcaatgtccaacgggtgcatgttcgccttgacctgaagaccctcgtgaacctgttcaggcacatgttccccaatgaccagaacatcgttgagctttccaagtgggaacatgtaaagaaccccgacagcttcatgttgccccagaggcctgcacagaagaagaaaaaatcatgtggtcctggtgaatgggaggcatacaagtcggtcctgaagcagtacgatgatgatattaaggatatcaaggctactgacgagtacagacatgcaaagggtttgtatgacacgcttgtgaacgcccgaaaaacagtcgcaggttccttcttcagaaaaccaccggtcaagaatgggtgggttttcgactgcagcatctgtactgacggagtctccttgagcatgcagtacagcaagacagtacaggtccttgtctcagatctgaagaagacctgcaagaagcctcgtaaagaagaaggtatcaagatcgcagaaaaatacaacggctcacttaaaacgatattgcccgatatgggtatcgtcgtcctgggtgtggacccaggacggagcaacatcgctacggtaacgtatttggcagacgataaaaataagacatggacgctgacacgtggtgcattttaccacaagtcgggtatcaagaagcagacaaggcagaaggaactgcgttttgctgacatgattcctatgtgggagtctctgcgtgaaaatggagcagctttgagtacatcgaggacggataagatctccgcgtacttgtcaaattacgctaagttttctgacgagtggtggagattggctttgcgacgccgagaatcccgtgacaacttgcagcgttacatcggaaaacgaaaggtcaaagactctttctgggcgggtatcaagcggtgcatgatgaaagaacttcctgatatgaaggtttgcgtggcctacggatctgccatcacgaaactgaagcctactggaccaggagaagttgcagttcccactggggccatgttcgcatcgtgtaaaagaattttcaaagaggacgtttctgtgacagatgagttcaaaacgactcttatgtcgtgggagacgggtaaagaaaaagaacgtgtttacaagatcccaagtgtttgttcagcagacgtgaagcttaggttgggtggtgaacgttttggtcacacgaaatcgaaaacgatgccaaaggtcgctgattgcgaccacttaggggtaaggttgtacaataaacgtaaaggcgcacaagataagcacaggaggggtaacttcgccacttcccttgtcgattctcaaaaatcgatcgagcggtacccagaggtacgaggactgcgtctctctctagaaacatgcattatttggaccgggatcgctcttctgctctcacaatcgcaaggctgcactgcatggaattgatgggtctaggacgacctcttccatttgcccacagcagctctgttgttgttgatgaataaaaactcgtattgttgtagacaccactcggtccccctccggtggtcgcgacaacattaggttacaccgcaaggtgtgccgtacacgaagctgtttcatttaagtattccgttgattgtaggaagtataagcagactaagtatcacggacttgggatatatgaacataaagtactggtcactctaaataattcggtacaagtggtgtgggaagacgatttattgtgattctgatgctctttgaatcatacgggacatcgcatgttttgcatggcagccaatggccccaaatagcaatggggtactcaaagaacagtagtagcaatggggtactcaaagaacagtagtagtagtaagactcaatgcggctttaatcgacgacaagtgtttcgtgtgcgtttctaaaaaacgagtctaaacaacgcaacatacatacctgataaaaaccattgagcgattgcgcgaagaaaaagagtattcatcgacgcgatgccgaacgatatatatatcccgccttgtcagcccatttcaaaaccagtccgcaaactaggaaaggcgttgtcgctggacatggacagtcttggcacaaccaagtttcttaatcgcctccactgccagaatgtcagccgtctccatgcactgcgggcgtcatcggctgtttccggtgatccacgcatcttgtagtatgacgcattgcttcaccttattaaacaaagacaccacacatccccaccgtcacgtttgttcctcgtcgctgtggagtacttcttcgatgacggctgctacaagatcgccaacggaagcgcccttgtattctcacatgctatcaacacccttttcgttgtggagccgaaaatcctcaaccccccccctgcccattatggacatgccaaggtgtcgaaagccatacagcaggccactatgggagcgactagacttttgtcctggctaccgcatctcataaacatggacctgaaagacggaacctcacttggatatgtaaaaaattctcgtatgatcgtgacagctgtgaatcgcggtggacgcgtcttctgtcaagatatccacagccaggaaatttactaagaattggaggaggaagacccatataaaggtggaactttggcaaaattgtggagttgccgagaatcgaacccggctctgttggtatcggacaccatgagattgacgggaaagaagaacaacccagacgtagacaacccctcctgaacgactctctaacttgagacatgagcaccaaggaatcaaaaatccgctccataccatgtttcgcaaccagtgaaaatcggccgggaggcaggaacgcccattttatgtaaaatctacttcccatacagctagggacatttgatattgggacaccttctattttggggattcaagatttgtaaccgatcttgtcaatacagatactgtcttcaggtgattgacacaaaaaattcaaggcatctaaagacactgaatttacatgttcaaagtaccctgaaaagtcaaactgatggctaacatcgtgcgcatcaataatcctttagcagaaacggcagcaattagtgtcaatttggacattcgcaatgtcctagaaattttgatatttaaaccccaggatctgacttgtccatcggaggacacacgcaaacggcggaacactgtcgaatgtatcggacaccgaatggcacacgcaaacggcggaacactgtcgaatgtataggaggacacaagaggccgaacacggtcgaatggcacacgcaggccctcattgacacacgcaaacggcggaacacgtttaaaatagggattgatgtgagcctccggcattcttcagtatttatttgtgttcaaataattgttgttcccgagatggagagtcttttcagaggtgttcatgtgaaaaaaacaccccctcgaatgaagtgtaaacaaccattcttcagtataaacaaccatcagcacagcacacttcacaaacgaatgagttcctttgacgaaatcaatgaagatgtattggagatcattctagccaatgcgatttcgaacgaatcccacctcaaacaagtgcctctcgtttgcaaacagtggagatgcgccgcaccccggtgtgtcacaaggatccacttaagacattataacattttgctttgtgggtgctttttctttttgtttaaagcacagagtctcatacaccctcgcggtgtcaagtagactttaacatgtaatgtaatgtaatgtaatgtaatgtaataacagtttggaatacgcattatcacgcatttgcaggctcaaagagttgaaaataggtgtcaatcggggggaatacgtaccctaccaatcaatatcggctatcgaagacaagatccaagacatatcgccgctgtccgtcctcactgcgttggttcacctggacatatcgaacacctacgtgaccgacatatcgccactgtacggactcacttcgttgacgcacctgaacatgtcgcacacctacgtggacgaagacctattatcacctctgtccggactcacttcgttgacgcatctgaacatgtcgcacacacctctgtacaacatacaagctctgtacggactcacttcgttgattcacctgaacatggcgcacacacttgtgaccgacatatcaccactggccgccctcacttctttgattcacctagacatttctctatcacagctttccggactcaccgcgttggttcatctgaacatggcgtacacacgggacctattatcaccgctggcaggactcacttcgttgattcacctgaacatggcgtccacacgtgtggacgacatatcaccactggcaggactcactccattggtgcacctcgacatttcgaacaccgacgtgtacgacatatcaccgctttccggcctcacttcgttgattcacctgaacatgtcgtccacacgtgtggacgacatatcaccgctggcaggactcacttcgttggttcacctggacaattcgaacaccgacgtggacgacatatcaccgctggcaggactcacttcgttgacgtacttgaaaaatggatggaatgatgtgtaaaattgttcaacgggtcatccttagtaatattattgttcattttccgttttaaaaatagggattgatttgagcctccggcattcaatgggcgttcctgcctcccggccgattttgactggttgctaaacattgtatggagcggaattgtgattccttggtgcttatgtctcaaatcattgttgttccagagatggagagtcttttcagaggtgttcatgtggtaagggccataaactgagccgtctactgcgattcttaggccaaacggttatgggcttgtgaatataatccggtagtatccatgtcagttgtgttgatgattcattcagatacctacaaaaccgcggggaggcagatgtgatgcagggaatgtattcagttcagcaaactgtgcgtcaatgatgagatggcatgccttccatgcacacctgaggcagcgacacatcgttgcaaagtgctcgcagttgttaaatgcggcgttgtagacaaatggggtttgctcagcatctttgaccagagcgagggcaagacttgccgagagggtctgatccagagcagtcccttcggggtacaaagcctccgcaaagatagagccgttggcaacgaagtcttcgtaggatcgcaatgagacgttggcctgctccttagaaattccccacacatcaacgactgtcgggacttcgatatcccctggtgccaccacttgctgcccgacaaagatgccatggtgcctgtaaccggatgcgtctttgaccatgatctgggcgccaggcttaagcttgccgaacatagcatagccgctcttgtacggcgtcagggtagcatatgggtgcccgaggtctgggggtgaccaatctggaagtattcgcttgatgtgggcgattgccgatgtgaggatgtcggtaaggggatcttcccgagatgccatgtttgtctcaaattgagctgctgactcgtgttaagcttcgagatagataattatatagggatcttttttatgcgaacgtcattttctcattgcaacaccgggggggacatgggttttaattcaagacttttattgattgggtataaggatacctggtacagatgggatttttaaatgaggaatccgtattgtcgaagccgacagtgtgtgtgcttacagggttcaatactgtccaagacgcatttaagattgtccctcacaaacacattccatttgtcatactttgtgtgcataatgggcatttagcatatgcatttgatgacattgaggaggtgcgcattgagccagattttgtgttattgaatgcccttggtctaaaacatcgtgttttgtgttctgtgacaggtttacagatcttactcccaattataggtcgtgcgtgagccacgtcatctgcgcatcaacaagttgcgatgttgttgtaccccattgcaatgatttgctatggctggatttggagagaatgcaatttgcgtttttgttctagattgtgacaaattttccaggaagatcgtcttatctgatcataattgtgaagacagccaaacactacatcacagtcgacgacaacttaaactcacacacgcgtagcggcggctgctgtcgaatggcacacacaggacactcattgacactcattgacactcattgacacacgcaaacatgtagacgaatcctcttcatacagtcgacggaatactaaaatgaaaccgcctcgtgtacggcacaccttacggtgtaaccaaatggtgtagcaacccacggggcagtggaacaccaatacgattttttacaaattgcaggatgttaacgagaatatcgtggttcttttttagatcacggctctccatcctgcagactccgtatcgttcttttgtcggtactttcgagagtgtccattgaaggaccagccgcacttaagcgatcgactcttccccggtaccgtggcccaaaagaacacggggtctttgttgatgtgcaatgcgtcatgaaaggaggtttctttgctggacgggccattttgtaggaccatccactcgtacactataatttctgtcgacgccttataccgtttattgggatgtttcattttactgttccgccgactgtagtaccattccctattaatccaattatcatgtacaactccatgacgcaatggatcaaccccatgcccgccttccaatccctctctgcaacagagcgacatggccacttggctgaatgacgatattgcaccaagtctatatcgtgatcacagcattgctctcctctctgttgaagtctgtcatgcaatgcgtgtgaaggacttgcagggcagtctgaagcaccgatttctccgttgagttgatgacccacctttgtgcaatcacaagcgcaaataaaatcatacctgttgttgttgtttcgcagcatggctacggcagcttcaacagccgcatgcgccacccgcactgcctcatcagctcgctcagcagtttggacaagtgcagccaatgcagcattcttgtgtggccctccgtcggcgatgatgatgcctagctgagctggtgatgcattagtgaagtccatgcttccatgaaaaaatgaaagcagtgacaaataagatactgtgtacacaattataggctttaagtaataccgcgataaaatagggttgtcaagcagctaacaaaccagaattcgcccccgtacagacagttttagtatagatccgaattagatttgtgttagatacgtgtgcgtcggtatcacactgtgcgcgacactcgatgcggtgagatgagaaaacccgaattcaggccaaattcccatgaacacgacgtccccttttgtgtgcggatccgccaaccttggtagctgtatgtggacaagacgacctcgccgtcgcttagcggattcagctaaatgcagcccctgcatcaacaatcaccggcacatccctttcggggaatatcgcatctcttcgatattgcgtcccatgatttggtcgccttgccatatttcacgccttcattcgagcaatggacggcaccgcatcgcgcggtgcttgcgtgtttatcgaacgagctcttattgcatcttattcctattcagcacatttgcggccagctggaattcatacttggcttttaaattgtttaggcattgcaagccacatgagtctttgtattcactaagttgtataattatcccatcgccatcagatgggatactgaatggatgtgaaactgctacaattaaccgtgttccagttttgacatgcagtgatatagcatattgtattagactgtctgtcgaatcgaaaatgacgttgtccaaaactataatcttaaacccgattaggctatccagggtgtctcgcatgcttacaattgcaattggggaatgcagtttatgatgatttacgtcatggtctgtctcacaaaccaccaaagtggattcaccatcccctatttcgtttgtgatcatgaagctctttccagcctgcctacgcccaacaatatacatcacatcagtaagcacacacactgtctgctgcgacaatacggatgcctcatttacagaagcgttggttgcattctgcaaattcattatacactgttaggtttacatattttcggaaagcaaacgagtcaattgttgcaaccctttgacaccatgtgtgggtcagcacagagagtattgcatgcattgtggggcacaacgcgcaccgcgtctattcatgagtgcacgagcaagaatcacgcacttgaggttctcgatctcttcgtcctgcttggaaaccaagctcagcgcattgttcagtagacgatgttgctcctccgtctgagccagtagcgttttgtaagctcgctgaacagcgtcagtacgcacgcgctctgcagccacggcatcagccacggcaacagccacggcatcatcgagttgggctttcgtgtacatttcggccatgatcagtcactgcacatgaattgccttgtctagggctgggtctctatactattctacagtcggcagaacagtaaaatgaaacatcaaaaaaccggtataatgcggtgacaataatgagttttagctgctttgttgtgctggactgcacagcccccctcctcttcagctcctagtactgtgctggactgcatagttgtctgaagcttccctggcgagcctctctgtctctgtgctcctccctcgtagccctcctcagatcagaagcacttccgtcagcgcgatcaatgtccaaggcaagcatcgtccgcgagtggacccgcccggatggctccaaatgcgtaggcggcagcgaggacaatgccaaagcaccccaggatcgctcatgctttacaacagcttactggatgagaaagttccattcgtcccagcttctgggccgggtagcaagagtctctcctggtacacctgcgggcccactgtttacgatgtttcgcacatggggcatgctaggaactacgtcacgtttgatattatccgccgagtgctggaggactactttgggtacaacattctctacgtcatgaatgttacagatgttgacgacaaaatcatcctccgcgctcgccgcaactacctactagcaaagtacaaggaaggaaagcacacggacgctgaggtaaaagctttcgctgagaaggctgtccagaactgctttgcaaagcagagcgcaaagctcgcagaagcggaggccttggtggtcgcagccaaggaagagcaggaggctgctgcagctgacaaaaaggggggccttcagcgacaactgaacgagctggagggtgctattaaaaacgaggcccacaagctaagtcagattcagacagccctgagcgcgttaggacaggctggcgattcagctactatctacgcggttgcctcggattttgtagctgaggagctggacagggagcaaggcaagagcgtgacggattcatcaatctttagggcgcatgctgccaagtatgaggcggagttcactcaagatatggattccttgggtgtgcgctgcccagatgtgctcacccgtgttagcgagtacatggacgagattgtggactacgtcaagaaaattgtagacaatggcattgcctatgagagcaatggaagtgtctacttcgatacaacgaatttcagggcgtgtggccacacctacggcaagctcaagccttgggctgtgggatctgctgcactagcagccgagggggagtccaacttcgagacatcagagaagcgctctaacactgactttgccttgtggaaggcgtcgaagcctggggagcccttctgggagtctccttggggccaggggcggcctggctggcatatcgagtgcagtgccatggctagcaccctgatcggatcccgcatggacatccacaccggtggggatgacctgaggttcccacaccatgacaacgaactggcacaagctgaggcattctaccataacgagggctgccaccagtgggttaactacttcctccactctggccacttggagattgaagggctgaagatgtccaagtcactgaagaacttcatcaccatgagggaggctctgaagtcattctctgctcgccaattgcgtctcttgtttgtgctgcagtcttggaacaagtccatggtgtatggagaggcctccagggccgaaatgaaggctcgggaagcgcagctgaaaaactttttccagaacattgaggttgctgtgcgcggggtggacgaaatcacctcctgtgctaaatggcaggcagaggagagggacctgtctcaaaagctgcaggcagtacagaatcaggtgcatgagcacttgcttgacaacatgaacaccgcagctgtgatggacaccctcagcgagctcatcaagagcaccaacatctacctttccaagaagcgagagtctgcgtctgcagctgccccggcccagccctttctcctacgcaaggtgtccacctatgtgaccaggatgctgtccatgtttggtattgtcgatgcatcctgggacaagcctggctttgctgacgccgcaggcggggctggggatgccaagggtgcaggctacctggatgcctttgctgcattccgtgatgaggtgcgatcactttcccgcacccaggctgatcccaaggagaccatgacagcttgcgaccgtgtgcgtgatgtggcccttgtggagcttggtgttcgattggaagaccgaccagatggcaaggccatttggaagctagacgacccagcagttataaatgctgagcagcaggagcgagctaagacagcatctgaggctaggtcgttcatccatgggggcgtacagtcaacggaatactaaaatgaaaccgcttcgtgtaggcacaccttaccaatagtgtctttagatgcggttacaaatcttgaattggtcaacttttcagaatccccaaaatatcaaatgtccctagctgtatgtgtacatcgatcgagtgtaatgtactgtactgtacctgtgaattccccccctccgtttgcgtgcgtgtctcttgttctcctgacgtcgtcggcgtcttgctccctcccccccatacatcatccgcgtgttccatgcgtcgcgtgtgtgtgtgtaaatcagtagtgtgtctgctggttgatgtgacttgtgggctcccatccggtcgcccacccgctcggttcctcgcggactcctttgtgggggctcccctccggtcgcccccggtcgctccgctgtggggaataggtgaaaggggctccgccacttgttaaatgtggtacgttggcgacatatatcacttgacaagcagttttgaggttggttgcttgaggatgagaacaaagtaaggcaaattgtgtctgatgagaacaa

SEQ ID NO: 204 - DNA, 21929 bp, unidentified
  misc_feature 1..21929: note = Fanzor polypeptide
  source 1..21929: mol_type = other DNA
ggcgtacaattgagggcgaaccaaaatgaaaacaagcttctccatgtggctgccaaggaaggtcacgcagatgtctgcaagctgctgatggatccagcggtggctggaattgagttcagggccagggcgaaccatatcaatagcatggccttgtgggcggcggccaaggaaggtcacgcagatgtctgcaagctgctgatggatccaacagtggctggaattgagttcagggcccgggcgaaccatatgaacagcagggccttgatggcggctgcaaaggcaggtcactcagatgtctgcaagctgctcatggatccaacagtggctggaattgagttcagggcccgggcgaactatagctacagctttgccttgttggaggctgccaatgaaggtcacgcagatgtctgcaagctgctgatggatccagcggtggctggactggagttcagggccagggcgaactctagcgacagcttggccttgcgtgaggctgcacacgaaggtcacgccgatgtgtgcaagttgctgatggatccagaggtgactggactggagttcagggcccaggcgaacgctagcgacagctgggcattgtggctggctgcaaaggaaggtcacgcagatgtctgcaagctgctcatggatccagaggtggctggacttgagttcagagccgtggcgaactctagagacagcagggccttgtggtcggctgcaaaggaaggtcacgcagatgtctgcaagctgcttatggatccagaggtgactggaattgagttcagggtccgagcgaacaatgacaacagccgggccttgtcggcggctgcctatgcaggtcacgcagatgtctgcaagctgcttatggatccaggggtggctggacttgagtacagggccagggcgaactctaacgacagcagggctttgtgggcggctgcaaaggaaggtcacgcagatgtctgcaagttgctgatggatccagcggtggctggaatggagtacagggccagggcgaactctagcgacagcagggccttgttgtatgctgccaaggcaggtcacgcagatgtctgcaagatgctgatggatccagcagtggctggaattgagtatatggccctggcgaattctgacaacagcagtgcattgtgggcggctgccaatgaaggtcacgcagatgtctgcaagatgctgatggatccagaggtggctggaattgagtacagggccctggcgaactctagatatagccgggctttgtgggccgctgccaatgaaggtcacgcagatgtctgcaagctgctcatggatccagatgtgtctggactcaagttcagggccagggcgaactctagcgacagctgggcattgtgggcggctgccaaggcaggtcacgccgatgtctgcaagctgctgatggatccagcggtggctggaattgagttcagggctagcgcgaactctagcgacagcatggccttgtgggcggctgccaaggcaggtcacgcagatgtctgcaagctgctcatggatcctgtggtggctggacttgagtatagggcccgggcgaacgctagcgacagctgggccttgcgtgaggctgcgaagaccggtcatgcagatgtctgcaagctgctcatggatccagaggtggctgggcttgagtacagggccctggcgaactctagcgacagctgggcattgtgtgaggctgccagtggaggtcacgcagatgtctgcaagctgctgatggatacagcagtggctggactcaagtacagggccagggcgaactctagctacagccgggccttgtggttggctgccaaggcaggtcacgcagatgtctgcaagctgcctatggatccagcagtggctggactcaagtacagggccagggcgaactctagcgacagcagggccttgggggcggcttcgaatgccggtcacgcagatgtctgcaagctgctgatggatccagcagtggctggactcaagtacagggcccgggcgaacgctagcgatagctgggtcttgccaccgtagagcaagtatttatccactctcctcaaactttacagaaatgtgtattctgtttgctcaagcgaatatattccagatgtagcataaatatttgattatgaggcatgaacgctttgaaaatgattattgatgcgcacgatgtgagccagcacgttgacttttcaggctactttgaagatgtaacttctgtgtctttacagtccttgaatgttttgcatttgttactgcctcccggagggattttgactgatttcggagccttgtctggtcggaatctcaattcctcggagagctaaatctctagttggcgagtacggctctaactaaaattcgccgggaggcaggaaccgcttgaagataccgacatgcaagtgcaacccatggtttataccatcctgtgcgcttgcatgcattaacatcaaacatgcagtcgcacacgcgatcatcgtttccactccttacgtgtccccatgacatacctcttgcagataccgccaggcaagtgccgcttacagcttaacgccaggcaagtgcaaccaagggtttatagggtttatcccaactcattgtttatttataccatcctgtacacacatgttcatcgaacatgaattcgcacacgcgatcatcgtttccactccttacgtgtccccatgacattcttgatcgtattgccctattatcttccaacccaaagattgtattagtgtgtaaaactctgcgcaacagattttcaggattgccccttaccggactgatccaaccaccacagcgagttggagagatgatggcgaaaggggggcgcgccgaccttctagcagtatgcttggtgtccaatcctcttgtacaggttaatggcgtacaattgagggcgaaccaaaatgaaaacaagcttctctatgtggctgccatggcaggtcaagcagatgtctgcaagttgctgatggatccagaggtggctggacttgagtacagggccgtggcgaactctagcaacagcagggccttgttggatactgccagtggaggtcacgcagatgtctgcaagctgctaatggatccagcggtggctggacttgagttcagggccagggcgaactctagcaacagcagggccttgttggatactgccagtgaaggtcacgcagatgtctgcaagctgctaatggatccagaggtggctggaattgagttcagggccagggcgaacactttcgacagcagggcattgtgggcggctgccaaggcaggtcacgcagatgtctgcaagctgctgatggatccagcagtggctggactcgagttcagggccctggcgaactctagcgacagccgggccttgtgggcggctgccaaggcaggtcacgcagatgtctgcaagctgctgatggatccagcagtggctggaattgagttcagggcccgggcgaactctagcgacagcagggccttggtggcggctgccaaggcaggtcacgcagatgtctgcaagctgctcatggatccagcggtggctggacttgagttcagggccagggcgaactctagcgacagctgggcattgtgggtggctgccaaggcaggtcacgcagatgtctgcaagctgctcatggatccagtggtggctggacttgagttcagggccctggcgaactcatgcgacagctgggctttgcgtgatgcggcaaaggaaggtcacgcagatgtctgcaagctgctgatggatccagtggtggctggacttgagttcagggccagggcgaattctagagacagcagggcattgtggctgtctgccaaggcaggtcacgcagatgtctgcaggctgctgatggatccagatgtggctggacttgagttcagagccttggcgaactctagagacagttgggcattgtggctggctgcccatgcaggtcacgcagatgtctgcaagatgcttatggatccagcagtggctggacttgagttcagggcccgggcgaacgctagcgacagctgggccttgtgtgaggcttccaaggcaggtcacgcagatgtctgcaagctgctgatggatccagcggtggctggacttgagttcagggcccgggcgaactctagcgacaacagggccttggtggcggctgccaaggcaggtcacgcagatgtctgcaagctgctcatggatccagaggtggctggaattgagttcagggccagggcgaactgtaacgacagcagggccttgtgggcggcggccaaggaaggtcacgcagatgtctgcaagctgctcatggatccagatgtggctggacttcagtacagggcaagggcgaaccatatcaatagcatggccttgtgggcggcggccaaggcaggtcacgcagatgtctgcaagctgctcatggatccagaggtggctggacttgagttcagggcccgggcaaactctagaaatagcaggtcattgggggcagctgccaaggaaggtcacgcagatgtctgcaagctgctgaaggatccagaggcggctggccccgagtacagggcccttgcgaactatagcgacagcagggccttgtgtgaggcttccaaggcaggtcactcagatgtctgcaagcagctgatggatccagcggtggctggaattgagttcagggcccgggcgaactcaagcgacagcaaggccttgtgtgaggcttccaaggaaggtcacgctgatgtctgcaagctgctgatggatccagaggtggctggacttgagttcagggcccgggcgaacgctagcgacagctgggccttgtgtgaggcttccaaggcaggtcacgcagatgtctgcaagctgctgatggatccagcggtggctggacttgagtacagggcccgggcgaactctgtcaccagcagggcattgggggcggctgcaaatgccggtcacgccgatgtctgcaagctgctaatggatccagaggcggctggccccgagtacagggccattgtgaatcttgacagcagctgggtcttgccaccgtagagcacaagtatttatccactctcctcaaacttttcagaaatgtgttcagtttgctcaagcgaaaatatcgctgcatgtgcccaataattccagatgtagcagaaatatttgaaatatccactcgtacactataatgtctgtcgacgccttataccgtttattgggatgtttcattttactgttccgccgactgtagtagctgcctaatataaggcttgaaggcccagaggaatagacacatcgaacatgcagtcgcacacgcgatcatcgtttccactccttgtgtgtccccatgacattcttgatcgtattgccctattctcttccaaccccaagattgtattagtgtgtaaaactctgcacaacagattttctggatggccccttaccggactgatccaaccaccacagcgagttggagagatgatggcgaaagggggtcgcgccgaccttctagaagtatgcttggtgtccaatcctcttgtacaggttaatggcgtacaattgagggcgaaccaaaatgaaaacaaacttctctatgtggctgccaaggaaggccacgcagatgtctgcaagatgctgatggatccagaggtggctggaattgagtacagggccctggcgaactctagatatagccgggctttgtgggccgctgcatatgaaggtcacgcagatgtctgcaagctgctcatggatccagaggtggctggacttgagttcagggccagggcgaactctagcgacagctgggcattgtgggcggctgccaaggcaggtcacgcagatgtctgcaagctgttgatggatccagtggtggctggaattgagttcagggccctggcgaactctagcgacagcggggccttacgtgtggctgccaaggcaggtcacgcagatgtctgcaagctgctcatggatcctgtggtggctggaattgaattcagagccctggcgaactctagcgacagcagggccttgtgggaggctgccaatgaaggtcacgcagatgtctgcaggctgctgatggatccagatgtggctggacttgagttcagagccttggcgaactctagagacagctgggccttgtgggaggctgcaagggaaggtcacgcagatgtctgcaagctgctcatggatccagatgtggctggacttgagttcagggcccaggcgaactctgtcaacagcttggccttgtatgcggctgcacatgcaggtcacgcagatgtctgcaagctgctgatggatccagaggtggctggacttgagtacagggcccgggcgaacaatgacaacagcagggccttgcgggaggctgcacaggaaggtcacgcagatgtctgcaagctgctcacggatccagaggtggctggaatcgagttcagggccagggcgaactctagcgacagcagggccttgtgtgaggcttccaaggcaggtcacgctgatgtctgcaagctgctgatggatccagaggtggctggaattgagttcagggccagggcgaacgctagcgacagctgggcattgcgtgaggctgccaaggcaggttacgcagatgtatgcaagctgctgatggatccagcggtggctggactcgagtacagggccagggcgaactctagcgacagcagggtcttgtgggcggctgcagaggaaggtcacgcagatgtctgcaagctgctcatggatccagcggtggctggaattgagttcagggccctggcgaactctagcgacagctgggcattgtggctggctgccaaggaaggtcacgcagatgtctgcaagctgctgatggatccagcagtggctggacttgagttcagggcccttgcgaactctagcgacaactgggccttgcgtgaggctgccaaggaaggtcacgcagatgtctgcaatctgctgatggatccagcggtggctggacttgagttcagagcccgggcgaattctagagacagcaggggcttggggtcggcggccaatgcaggccactcagatgtatgcaagctgctcatggatccagaggtggctggacttgagttcagggcccgggcgaactctagcgacagctgggcattgtgggcggctgccaaagaaggccacgcagatgtctgcaagctgctgatggatccagcagtggccggactcaagtacagggccagggcgaaccatatgaacagcatggccttgagggcggcttccaaggcaggtcacgcagatgtctgcgtgctgctgatggatccagaggtggctggaattgagttcagggcccgggcgaactctagagacagcagggctttgtggctggctgccaaggaaggtcacgcagatgtctgcaagctgctgatggatccagcagtggctggacttgagtgcagggcccgggcgaacgctagcgacagctgggcattgcgtgaggctgccaaggcaggttacgcagatgtctgcaagctgctcatggacccagaggtggctggactcgagtacagggccagggcgaacactttcgacagcagggccttggggtcggctgccaaagaaggtcacgcagatgtatgcaagctgcttatggatccagatgtggctggacttaagtatagggcccgggcgaactctagcgacagcagggccttgggaacggctgcgaaggccggtcacaccgatgtctgcttgcttttgatggatccagcggtggctggaattgagttcagggccctggcgaactctgtcaacagctgggccttgcgtgaggctgcaaagtctggtcacgcagatgtctgcaagctgctcatggatccagatgcggctggccccgagtacagggccattgtgaatcttgacagcagctaggtcttgtgttaggcagattcctgaagacaatatctgttgtattgacaagatcggttacaaaactttatgaaacttaaattccttaatgtaagaaagacaatttgcacctgcgtcccgtagggattttgaccggtttcggacccttgtctggtcggaatcgcaattcctcggagagctaaatctctggttggcgagtgagtgagtcgttcgtacggctctaacttctgctttgaaaattcaaaagaatcgccgggaggcaggaacacccattaaataccgcttgcagataccgccaggaaaagtgcctcttgcatgccaggaaagtgaaacccagggtttatagggtttatagggtttatcccaactcagtatttatttataccatcctgtgcgattgcatgcatgaacatcgaaaatgcagtcgcacacgcgatcatcgtttccactccttatgtgtccccatgacattcttaatcgtattgccgtattctcttccaacccaaagattgtattagtgtgtaaaactctgcgcaacagattttcaggattgccccttgcccgactgatccaaccaccacatagagttggagagatgatggcgaaaggggggcgcgccgaccttctagcagtatgcttggtgtccaatcctcttgtacaagttgatggggtcctacaattgagggcgaaccaacataaaaacaatattctctatgtggctgccaatgaaggtcacgaagatgtctgcaagctgctgatggatccagaggtggctggaattgagttcagggccagggcgaactctagtgacagcatggccttgtgggcggctgccaaggctggtcacgcagatgtctgcaagctgctcatggatccagaggtggccggacttgatttcagggccagggcgaactctagagaaagctgggccttgtgtgaggctgccaatgaaggtcacgcagatgtctgcaagctgctcatggatccagaggtggctggaattgagttcagggcccgggcgaactctagatacagcagggccttgggggcggctgcccatgcaggtcacgcagatgtctgcaagatgctgatggatccagcggtggctggacttgagttcagggccagggcgaattctgacaacagcagtgccttgtgggcggctgcaacgaaaggtcacgcagatgtttgcaagctgctcatggatcaagaggtggctggaattgagttcagggccagggcgaactctgtcgacagcagggccttggggggggctgcaacgaaaggtctcgcagatgtctgcaagctgctcatggatctagcggtggctggacttgagttcagggcccaggcgaactctcacgacagcagggccttgggggcggctgcaacaaaaggtcacgcagatgtatgcaatctgctgatggatccagcggtggctggacttgagtacagggccagggcgaactctatagacagcagggccttgtgtgaggctgccaatgcaggtcacgcagatgtctgcaagctgctgatggatccagatgtggctggactcaagttcagggccagggcgaactctagagacagcagggccttgggggcggctgccaaggcaggtcacgcagatgtctgcaagatgctgatggatccagaggtggctggacttgagttcagggcccgggcggactctaacgacagcagggcattgtgggaggctgcaagggaaggtcacgcagatgtctgcaagctgctgatggatccagaggtggctggacttgagttcagggcccgggcggactctaacgacagcagggcattgtgggaggctgcaaaggaaggtcacgcagatgtctgcaagctgctgatggatctacagttggcggaacagtaaaatgaaacatatatcagatggaaatgtacgatagaaaattggcgttaagaatggtcgctgacttgggtgtgttaaaaacttctgtgtttacgaatgaatgaatcgatacaaagacgcacgtgtctgatatgatttccttagcattcagcaacctcactgataaaatcattatgggttgttttgaccacgtatggaacacgtatgtgatgtttgtataaagagttctgtgatgtataaattatgtaagatggcaacgaaacctccgacagtcgcgaaattgaaggagctactaaaattggccgaagtagcatactcatcaaaggacaagaaggacgatattgtccgtttatgcgaagacaatggtctcatcgccagaccccctccagaatacaagacggtggaaaagatgtgtgtcgtgaaatgcgccctgaagaaggcaatgagtcttgacgatgaagaattcggtaagtttagggagcatgtggaccagctcgtcaatgtggtgagccgcatgttacggcggtccagtcttgtgctgactttccacatcacgagtctattagagaaaggtctggatattccagacctgtacaacatgaaagatacctactggaaggattggctccgtatcggggtagacggaatcttccctgatgaggaaagcaagatatcgtacgaagctgtgaaggactccatcggcgatgtaattggtaatgacgacgctgactacatcaagtcttatccgatctatttcgatcaggtattgaactatgcaggtcacacattgagcactgtcgtgtcaaacaacgcatgggttcctttgataccacgtctggccagactcacttccaccactttaaataaattaaatgccccgaagacgctggacacatcgaagatcattcggggatacgacgtgatgcaggctattcagcaagaagtccaaaacatggagggatggccagagtctgttcaagagtacgtcaatgaagttagggagatgctgagtgttccagatggaagtcgagtttatgataactatggcaaagacatggactttccgaccatggtccggtttaattattggatacagacacggttggaggatatggatgcacgtcgtatccgattgatgcccatcttcaatgtccaacgggtgcatgttcgccttgacctgaagaccctcgtgaacctgttcaggcacatgttccccaatgaccagaacatcgttgagctttccaagtgggaacatgtaaagaatcccgaaagcttcatgttgccccaaaggcctgcacagaagaagaaaaaatcatgtggtcctggtgaatgggaggcatacaagtcggtcctgaagcagtacgatgatgatgttaaggatatcaaggctactgacgagtacagacatgcaaagggtttgtatgacacgcttgtgaacgcccgaaaaacagtcgcaggttccttcttcagaaaaccacctgtcaagaatgggtgggttttcgactgcagcatctgtactgacggagtctctttgagcatgcagtacagcaagacagtacaggtccttgtctcagatctgaagaagacctgtaagaagcctcgtaaagaagaaggtatcaagatcgcagaaaaatacgacggctcacttaaaacgatattgcccgatatgggtatcgtcgtcctgggtgtggacccaggacggagcaacatcgctacggtaacgtatttggcagacgataaaaataagacatggacgctgacacgtggtgaattttaccacaagtcgggtatcaagaagcagacaaggcagaaggaactgcgttttgctaacatgattcctatgtgggagtctctgcgtgaaaatggagcagctttgagtacatcgaggacggataagatctcctcgtacttgtcaaattacgctaagttttctgacgagtggtggagattggctttgcgacgccgagaatcccgtgacaacttgcagcgttacatcggaaaacgaaaggtcaaagactctttctgggcgggtatcaagcggtgcatgatgaaaaaacttcctgatatgaaggtttgcgtggcctacggatctgccatcacgaaactgaagcctacttgaccgggagaagttgcagttcccactgggaccatgttcgcatcgtgtaaaagaattttcaaagaggacgtttctgtgacagatgagttcaaaacgactcttatgtcgtgggagacgggtaaagaaaaagaacgtgtttacaagatcccaagtgtttgttcagcagacgtgaagcttaggttgggtggtgaacgttttggtcacacgaaatcgaaaactatgccaaaggtcgctgattgcgaccacttaggggtaaggttgtacaataaacgtaaaggcgcacaagagaagcacaggaggggtggcttcgccacttcccttgtcgattctcaaaaatcgatcgagcggtacccagaggtacgaggactgcgattctctccagaaacatgcatttactcggaccgggatcgctcttctgctctcacaatcgcaaggctgcactgcatggaattgatgggtctaggacgacctcttccatttgcccacagcagctctgttgttgttgatgaataaaaactcgtattgttgtagacaccactcggtccccctccggtggtcgcgacaacattaggttacaccgcaaggtgtaccgtacactccgtcgagtgtagcggtgtctggactttagtatatggccattggggtaggttgccaatgaaggtcacgcagatgtctgcaagttgatgatggatccagcagtgaatggactcaatttcagggccattgtgaaacttgacacgtttctttcttgcaaccttagggcaagatgtagttacatcgaactctcctcaaacatttcagaaatgtgttcagtttgctcaagcggaaatatcgctgcgtgtgcccaataattccagatgtagcataaatatttacttaaagtaatagaaagatgtagttacatcgaacatgcagtcgcacacgcgatcatcgtttccactccttgcgtgtccccatgacattcttgatcgtattgcactattctcttccaacccaaagattgtattagtgtgtaaaactctgcataacagattttctggatggccccttaccggacagatccaaccaccacagagagttggagagatgatggcgaaaggggggcgcgccgaccttctagcagcatgcttggtgtccaatccacttgtacaagttgatggggccctacaattgagggcgaaccaaaatgaaaacaagcttctctatgtggctgccaatgaaggtcacgcagatgtctgcaagccgctgatggatccggaggtggctggaattgagttcagggccagggcgaaccatataaacagcatggtcttgtgggtggctgccaaggcaggtcacgcagatgtctgcatgctgctcatggatccagaggtggctggacttgagttcagagccctggcaaactctagaaacagcagggcattgggggcggctgccaaggaaggtcacgcagatgtctgcaagctgctcatggatccagatgtggctggaattgagttcagggccagggcgaaccattggaacagctgggccttgcgtgaggctgcctatgcaggtcacgcagatgtctgcaagatgctcatggatccagcagtggctggaattgagtacatggccctggcgaactctacgaacagcggggccttatgggaggctgccaaggcaggtcacgcagatgtctgcaagctgctcatggatccagtggtggctggacttgagtacatggcccaggcgaactctagagacagcatggccttgtgtgaggctgccaaggccggtcacgcagatgtctgcttgctgctcatggatccagcggtggctggaattgagtacagggccagggcgaactctagatacagcagggccttgggggcggctgctagagaaggtcacgcagatgtctgcaagctgcttatggatccagcggtggctggacttgagtatagggcccgggcgaacgatagcgacggctgggccttgtgtgaggcttccaaagcaggtcacaccgatgtctgcttgcttttgatggatccagcggttgctggacttgagtatagggccctggcgaactctagcgacagcagggccttgtgggaggctgccaatgaaggtcacgcagatgtctgcaagctgctgatggatccagctgtggttggacttgagtacagggccctggcgaagtctatcgacagcagggccttgtgtgcggctgccaaggaaggacacgaagatgtctgcaagctgctcatggatccagcggtggctggaattgagtacatggccctggcgaactctagagacagcagggcattgtgtgcggctgccaaggaaggtcacgcagatgtatgcaagctgctcatggatccagcggtggctggaattgagtacatagccagggcgaaccatataaacagcagagcattgttgctggctgccaaggaaggtcacgcagatgtctgcaagatgctcatggatccagaggtggctggaattgagtacatggccagggcgaaccatatcaacagcagggccttggtagcggctgccaaggcaggtcactcagatgtctgcttgctgctgatggatccagaggtggctggaattgagttcagggcccgggcgaactctgtcaacagcagggccttgggggaggctgccaaggcaggtcacgcaaatgtctgcaagctgctgatggatccagaggtggctggaattgagttcagggcccgggcgaattctagcgacagctgggccttgtgggctgctgccaaggcaagccacgcagatgtctgcaagctgctgatggatccagctgtggctggaattgagttcagggcccgggcgaactcttccaacagctgggcattgtgtgaggctgcaaaggaagggcacgcagatgtctgattgcttttgatggatgtacagtcaacggaatacttgaatgaaaccgcttcgtgtacggcacaccttgcggtgtaacctaatgtgttgtcgcgaccattttgcgatggtttcggaacctggtctggtcggaatcgaaattcatcggagagctaaatctctggttggcgagtgagtgagtcgttcgtacggctctaacttctgctttgaaaattcaaaagaatcgccgggaggcaggaacacccattctataccgcttgcagataccgccaggaaaagtgcctcttgcatgccaggaaagtgaaacccagggtttatagggtttaaagggtttatcccaactcagtatttatttataccatcctgtgcgcttgcatgcatgaacatcgaaaatgcagtcgcacacgcgatcatcgtttccactccttacgtgtccccatgacattattgatcgtattgccatattctcttccaacccaaagattgtattagtgtgcaaaactgtgcgcaacagattttcaggattgccccttacccgactgatccaaccaccacagagagttggagagatgatggcgaaaggggggcgcgccgaccttctagcagtatgcttggtgtccaatcctcttgtacaggtgaacggggtcctacaattgagggcgaaccaaaatgaaaacaagcttctccatgtggctgccaaggaaggtcatgcagatgtctgcaagctgctcatggatccagcggtggctggaattgagttcagggccagggcgaactctagagaaagctggtccttgatggcggctgccaatgaaggtcacgcagatgtctgcaagctgctcatggatccagaggtggccggacttgagttcagggccagggcgaactctatcgacagcagggcattgtggacggctgcaagggaaggtcatgcagatgtctgcaagctgttgatggatccagcggtggctggaattgagttcagggccagggcgatctctagcgaaagcagggccttgtgggttgctgcagaggaaggtcacgcagatgtctgcaagatgctcatggatccagaggtggctggacttgagttcagggccagggcgaacaatctcaacagcagggccttgcaggcggctgcctatggaggtcacgcagatgtctgcaagctgctgatggatccagcggtggctggacttgagttcagggcccaggcgaactctagcgacagctgggcattgtggctggctgccaatgaaggtcacgcagatgtctgcaagctgctcatggatccagcggtggccggacttgagttcagggccagggctaactctagagacagcaggtccttgttggcggctgcaacgaaaggtcacgcagatgtttgcaagctgctgatggatccagcggtggctggacttgagtatagggcccgggcgaacactagcggcagctgggtcttgtgggtggctgccaaggcaggtcacgcagatgtctgcaagatgctgatggatccagatgtggctggatttgagttcagggccagggcaaactctaacgccagctgggcattgtgtgaggctgccaaggcaggtcacgcagatgtctgcaagatgcttatggatccagcagtggctggaatcgagttcagggccagggcgaactctagcgacagcagggccttgtgtgaggctgcaacgaaaggtcacgcagatgtttgcaagctgctcatggatccagaggtggctggaattgagttcagggccagggcgaactctagcgacagcagggccttgtggctggctgccaaggcaggtcactcagatgtatgcaatctgctgatgaatccagcggtggctggacttgagtttagtgccagggcgaactctagcaacagcagggtcttgttggcggctgcaacgaaaggtcacgcagatgtttgcaagctgctgatggatccagatgtggctggacttgagttcagggccagggcgaactctagagacagcagggccttgggggcggctgccaaggcaggtcacgaagatgtctgcaaactgctgatggatccagcggtggctggacttgagttcagggcccgggcgaactctaacgacagctgggccttgtgggaggctgcaaaggcaggtcacgcagatgtctgcaagctgctgatggatccagaggtggctggacttgagttcagggcccgggcggactctaacgacagcagggcattgtgggaggctgcaaaggaaggtcacgcagatgtctgcaagctgctgatggatctagcagtggctggactttagtatagggccattgtgaaacttgacacgtttctttattgccaccttagggcaagatgtatatactctcctcaaacttttcagaaatgtgttcagtttgctcaagctaaaatatcgctgcgtgtgcccaataattttagatgtagcataaatatttgattatgaggcaagaaccttgcctcataatcaccttgcggtgtaacctaatgtgttgtcgcgaccatttcgcgatggtttcggaacctggtctggtcggaatcgaaattcatcggagagctaaatctctggttggcgagtgagtgagtcgttcgtacggctctaacttctgctttgaaaattcaaaagaatcgccgggaggcaggaacacccattctataccgcttgcagataccgccaggaaaagtgcctcttgcatgccaggaaagtgaaacccagggtttatagggtttaaagggtttatcccaactcagtatttatataccatcctgtgcgcttgcatgcatgaacatcgaaaatgcagtcgcacacgcgatcatcgtttccactccttgcgtgtccccatgacattattgatcgtattgccatattctcttccaacccaaagattgtattagtgtgcaaaactatgcgcaacagattttcaggattgccccttacccgactgatccaaccaccacagagagttggagagatgatggcgaaaggggggcgcgccgaccttctagcagtatgcttggtgtccaatcctcttgtacaggtgaacggggtcctacaattgagggcgaaccaaaatgaaaacaagcttctccatgtggctgccaaggaaggtcacgaagatgtctgcaagctgctcatggatccagcggtggctggaattgagttcagggccagggcgaactctagagaaagctggtccttgtgggcggctgccaatgaaggtcacgcagatgtctgcaagctgctcatggatccagaggtggccggacttgagttcagggccagggcgaactctatcgacagcagggcattgtggacggctgcaagggaaggtcatgcagatgtctgcaagctgttgatggatccagcggtggctggaattgagttcagggccagggcgaactctagcgaaagcagggccttgtgggttgctgcagaggaaggtcacgcagatgtctgcaagatgctcatggatccagaggtgactggaattgagctaagggccagggcgaactctagagacagctgggcattgtgggcggctgctaatgcaggtcatgcagatgtctgcaagatgctcatggatccagcggtggctggaattgagttcaggggcagggcgaactctatcgacagcagggccttgtgggcggctgcaagggaaggtcacccagatgtctgcaagctgatgatggatccagaggtggctggactagagtacaggggtagggcgaacgatatggccagctgggccttgtgtgaggctgcaaaggaagggcacgcatatgtctgcaagctgctgatggatccagtggtggctggacttgagttcagggcccgggcgaactctatcaacagcatggccttggagttggcggccaatgcaggccacgcagatgtctgcaagctgctgatggatccagaggtggctggaattgagtacagggccagggcgaactctagcgccagcagggccttgttggatgctgcacaggcaggtcacgcagatgtctgcaagctgctcatggatccagcggtggctggaattgagttcagggccagggcgaactctagcaacagcagggcattgtgggcggccgccagtgaaggtcacgcagatgtctgcaagctgctcatggatccagcggtggctggacttgagttaagggccagggcgaactctagagacagcatggctttgtgggcggctgccaaggcaggtcacgcagatgtctgctcgcttttgatggatccagaggcggctggccccgagtacagggcccttgtgaatcttgacagcagctaggtcttgtgttaggaaagacacgtttattgccaccgtatagcatgtatttatccactctcctcaaacgtttcagcaatgtgttcagttttctcgctgcgtgtgcccaataattccagatgtagcagaaatatttgattatgatgaggcaggaaactctttgaaaattattattgattcgcacgatgtgagccagcactttgacttttcaggctacttttaagatgtaacttctgtccttgaatgttttgtgtcaatcaatctcctgaagacaatatctgttgtattgacaatttgcaccagtacatttgttcctatctcccggaggtattttgactgttttcggagcctggtctggtcggaatcgcaattccacggagaactaaatctctggttggcgagtgagtgagtcgttcggacggctctaacttctgcttggaaaattaaaaaaaacgccgcgaggcaggaacacccattatgtaccgcttgcagataccgccaggcaagtgccgcttgcatgccaggcaagtgaaaccaagggtttatagggtttatcccaactcattgtttatttataccatcctgtgcgcttgtttgtacacacatgttcatctaacatgcattcgcacacgcgatcattcctaacgtttccccctgacattcttgatcgtattgccctattatcttccaacacaaagattgtattagtgtgtaaaactctgcacgacagattttctggatggccacttaccggactgatacaaccaccacagcgagttggagagatgatggcgaaaggggggcgagccgaccttctagcagtatgcttggtgtccaatcctcttgtacaggttaaggggggcctacaattgagggcgaacgaaaacaagcttctccatgtggctgccaaggcaggtcacgcagatgtctgcaagctgctcatggatccagaggtggctggaattgagttcagggcccgggctaactctgacgacaactgggccttgtgggcggctgcccatgtaggtcacgcagatgtctgcaagctgctgatggatccagaggtggctggacttgagttcagggcccaggcgaactatggcgacagcatggccttgttggaggctgccagtggaggtcacgcagatgtctgcaagctgctcatggatccagaggtggctggaattgagttcagagccctggcgaactccgacaactgcaaggccttgtgggcggctgcagaggaaggtcccgcagatgtctgcaagctgctcatggatccagaggtggctggaattgagtatagggtccgggcgaactctaacgccagctgggtcttgtgggcggctgccaaggaaggtcacgcagatgtctgcaagctgcttatggatccagatgtggctggaattgagttcagggccagggcgaactctaacgccagctgggcattgtgtgatgctgccaaggaaggtcacgcagatgtctgcaagctgctgatggatccagaggtggctggaattgagttcagggcccgggcgaactctagcgacagcagggcattgtgggaggctgccaaggaaggtcacgcagatgtctgcaagctactgatggatccagaggtggctggaattgagttcagggccagggcgaactctagagacagcagggccttgtgggcggcggccaaggaaggtcactcagatgtctgcaagatgctcatggatccagtggtggctggacttgagttcagggcccgggcgaactctacgcacagctgggctttgggggaggttgccaaggcaggtcacgcagatgtctgcaagctgctcatgggatccagcggttgctggaattgagttcagggcctgggcgaactctgtcaacagcatggccttgatggcggttgccaaggaagatcacgccgatgtctgcacgcttttgatggatcctgaggcggctggtgttcagtttgctcaagcgaaaatatcgctgcatgtgcccaataattccagatgtagcagaaatatttgattattgcgcccattgtttccttggagattttttcgatttggtttttgaaaccgagtataaatgttttcttcgatgatgtagatattgttgtgtattattcctgtcgtatctttagaaatgtcgattcgtgtaggagacgttctggctcctgtgatcccttcaccctcagtcggtacggatcacttcatacctagtaacatcggagggtccttctcagtttctggcgtcgacttgtgcatcgtgaattcgttgcgtcgtgcgatcatcgcttgtgtggagaccgcggcgttcgacactgtggttcctccggggggcggtggtggtggtgtgcgcgtacttgagaacacgtccgtgatgcacaacgagatgttggctctccgtgtgtcgcttgtgcctttgtgtctgactcccaacgagttggagaacttcgccccgggcgactaccaatgcaccttggccgtgcggaacaccgggaatgaggtgtttgatgtggtgagcggagacttcgtagttcgtaacgcgtcaggcgtctcgttccagacggagcgtttgaagcgtctgtttcctgttgaccagcggtcgggtgacagtgtgttacttactgtcttgcgccccaacatcatgtgtggcggcatcggtgaggctgtgaacatcacggcgactgcgaggcttggctccggtcgggagcatgcgagatattctccagtctgctcttgctattttcgttacaaggagcctgt

SEQ ID NO: 205 - DNA, 21815 bp, unidentified
  misc_feature 1..21815: note = Fanzor polypeptide
  source 1..21815: mol_type = other DNA
ctcaaatgaaaatgggcgaacgtgttctcgcatgttgttacagttattctcactgaaagatctattattccatttacaccataaaattgtaatgtacagttgttctcaaataaagtggtacacacccactaccgcatcacggcggcacctgtcgagtcgagtcacagagcgaccgacctcacgcgtttcgccgagaagttcctcgaaaaccccaccaccccctgatactgatatgagtgaacacggccgaagagttcgtataagaagatctttcttaaaaacaggtatggaggattttaaaaggagagtacgtgtgtggcacgaaaacattcggatattcgaggatcatgtccctcctcgtgcttctttgaaagtttcgtacgatccttcattcgagtttgatcgcacgaaatatggtacgatgcggaccgatatccgtgtcatgaacatggacacagtagatgcgacactagaccttatagagcaaggtatgcacccgctcgtcttgaacatggcggacatacataatcctggggggtgcgtgtcttgtggaggtgggatgcaggaagagtcgttgttccggaggacgaactaccatcgtcatctctcgaggtcgttttacccgatcggagaaagggaagccgttgtatcgttcgacgtcgacatcatcagggagtgtgagagagacggattcgagttcctgaagttttctaaatcggcatccttcttggcatgtccgtgcatttccatgccacagctggtggacaacaggttctcagagaaagacagtcaattgtttcgcgaaaaggtgagactcgtattgagtgtagctcacaagtacggacatgacagcatcgtattaggagcttggggatgcggggcgttcgggtgtccacctaaacacgttgccgagatcatgtttgccgagatcgaacaggtagaagggtgcttcaagaagatcgttttcgcgattctaggtaaaaacatcgatttctttcatctcgaaaatgaaaaaaaaagatcactacatcagtaactgttgttgttgatgaataaaaactcgtattgttgtagacaccactcggtccccctccggtggtcgcgacaacattaggttacaccgcaaggtgtaccgtacactacagaaagcggtttcattttagtattccgtcgagtgtaagagcgtttcatgcaagcagtcctcgtcacgtaatcgatagcaacatgcatcctggcatccatcaagaactgttggcccaggagacacacatgctcgcatctggtcttggggcacaatcccacctgtgtggaaataccgctgatgcacacctcatacatgtgctccgagtgagggagcttcggatctggaggataaactgcattcttgtaccccaaggcgtgtaatacctccagcgtcatgtagctgagtgtagagcccgtgtcatacatcatggaaatcttgaactggtgcaatggctcagcagcctcacacataatgggatccgccttgacaattacgggaaacaaaatgcggttcaaccccccgtaaaaccgaccagatgacattgcgtcataaggaaccagctcatcagtaactgacaggtagtgcaaattaaacagtgttttgctggcagagtaaactaccgatcgctcacagaacacggagcacatcacatcgtccatggcagcctggtatgggtttctggacaccgtcgccctacctggcatctcgaagtcttcatacacttccataatttcaagctcccttaccagctctgtcaggggaattattacgccgtcgagacgcgacagaccaaggtgcttatccggtaccaaactccggcacgccagaaggctgtcaagtgctgcgcccaacacgctgtctggcagagtgtcatagtgtgaagacgagcagttcctcctctagggaaccgttacactcgcaacttcaaagctgggaaagctaactgggcactctgtacggtccttgagggttcgatgatgattgatgcattggatgcgattcattattcttcttcaagtcatctgacttgtttacacactcaaaaggcgggaaactgtcgcatccacaccgtccgttcgtccgtccattcatgacacacggatgcggtggcggattctcgtccctcatcgtctcggagtcctcgaattgattgtaaacaaccattcttcagtataaacaaccatcagcacagcacacttcacgaacgaatgagttcctttgacgaaatcaatgaagatgtattggagatcattatagccaatgcgatttcgaacgaatgccacctcaaacaagtggctctcgttagcaaacagtggagatgcgtcgcaccccggtgtgtcacaaggatccacctgagacattataaaagtttggaatacgcattatcacgcatttgcaggcttaaagagttgaaaatcggtatcaatcgggggaaagacgtaccctaccaatcaatgtcggctatcgaagacaagatccaagacatatcgccgctgtccggcctcacttcgttggttcacctggacatatcgaacacctacgtgaccgacatatcgccactgtacggactcacttcgttgacgcacctgaacatggcgcacacctacgtggacgaagacctattatcaccgctttccggactcacttcgttgacgcacctagacatttcgcacacacttgtgaccgacatatcatcgctgtccggtctcacttcgttgattcacctagatatttcgcacctcacgtacgtggacgaacacccattatcatcgatttcaggactcaatgcgttggttcacctcaacatttcgcatatcggaaacagactagaagacatatcaacgctttccggactcaccgagttggttcatctgaacatggcgtacacacgggtgggcgaacaggacctatcaccgctggcaggactcacttcgttgattcacctcaacatggagggcaccgaagtggaatacctatcatctctgtccgccctcaattcgttgattcacctcgacatttcgcatctcaaatacaagctcgaagacatctcaccggtgtccggtatcactgcgttgcttcacctgaacatggagggaacacgtgtaccctctatatcagtactgtccggcctcacttcgttggttcatctgaacatgtcgtacacatgtgtggtcgaagaccgagtaccgatgtccggctccatttcgtcttgtcgccggagcaaggtgctcgacatatcgccgctggcaggactcgcttcgttgattcacctgaacatgaagggcacacgtgtgaaagacatatcaccactggcaggactcgctttgttgattcacctggacatgaagggcaccgacgtggaagacatatcaccactggcaggactcgcttcgttgattcacctgaacatgaagggcaccgacgtggaagacatatcaccactggcaggactcacttcattggtgcacctggacatttcgaaaaccgacgtggacgacatatcaccgctggcaggactcacttcgttggttcatctgaacatggagggaaccgacgtggacgacatatcacctctggaaggactcacttcgttgacgtacaatggatggaatgatgtgtaaaattgttcaacggggtgtcatgatacagtccagccaaagcaggaccaaatgcaatgggatgatctccccacaccctaccctctttgttggttgatattgcccactcttacactcggacaagggaattatgttacataatatgccgagtcccccaaaatcctcttgtatgtgtttatcttctacacttcgctcgacactgcgttctgtaaagaacctgtcagcttgtaatcaattgtgcgtcctaccacaacttccagtttgcaatatttctttggcctcgcaagaattccggggcgggttgggtacattgtaaagcaattgtggatgttaatggctgcatttaggtcacggtttacaaacaacttgctgttctccatggtggaactgcaccatagcaagcctcgaaccgtgcgcccttttttttcggattgcacactctggaggacggtggtgctgtccttgtgccagatctttgtggtacggaattcgtcaatgacggcaactcgccccttgaaacggtctctaaacgcattgaacgcgctcgttgtagggacagaaagttcatataagttatcaggcctggagaagaactttgcttttttctttgtgagcccaagcctttttatcacaacgcgaatcaattcttttgatacctcaaatccgaaagcatcatttaccttatgacgaagaacagcaagagatgtgaatggatctatttttaatgacgcctttaagaactctatgaccacatccgattttgtaggtttattccggttgtacacttttttagtggggtttgagatccacatcgagattgtcatgtggcttacattcgcaagtatagccactctcctcaaactttgcagcaatgtgtacatgtgtaccacaatcgaccgtctgtccaagttgtacatagagaattgtaattgattcaatatactgtaacattattgaccggtctgagtgtaactgctctgctctgatgccacatgccattaggatttaggctggatttcttcttgggttgtcgcagtcgggtcgtaaggctcaacttgggcacttgccacgctacgtttccttcaggtggaaaatagtatatggtgagggaaaatggctttattacagctaagcgaaatcaagaactatttgaagaacatagaaagtggcgacgcatcacaagagcacacgcttgatggacttatctacagcaacatgggtattggaatcaggtgcgtggaagatgcactggtgagggcatacaaagagtcggaacaaaaggggatcctggttcaacattcagatgcatggtgggggatgaccgattccatgaaagctctcgaaaacttgctagaccgaactgatgcaaaggagctgaatacaccctatcacaaatgtgacgatagtttacatccgtactacacaccatggcagtacatgtgtgttttgaaaaagacgttcctgctcgggaagtggtcttcaagttttgccattaaactggcggagtgtggggcagtgacagatatccctaattggtggagtactgacatgaaaagagttgcgcatacctgtcaggaaccaggtacacaataagatgcggtggtcctgtcaaataattgagtgcgagtcacatggcgtccgacctctcgcatcacggcggaacatgtcgagtcgactcacagagagagaccattacagtcggcggaacgatgtcgacttacgggggacgatcgctcgctcgcatcgcaaagaagtcgatactctatccgattttataaaatttctaatcaggatttaggtctcctgaaagactcgctagcttgagacatcagcacatgaagttcatttgtagttcagagaactcgcggacgaggcgccttcggcacaacacatacgtgggatcgtagatgctttttcgaaattgggtttggatgagttggatagcgtttttacgcctaatatggtgggcacgccacgcttgttggatctttttagcatatttcgtaagtgtgacattctcaacgatataatttatttgtaattgttggtggtatgtctcgcttgttgcgtatacacttctacaccggtcagatagccttgctggcacaatccagaagctccacatgtaatcatggcttccttctatttgctgaagatgacgatgaggttggatctcatatgtgtcgcatatgaatccgtccagtatcattaaacacggttttgtggatatccaactggggtcgattgtgactgttctcacaatattgtgtttactccagaacttcacgcaggtgtcgtctaggtctgaaaagacaaaattctcccagccatgcatttatgaacatttgtttcatggtcgagttgttttcttatacagtcgagctccatctacagttgttctcaaataaagtgggacaccttataatccagactgcagatcgttgcttttaggtaacgttggggggtgcagcaggttgaagaggttctcgaagatattccgagtagcctccttggtaaaccgttcaaccgtcgaatgtcgacaatggatccactttcatcgaagactcgttcaaatacagtcgacggaatgtacatgtgactgtcatgtattcaaagcggtattttttaatgataactgactcctgctgcaacacgtcatgcctcaaagttggcagcggacgaccgcatcctcacacacgcacggtggagggtcttacgcaaccgcatgtactcaaacgaaagccgtgagccgcatgagctcacctacgtgcgatgatatttagcttcgtaatagcatggatcgatacagaatatacaactgcacgaaaaacataacagcaagcagctccagaatgcccttttcctgagcggaagatacccgaatagccttacgtaatcgtccataatcaatattggatccatgtattcccacgcgtttgccgtgtacgtcttttctatctctacaatcttcttcaatcgagcagcattctggtcgtactcaattttggcaccagataataggtggattgtcgtgccgtcaaacgtaaacatagtcttattcatcacgttcgatgtacgcctgaagtagaatgtctctttgtacaggtcgagtatttctaaacatttattggcgtcgtcctcattatcgaataccaccgttccatgtaaaataaattttttgccattccacgtactgcctgaaactgtgaaacacgcatacatgcttgtatccaacttcttgaagttatccattgaagtctagggtttaggatcaaacaagaatgaaagacaagccatttgcccacgtgcagctgcatgaagggcgacacggtatgaattgatgaaacattgtccatgatgccatgcattgacgagacactctaatttaacattaagtgctgctacattcgcaatcagctcccatttgctcgcctcgatgtcacaccagtcgcacgacttgggatcatgatcaagcaagaaagatggatgacaacacatgcatgtgcctgtcatgtgctgcaacacgtcattcctaacgcactttatcacgacacatgccgcatcctcacacacgcgtcgcggcggctgctgtcgagatgttgatgcccactcactcactcactcactctcactcactcattctcacgcacgcactctatcacacgcaaacggcggaacacggtcgaatgtatcgtaggacacaaggatacatcgtcaatcactcaatcactcagattaaagggaccggcgctttgcgtacccaggcatgcccaatcattgtgtattagctcgcgatgtgcaccaaagccaatataaaacatcatcgttataaaagttagagcgtcatacctagtgttatgtcatatatagcgtgtcctatcacaatatcgttcgcttcgtctctaattcttgtctatgctcgacgcgcatgtcaaagcatgttggaagccttgtccatgttagcatggttggtttcgacaagtgtgatcatcacatggattgccatgacaaaaaaacagaagttacctcaaatttgcgcaggcatcatgtggacaataacaatcactatgtttattagcttctgctcatcattttaaaagaatcatgaagtaatgggcgttcctgcctcccggccgaattccaggggaacacaaagagcgtttgtatgacatggaagaacacatcaaaccaatcctggatgcactacagtcggtggaacagtaaaatgaaacatcccaataaacgtcttgttaatctcttgaatgtcttacgtttaattttatcccatatgtttttattagattttttgagctgctatctactggtttcggtacgatgttaacgtcattttcctttgcataatgcgagagatttcatatcagacgaacattgtattagaatgatatagctcgtccgctttgttatcagttatctttctcattacacccggtcttttggtgaattccacaccccttgaggatccccagggtatgtgatctgccactctcggcgcttgctatcttgtaacatccacacccattgggaccatcctgatgcatgggctttgaaatactccacgcctgtcgcttcatacaaagaagccatctcatttactatgtgttcgatccgctcgcctactgttttcaaatcactacatgtaataatgtgctctaccatgctatatacatatgtgtacacttttttccgccccgaatgaacactattgggtgtaatgtgaccaaatgtggcccgatcatcgacatacaaaatttaccaccatctaatgagatttctaagagatataaatagtacttgtagtttttataatatattacttgtataattcattttgtttcttaaacttttcgtaaaacttatacttttttagattgttgaatttctcattatcccctttgaaaggccacaataagaaaaggaattcggtacgatgtctcaatctagcgagtcgttcaagaggctctaaatcctgattagaaattttaaaaaatcagccgagaggcaggaacgcccattaagtatgcaaactcacagagtaatttgtgaagtagagttttacgtttgatctttgggggaagactcacattattgtgccaaggttcgatatcaggtgtgcgatagatccacttctcactatgtaactgtaagcctattgccacagctggggaatggatacttgcaccgctctgaatcaatcgctttgtgatataatggtttccattggttatgctgcacatgagcgcttcatcgtcttgaacgtgcacatcaactccgctttctagcaacatgtcgacaatttctgcataaccaaaccgtgcggccaacacaagcgcatcgccagaacgatgattataatttgcccctacagtcggcggaacagtaaaatgaaacatatatcagatggaaataaatgtacgacatcgccgttagaaaattggcgttaagaatggtttctgaattgggtgtgttaaaaacttctgtgtttacgaacatcagtcgttctactctgtggagatggaaacgctttggtgtaaatcgaaaacgacgtgaatttgtaagcaacctttttgagacgaataaggatttgttaaaatcgtttttattgtcaactcaatgcacaaccgcaagaggcgttgttgcttttttcaaaagtactcacaatgtacgattatcaactaaaacagtgtatcgtttcataaaactcattggttttacaagaaaaaggagcaaactccgtggacagtgcaaaggggacttagttccacttgtcaatgaattttgtagtaggtacaaggagacaatcaatgatgggaaaattttagtatcagttgacgaatgtgggtttagtgagcgtctcaagccacattatgggtattcccctgtaggaaaacctgttatcgttaaaactactggtgggtgggtacaccacagtttgttgatggcagttttttcagatggtaggaaagaattcgttgtgaagaaaggatctgtgaagaagacggacttcgttgcatttattgaatcattgagtttgtgcaataattcagtagcaataatggacaatgccagtatccataagaaattggtcctcagtcaccccgtcaatatttgttacacacctccttacagtccagaattcaatgctattgagctatgcttcgctaaggtgaagagagactttcgtcgtttggaactacataccgaatgaaacaaagacgcacgtgtctgatatgatttccttagcattcggcaacctcactgataaaattattatgggttgttttgaacacgtttggaacacttatgtgtataaagcggtctgtgacgtattgattatgaaagatggcgacgaaatctccgacagtcgcgaaattgaaggagctactgaaattggctgaagtaccatactcgtcgaagtccaacaaggacgatcttgtccgtttatgcgaagacaatggtctcatcgccagaccccctccagaatacaagacggtggaaaagatgtgtgtagtgaaatgcgccctgaagaaggcaatgagtcttgacgatgaagaattcggtaagtttagggagcatgtggaccagctcgtcaatgtggtgagccgcatgttacggcggtccagtctggtgctgactttccacatcacgagtctattagagaaaggtctggatattccagacctgtacaacatgaaagatacctactggaaggattggctacgtatcggggtagacggaatcttccctgatgaggaaagcaagatatcgtacgaagctgtgaaggactccatcggcgatgtaattggtaatgacgacgctgactacatcaagtcttatccgatctatttcgatcaggtattgaactatgcaggtcacacattgagcactgtcgtgtcaaacaacgcatgggttcctttgataccacgtctggccagactcacttccaccactttaaataaattaaatgccccgcagacgctggacacatcgaagatcattcggggatacgacgtgatgcaggctattcagcaagaagtccaaaacatggagggatggccagagtctgttcaagagtacgtcaatgaagttagggagatgctgagtgttccagatggaagtcgagtttatgataactatggcaaagacatggactttccgaccatggtccggtttaattattggatacagacacggttggaggatatggatgcacgtcgtatccgattgatgcccatcttcaatgtccaacgggtgcatgttcgccttgacctgaagaccctcgtgaacctgttcaggcacatgttccccaatgaccagaacatcgttgagctttccaagtgggaacatgtaaagaatcccgaaagcttcatgttgccccagaggcctgcacagaagaagaaaaaatcatgtggtcctggtgaatgggaggcatacaagttggtcctgaagcagtacgatgatgatgttaaggatatcaaggctactgacgagtacagacatgcaaagggtttgtatgacacgcttgtgaacgcccgaaaaacagtcgcaggttccttcttcagaaaaccacctgtcaagaatgggtgggttttcgactgcagcatctgtactgacggagtctctttgagcatgcagtacagcaagacagtacaggtccttgtctcagatttgaagaagacctgtaagaagcctcgtaaagaagaaggtatcaagatcgcagaaaaatacgacggctcacttaaaacgatattgcccgatatgggtatcgtcgtcctgggtgtggacccaggacggagcaacatcgctacggtaacgtatttggcagacgataaaaataagacatggaagctgacacgtggtgcattttaccacaagtcgggtatcaagaagcagacaaggcagaaggaactgcgttttgctgacatgattcctatgtgggagtctctgcgtgaaaatggagcagctttgagtacatcgaggacggataagatctccgcgtacttgtcaaattacgctaagttttctgacgagtggtggagattggctttgcgacgccgagaatcccgtgacaacttgcagcgttacatcggaaaacgaaaggtcaaagactctttctgggcgggtatcaagcggtgcatgaatgaaagaacttcctgatatgaaggtttgcgtggcctacggatctgccatcacgaaactgaagcctactggaccgggagaagttgcagttcccactggggccatgttcgcatcgtgtaaaagaattttcaaagaggacgtttctgtgacagatgagttcaaaacgactcttatgtcgtgggagacgggtaaagaaaaagaacgtgtttacaagatcccaagtgtttgttcagcagacgtgaagcttaggttgggtggtgaacgttttggtcacacgaaatcgaaaacgatgccaaaggtcgctgattgcgaccacttaggggtaaggttgtacaataaacgtaaaggcgcacaagagaagcacaggaggggtggcttcgccacttcccttgtcgattctcaaaaatcgatcgagcggtacccagaggtacgaggactgcgattctctccagaaacatgcatttactcggaccgggatcgctcttctgctctcacaatcgcaaggctgcactgcatggaattgatgggtctaggacgacctcttccatttgcccacagcagctctgttgttgttgatgaataaaaattcgtattgttgtagacaccactcggtccccctccggtggtcgcgacaacattaggttacaccgcaaggtgtaccgtacactcaagaaagcggtttcattttagtattccgtcgagtgtattgctaaacatgatttcacaatatctgttcgaccaataaaagcagcgcggacaaacatttcgttgattaggtgcatgtttcgggtaaggagtatgccattccatactgcagaaagcttgaataacaccccaacatgcatcgtttgctttatccattccaaaataatggcattcttgttttcacatatcgatttgcaacaatatatgacattcaaaaggtctggctttggcaatgccacacatacactgatcaccatgtccaacggcagcttcaacatgttgcacaacaatgggtagacgttacagcaggtctccaaaaatgattacccaagtgtttgttacaggtaacctcttatctttatacccatccatcttcagtgcatcggcgtctgtcgccttctttctcattgtccatctgactccacatgcaaacggcggaatcatttcacacacaagcattggagcgtttgtatgaagttctttttcctctgctaattatacttggcactacagagaatacaagaaatactaatttcttcctctgacactttttctggaacttctgttatgggtgatgcttatcttacagcactagaaaacttatggaagaaaaatccggatgtagatgcaaaacgattggcaacatttgtcaacaaatgcaaagatttgctcgtgtattaaggatcggttgatgatctgggaaaaagcagttgtcctctgtaaaagaagcaagtaaaagaacctactttaaaacactaccaaatgttggatgtggtgtttatcacgataaatcgtcttcccacacaacttgtaccgaactatatatattgttgccaacaattggaggataaccgtatcacactaaacaagcggcggagcccctttcacctccccccagcggagcgccgggggcgaccggaggggagcccccacaaaggagcccgcgaggaaccgagcgggtgggcgaccggaggggagcccacagttcacatgcatgagacacactggattgattgatgggttaaccctaaaccctctcgatgggagtggtgactgacaaacaacggagatgacgacatcatggtggtcaagattcaagggatcgtgaatgaataaaaaatgtaatttaatacttggccatctcaatcgagaaacaaatggcgaagttcaatatggtcgatcctgagatctggatttcggcgggggcccttcaaacggagtcgtgcgcataatgaaaagcaggagaatttcgctcattgtggtgcgctcctccacgccatcaaacgcaggcaccgagaatacggttttcctccccaaatgtgcggatgtggacgacattgtggacttcgtgtacccgaccattgaatcgatgatgacccgcgcaagagtgagtgagtgtgtgagagcaacaaacgctacaagatgtcaacacagtgcgtcaacttgtcccgggattcaatgtcattgactgtatgcagtgaatcatgtacatcacaccaatcatgcgtgctccagaatccttcgaaaaatggtttgcaggaggggcattatacatcaataaatgcccaacgcaggccatcatggtcagcagccactatgaattgttgggggtggcagcagacactgcaacgacagaggagattcggcgagcataccggcaagcagctctgaaatggcatccggacaaatgggcaacatctcctgacagccaacgggatgctgctcaggagcgtttcaaaatgttgtgcgcggcttacggagcgctgagtgatcctgacaagcgtgaagcgtatgaccgccaacacacgcccccgttacagacagcatcaatggaggatgcgtgggtggtgttttcccgtgttgtaatagagagtgtaaaagaggaaatgcagatatcggatgatactgcacccacggtgttgaagcttattgctagcctgttgctgccagcatccgggttctacttcggtgggctgtctggggtgtttgccagcaacgccctgagcattttgttgatcaaccctcatggattgaccaacgtctggcgcaacatgacacccgagcagaagagggaatttcaggcagcagtgttctgcctggcaaggcagatgagtgagggggtgtagaggttgttttcatggctcgagggagacgggcaaaactgtggaaaactgtcgcatgcacaccgtccgtccggcaaacgttaaaatatccaaatttataatgatggcttgtgtcaatgagattcttatttttttgttgaaataattgttgttcccaagatggagagtcttttcagaggtgttcatgtgaacacgtttaaaatagggattggttgatgattcttatttttttgttgaaataattgttgttcccaatatggagagtcttttcagaggtgttcatgtgaacacgtttaaaataggttgttgttccagagatggagagtcttttcagaggtgttcatgtgaacacgtttaaaatagaacgattttaacaaatccttattcgtctcaaaaaggttgcttacaaattcacgtcgttttcgatttacaccaaagcgtttccatctccacagagtagaacgactgatgttcgtaaacacagaagtttttaacacacccaattcagaaaccattcttaacgccaattttctaacggcgatgtcgtacatttatttccatctgatatgtttcattttactgttccgccgacgttagtggagccatgcgatgtgctgataatggcgctgaagcagctgtcggtgatgcttgatacacctctggtattcgtcgtatttgttgacttcatgctccatgtgtaaccatggccctttaccacttcctctatcctcaatttcttggatcacaagtggtgcgctccatttcgataatcgaccccattgatcaggtgtcatgaataatgtaagttttatgatttgcggtgcactttgatcatttgtaaggtctgaactttcgaccaagttgttgctgtccatcaattgagtcatttgctactccggaacagaataagccgagcgaaatagccgcgctgcattcgctcttctgcttattgttctcaaataaagtcagcagctcgattccactgccccgctccgcggtgcccgcgctccccattcagaaatccatcagggttgtcaagtcaagcagaagaatgtggagtcagatggacaatgagaaggaggcgacaggtttccgccgtttgtgtttggagtcagatggacaacgagaaggaggcgacaggtttccgccgtttgtgtttggagtcagatggacaacgaggaggaggcgacagctttccgccgtttgtgtttggagtcagatggacaacgaggaggaggcgacagctttccgccgtttgcatgtggagtcagatggacaatgaggaggaggcgacagctttccgccgttttaatgtggaggcagatggacgatgatgagtctgcgcaagccgccatgtcatgtgtgtgtgcggtctgtctatcggtctgatggacaaggagtctgcaaaatccgcagtggcgtggccctttccaagcatcccccccggggttcgcgacgggcctaccccattttgcgatcgcgcaagagaactcattccgcccatggcgcgcgtttggaaggtacttgcaaagctcgccgttcaatcgtgggacaacgaaatacgtacatgctacggagaattgactgccaacgacttcacagacggaaaccacgccaagctgtttatcctcaatctgatgacagtctcaccggacaatgacacatgcgatccccgcttccaaggcatgtatcttggtttggaagccatcttcccgtaccgtgattggtgtaccgtatattacattaccctcacacgcaagattttaagcagcctgttcattgagttggatgagttcagtatcctttgtgtggcatctgatggattcgccaatcatgattgggacattgtacagaacatagcgtcccagtggttgcgagcgtggtgctcggcgcgcaagatccagcgcacgtaccgcaagtacatcgagcacaaagagatccagcgccaaaagcgcctcctcatcacaatccccaggattgtgtcattgctcaaggattgcaagggtcgcgaataagtaattattcgagaacaactgttttttttttaccttcatcgaaccaatcaattgggttcaagggtcaccggtaagggtgtcccacaaattctgtctctgactgtactttaagacatacctcactctccatcagatatgtcttttgtttttgttgcatcctgagagagagaattttgctcgaccggattgtcgtgatcgattgtgatgatgaggcttctgttgctctcctcgcgctttttcacgaggtaattgcgcgtctgaacaaggtattttgggaaaggatcgacatgcggtcttcgggaacgtatatgcatcaatgcatgctcaaacttccatccaacatgttggaccatataacacagcgtcacacaaacagagcgactaaccccctcaaggcagtgcacaaacacacaacttttttttttatgagctgcaactatgaaatccatgcatttgctaaacgcaacagaaatatcagttgatgggcaatcatccggcatatcaactttagcatatattagccccacgcgttccgttacattgcattccgtagcaacgttcaaaatatgtgtgacgttgtgggtggtgagaagatcacggtcaaaagattcatggaacccgccaacaatcaatccaggaagtatcaaggacatctcgtttctaaacacatcacatatatatttaatggatcggatatggcgcatgcttccgcacatggagcatgccaccgaatccagcaggaaacgcaaaattagcttgttgcatagccaacctaaacgcatggcgaccgctcccctgcgtgcgctgcctcctcaaagtctcaagtagcgccagggctctggaagtttttaacacacccaagtcagcgaccattcttaacgccaattttctatcggcgatgtcgtacatttccatctgatatataatgggcgttcctgcctcacggccgattttttaaatttctaatcaggatttagagcctcctgaacgactcgctagcttgagacatcagcacgaaggaatcacaaatccgctccataccatgtttcgcaaccagtcaaaatcggccgtgaggcaggaacgcccattatgtgtttcattttactgttccgccgactgtagaattgtgcatcaacaaaagtgtgtctttgcttcccccctcccaagcgtttcagtgaaagtcccaagcgtttcagtcagaccggtcaataatgttacagtatattgaataaattcaagcgagtcatcaaatgaatccaatacaatccaatctgcccgcgctccccattctgaaaccaatctgagagttgtcatgccgaaacagtgacgaattacattattacacagtcagcatcatccttgtccattctcacacagcggcacttcttgctgatcactgaaataacattcctaatggtgacatcatcattcctgctggtcttggtggagacatgatcccgagttggaatataaaggaatatcttccttgatattgaaaggtcaaaatgttccaagaagaatatgaacgagaattacgtgtgttgatggaaaaaaacacgaaacccgtccgaagcctgagcctaatagatgccatcaccaatgacttaactgtgacatggttttactggaaatggaaagttctcaaaattattggttatgaagtccaaatcattcatgtatgcgagaaaggttgttgtagagttgtgtcttcctctgatatcggaagcttctcaagaagtgcttgtgcaaaaccaatcaatgaaatacccaatgttgcccatccagtaagagatgttgcgttctgaaacaatcccgacacaagagcacataatgcaataaacagtgccaagaagcggatgtatctacagtcggcggaacagtaaaatgaaacatcccaataaacggtataaggcgtcgacagacgttatagtgtacgagtggatggtcctacaaaatggcccgtccagcaaagaaacctcctttcatgacgcattgcacatcaacaaagaccccgtgttcttttgggccacggtaccggggaagagtcgatcgcttaagtgcggctggtccttcaatggacactctcgaaagtaccgacaaaagaacgatacggagtctgcaggatggagagccgtgatctaaaaaagaaccacgatattctcgttaacatcctgcaatttgttgattcaaaatcgtattggtgttccactgccccgtgggttgctacaccatttggttacaccgtaaggtgtgccgtacactccagaaaacggtttcattttagtattccgtcaagtgtatctggactcttcatcttggaggtgccgctcctcaaatcgtgttgcaacctccacgtcccccatcagttccttgctgaaaaacgtgaaattttcaagcaatccaacaccccctctcacattcagtaacccacagggctcctccgaggattcagtgctgccttgacaaaccatgcgaggagatgtgctgcgggggtgggtgattgtgtgacatgtatgtatttaaaaaagcaattatcacaataccggctgatccaaatgaaatgctgataccccaaccgaggcacacgccttcatatactccgaaacgtgttcaggagtcatagcagcgacgtcatcaggcgataacgacaacaacttttgcctgagatggtcctcagactcatcagcacgggcctcagcctcacgacgggcagcagcttccgcacaacgggcagtagcttcattgtcagcacgggcctcagcctcacaacgggcagtagctgcattgtcagcacgggcctcagcctcacgacgggcagtagctgcattgtcagcacgggcctcagcctcacgacgggcagtagctgcattgtcagcacgggccttagcacgataggcatcgtcacgacggtggaggtatatgaaaagcgcaattggtgcaaccgctacagtcagctgaacagtaaaatgaaacatgaaacatatatcagatggaaataaataaaaaatgtaataataaatgtacgacatcgccgttagaaaattggcgttaagaatggtttctgaattgtgttaaaaacttatgtgtttacgaacatcagtcgcttcagaatttgggattcccccaaacatcacctttgacattgttcaaacaaaccccgataatccatgggattgggggcaattgagtgcgaactcaaatatattattaccatctgacacaggcgtttgcaatattctctaataatcttctccgctctgaaaaccctgttattccattctattctctaataattctgaaggggtcaaaaccctacctacagtcggcggaacagtaaaatgaaacatcccaataaacggtataaggcgtcgacagacgttatagtgtacgagtggatggtcctacaaaatggcccgtccagcaaagaaacctcctttcatgacgcattgcacatcaacaaagaccccgtgttcttttgggccacggtaccggggaagagtcgatcgcttaagtgcggctggtccttcaatggacactctcgaaagtaccgacaaaagaacgatacggagtctgcatgatggagagccgtgatctaaaaaagaaccacgatattctcgttaacatcctgcaatttgttgattcaaaatcgtattggtgttccactgccccgtgggttgctacaccatttggttacaccgtaaggtgtgccgtacactccagaaaacggtttcattttagtattccgtcaagtgtataataagggttgggtacatgttgttgaccatcatcctgcgaggaaaagaaaggcaagcaatcgctttccatgtatgtgggggaaattatgtggcacagtgaacgcgcaaatgcacttcctttatcaatttctttaccgatcaacaaatgtttgaagtgttgaacccgcttgactggacaatacaatgccagcagatgtaactgaggtatcccctacacatatcgcccctttgtatgtcagagacccacccaaggaacgaggaagaggcacagcctcttccataaaatagggattgattgatgattcttatttttttgttgaaataattgttattcccaagatggagagtcttttcagaggtgttcatgtgaacacgtttactgttccgccgaatgtagacgtgagcatgatggatgtagtgaatgcacttacatctgctagattggatggtatgttatccagaatggatacaagaacatctatgttggagctggtgatttgtctgccaccaagtgacccacattcgccactacggtatcattcttcgtacgaactgttaccgtctcgtaccatcgacttctagccaggtggtaccgttcctcgtcattgtacagttcatactgtagttgcatccacaacacgtctgtggtttgatgcatacaaatctgtagtgcacaagtgtggtttccaatcgccatcatattgattgctataggaattgttatcggtcggatttttcctacaactgacaagctagctttccatgtccatgcatcaacatctcctatattgatccgcacccactttatatgttggatccccatgccagccaatgtgatgttgcgcaccacatcaccctctctaggcagttcgtattgtagataagactccccattgctttcccttcggagaaatttgtcgcagctcaagcatacctggtaggacaccaataggtgtggccgcttacccgctaatagcatcattaatgcctggtattcattcatacacaatgtttatacacaatgtttatactgacgaacaacatttggaacattatcgcttggtcagatactcgtttttcgaggcgtacacggaacaactttttccagaaaaccgagtgtaaacaactttttccagataaccgagtgcaaacaactttttcagaaagaaccagtgtgcttcatcttctgtttctgtttctacatacagaacgactgatgttcgtaaacacagaagtttttaacacacccaagtcagcgaccattcttaacgccaatttctaacggctatgtcgtacatttatttccatctgatatatgttttattttactgttccgccgactgtagtgaattccgttgtttttttactctgcagcacctagggtgatcaacattgtcaacccaccctttctcacttgg

SEQ ID NO: 206 - DNA, 21743 bp, unidentified
  misc_feature 1..21743: note = Fanzor polypeptide
  source 1..21743: mol_type = other DNA
gcggtgaggccattccaacgccatcgcatcccgtcgacatcatcgacggcagacaaataatgacaaatcattggaatgtcgccagctttgttgtgactttcgtgggtgtcgtgcgtgtttccacactgccaagtttacgggacaaggcccgtatgccacaagatttgcatgtgattgaagacgagtagaaaaaacttggtctcatccatcctcttgtgtatccacattcgaagcgaagacacacgtacacgaaaacggtatttagacccttcttttcagatccgagaagcttgggtgtgcagggttgggaggggggatgttccatcatcatgcgcttcaatgtgtgcgatatgagaagcgaggtgtgcgggggagatcgcaagatcacaaaagcacgcacgtgaacaagagtgataggaggggtatccaactaattgttacaacggtaacaacggtacattcctactcagggtcttcttttgacgcatgacgtctactctcttcgcttgttgattcatcatctgaattatcttcctcacttcataaaccatgtcaccaacgataccaacgataccaacgttaccacagatttaatagggttatgagaaaattgcatttttcatttttcatattgtaaagtgaaaagtgacattttaatatacttactttttattggtatcattggtaacatggtaatattaattattaattcatgatatccttattttttcaagacgattcatcatctgaattctcatcttcttcataaacagtgtaaccaactaaattgtaacaacggtaacaacggtaacaactgtacattcctactcagggtcttcttttgacgcatgacgtctactctcttcgcttgttgattcatcatctgaattatcttcctcacttcataaaccatgtcaccaacgataccaacgataccaacgttaccacagatttaatagggttatgagaaaattgcatttttcatttttcatattgtaaagtgaaaagtgacattttaatatacttactttttattggtatcattggtaacatggtaatattaattattaattcatgatatccttattttttcaagacgattcatcatctgaattctcatcttcttcataaacagtgtaaccaactaaattgtaacaacggtaacaacggtaacaactgtacattcctactcagggtcttcttttgacgcatgacgtctactctcttcgcttgttgattcatcatctgaattatcttcctcacttcataaaccatgtcaccaacgataccaacgataccaacgttaccacagatttaatagggttatgagaaaattgcatttttcatttttcatattgtaaagtgaaagtgacattttaatatacttactttttattggtatcattggtaacatggtaatattaattattaattcatgatatccttcttttttcaagacgattcatcatctgaattctcatcttcttcataaacagtgtaaccaactaaattgtaacaacggtaacaacggtaacaactgtacattcctactcagggtcttcttttgatgcatgacgtctactctctttgcttgttgattcatcatctgaattatcttcctcacttcataaaccatgtcaccaacgataccaacgataccaacgttaccacagatttaatagggttatgagaaaattgcatttttcatttttcatattgtaaagtgaaaagtgacattttaatatacttactttttattggtatcattggtaacatggtaatattaattattaattcatgatatccttattttttcaagacgattcatcatctgaattctcatcttcttcataaacagtgtaaccaactaaattgtaacaacggtaacaacggtaacaactgtacattcctactcagggtcttcttttgacgcatgacgtctactctcttcgcttgttgattcatcatctgaattatcttcctcacttcataaaccatgtcaccaacgataccaacgataccaacgttaccacagatttaatagggttatgagaaaattgcatttttcatttttcatattgtaaagtgaaaagtgacattttaatatacttactttttattggtatcattggtaacatggtaatattaattattaattcatgatatccttattttttcaagacgattcatcatctgaattctcatcttcttcataaacagtgtaaccaactaaattgtaacaacggtaacaacggtaacaactgtacattcctactcagggtcttcttttgacgcatgacgtctactctcttcgcttgttgattcatcatctgaattatcttcctcacttcataaaccatgtcaccaacgataccaacgataccaacgttaccacagatttaatagggttatgagaaaattgcatttttcatttttcatattgtaaagtgaaaagtgacattttaatatacttactttttattggtatcattggtaacatggtaatattaattattaattcatgatatccttattttttcaagacgattcatcatctgaattctcatcttcttcataaacagtgtaaccaactaaattgtaacaacggtaacaacggtaacaactgtacattcctactcagggtcttcttttgatgcatgacgtctactctctttgcttgttgattcatcatctgaattatcttcctcacttcataaaccatgtcaccaacgataccaacgataccaacgttaccacagatttaatagggttatgagaaaattgcatttttcatttttcatattgtaaagtgaaaagtgacattttaatatacttactttttattggtatcattggtaacatggtaatattaattattaattcatgatatccttattttttcaagacgattcatcatctgaattctcatcttcttcataaacagtgtaaccaactaaattgtaacaacggtaacaacggtaacaactgtacattcctactcagggtcttcttttgacgcatgacgtctactctcttcgcttgttgattcatcatctgaattatcttcctcacttcataaaccatgtcaccaacgataccaacgataccaacgttaccacagattcaatagggttatgagaaaattgcatttttcatttttcatattgtaaagtgaaaagtgacattttaatatacttactttttattggtatcattggtaacatggtaatattaattattaattcatgatatccttattttttcaagacgattcatcatctgaattctcatcttcttcataaacagtgtaaccaactaaattgtaacaacggtaacaacggtaacaactgtacattcctactcagggtcttcttttgacgcatgacgtctactctcttcgcttgttgattcatcatctgaattatcttcctcacttcataaaccatgtcaccaacgataccaacgataccaacgttaccacagatttaatagggttatgagaaaattgcatttttcatttttcatattgtaaagtgaaaagtgacattttaatatacttactttttattggtatcattggtaacatggtaatattaattattaattcatgatatccttattttttcaagacgattcatcatctgaattctcatcttcttcataaacagtgtaaccaactaaattgtaacaacggtaacaacggtaacaactgtacattcctactcagggtcttcttttgacgcatgacgtctactctcttcgcttgttgattcatcatctgaattatcttcctcacttcataaaccaacgatgtcaccaacgataccaacaataccaacgataccaacgttaccacagatttaatagggtatcttgtggtacctgtcgttttgggagtgagagtacctgacgaaagtagagaagaagatgtcgagtttcatttcagaatcattattcttttttcaatttaacatcaaaacattgtgatgttaaaacattaaaacgttaattgacttacatacaccatgcactgggcttctcgatgtaacgcttgggattttcattgaaacgcttgggaggtgaagcaaagtgcaggggagttgcgctctgcgaagcacatgcgcactcgatctctttttggaggggaatttaagggagaaacaatccaatcgattatgtacaaagtgaaaacgataatacacggcattactactactaatctcacaagcattactaagacaaatcactcaggtagtatgggcactaatgctgaagacaatacgggatcatcatttacctctgctaatgactctgctactgcttctgatgcccccatgaaaaaggggcagtccatgctatcaaagaggcggtacagacagatagaagaaaaattcaaggagatactcatcggagtcagcaaagaagaaaacgaaggggtcatcctagcaaggctactcacagaattcagggaaattatgcagtttgacccggagggaccaacgtatggagcaagggacacggcaaaacagtgcgaataccaaagaaacagaaatatggcaatcaaagatctggcaaaaatagtgagggaaaagcttaaagaagaatcatacaatgtttattaaacactcaatatgtcactcgatgttattctggcggcggcacatgtcaagaatttcccggcccccaccgaggcaactcacggtgccatgggggaccccatgttcggatcgtttgcgatccctgactgcggacctcaggcacaggcgttccgcgaggcatacgtgcacgcgctcagggatgagggtcgacccctgtccatcgtagagacccatacagacacatcgccaatcatagttgaccaggacatgcgacagaacacccctgagcgcatatacacacagaagcacatcgagaacttcatggacgcgctcgtgtcggccaccaaatactttgtagaccagcagcacatggacttagtgatcctcgagaagccaaatccaagactcgacaagaaacacttgggggtgtacaaagatggtctacacgtgttcatgccaaatgtcatcacacacccagagatccaactcgccatcagagagcacttcgtaaacgatatgaccgaacataggacgtacgagagcaccatttgcatccctggaatggccaaaatggatcccggaaagatatatgacaaaagcgtgatcaccccgggaggcaggtggttcttgtacggatccaagaaaccggatgagacccacccgtggaaagtcactgcctggtaccaacttgatactggagcaggctcgctcaagaaacttgacgtacagaacatggatctcgatacactcgtgcagaatctgagcatctgtgtgcatccgcacggggggcacagcatatacaccaaatacggtcaggaggaaatcgaccagtacaagagccaaaacgtgtcagagactaaaaagacattcgactcgcagcatggaaggaatgtggaatccctatacaatctcgtggacattctagacgcacaaagagccagcgaatacgattcatggctgaaggtcgggatggcgctgaagaatacagtcgacgcaggaaccgacactcagcgcctcgagatatggaagtcttttgcaaaaaaatgccccgataagttctgtgacaccaagcacgaacaggtgtgggcaaatctgaagccgacaaatatcactctagggacaatccgcttccttgccaagcaggatgacccgatggggtacgccgaattgaacctaaaatgggacaacgccaacaaacagggcgaggaaatcgacaaggatcgcatcatcaaagacctcaaggtaaagctagaattggcaattgacaacatggtatcattgaatgtcgtaaacgatagcatcgagttcaagattgacaacggagcgaaaggaaccatccacaagagcaaatacatggtggaggtagatgacatatattctggatcgatgatcgacaagttcccaatccatgaagacccagggttcatcaagaacgtgcctatcgaccaaggaccatacgaatgcgagctgcggaccatggatggcaaaacaattaacagtgccatcttgaagagcaccgacggcttgcaaatcgcattaatgaatatgggaagtgacaaccaatacgtaaatgtgagatccaacacgagcaacgcaactatccgagacaagcaggtcatcaacacaatccataacatgatcttcaaggcgcaagagtcccacgcgaagaacatgtacgggatcacgcagaacatcttcctggtcaacaacggcaccatcaacatcaacatgaagaggggagatgatgatgatgatgatgatgatgatgatgatgatgatgatgatgactcgttttcgtcctcaatcaaagaggatacgttggcggagaatttcatggaggtcgcaccagaattcttcaccagaatcaagtgtgtgccaaaactcaacaggaaagaatgcgtaggtgacatgtactactgcgaccctgctaccaatcgatggtcgaacttaagcaacttgatgataatcaaagtaatcaaactcgagttcaaatccaaattccctgctgagaagaataacaagacgaataagaagattcgggggtttgtcgacacggttaaggggcgttctgtgttacttcaagccatcgcacttctcgtcctagacgaaacgttcaccgataacctcgatgtcaaccctgacctctttgcggtcaacaacggtgtatttgacagcttgtcgagggacaacgtagttttcagaaacgtagagattaccgacaatattagcaggtgtgcgaagtgggattaccagggagaggaggacaaccacaacctccaaagatgcaaagaggagctagacgacttctttctaaaaattctgccagtggaagaggagcgtgacgtcgtgctctcatttttcgcgggtctcctaacaggtcgacgcgatgagaagaaattcctagccttcaccgataaaacatccggagacaacagaaaaagtacccttatgacgctcatgggcagcttcttcagctcgtacaagagcagtaatggaaaaaatttcctgacaaaggggtcgtttgcaaggagccgggatgaccacgacgcgggtctcgaggccatgaaaggtctcaggctactggtggcagacgaaatgaaatccaacatccctctggacgaggcgttgatcaaaaacattgcggggggggagggtgtgtgtatcgaagggcgctcatgtggctctgcggactctttcgaattcatctggcaggctggggtcgtcatggtattcaacgaaggcgattgtccaaagttcgacggaggagacaacgcatttgtcaaaaggatgatcgtggttcccatacgctcaaactttgtgcaacaacccgacccagagcacgagaacgagtttgagcgacggaaccttaccaaaatattgcccacttggctgtcggcgctggcgcagctgttcatagagaacttaagtcgaccggggcgctcaagcatcttcgacaaactaccggtatcgatgaccgagtggaagtctggtattgcggacagcgccaacccccttgccgagtggctcgaggaggtggtggaggtgacgggggagtattcggacatggtgtgggccggggacctcaaggcccggtggatagagtcccactatggacccgcggcagcagtcttcagcaacaggctggtcaaggcattctttgctggaaaacagggaattgagtggaaagatagtgcaagaatcgagacaatatgcaaaaagggagtgataagggggtgtaaaattgttgttggttagacacgattgagggggcatgctttagcatcatcatcatcctcgtcgaacatcgtccatctgacgcgatcgaacacacgccggatttcgaaccctcgtacactcgtagacgagtataaacaagtcagcgtactcttattcactaaacaacaacactaatacaataataacaagtcagcgtactcttattcactaaacaacaacagcacacttctgtattcgatgcattcacggtactgatgctgagggacgagacggtcgagcaacgccttcacatcgtggacacggatggtctcattgtcggggaccgtccttaaggtcctgtggaaggattatgtcccattacagtcggacacatctcgtccacaatatcagacttccactctgtcataatagagtggaagtctgatattgtggacgagatgtgacgtcttgtcagcttcagtcttcaacaccaagctggtcaatggtatttgtcctttgttctttgcgggcaaacaatagaatgcaagaatcgataaaggggtgtcaacttgtttcactgtacacgtacacacgcaaatggaggaacacaacactcactgtcgacgacgatcgaaaaacatctgagtacacgcgcaaagagaggaggaacaccaatgtcagccaatgtccatcaatcagactgaatacacaagacacgcacgcacgcactctatcacgacacatcatgccgcatcctcacatgccgaggcggaggctttcgaatactcctcgtccacggtggcttgcgcagcctcatcaatgctcagatttatacaagagtcataaaatgaaaccgcttcgtgtttaataatggtgtagaaatccacggggcagtaaaccatataaacattatgtgtgaagaaacaggagcatcataaatgagcatcataaggctattagcgggcaagcggccacacctaatggtgtcctaccaggtatgcttgagctgcgacagatttctcagaatggaaagcaatggggagtcatacatacaatacgaactgcatagagagggtgatgtggtgcgcaacatcacattggatggcatggggatccaacatataaagtgggtgcggatcaatataggaggtgttgatgcatggacatggaaagctagcttgtcagatgtaggcaaaatacgaacgatgatagcaattcctacagtcggcggaacagtaaaatgaaacatatatcagatggaaataaatgtacgacatcgccgttagaaaattggcgttaagaatggtcgctgacttgggtgttaaaaacttctgtgtttacgaacatcagtcgttctactctgtggaggtggaaacgctttggtgtaaatcgaaaacgacgtgaatttgtaagcaacatttttgagacgaataaggatttgttaaaatcttttttattgtcaactcaatgcacaaccgcaagaggcgtcgttacttttttcaaaattactcacaatgtacgattatcaactaaaacagtgtatcgtttcataaaactcattggttttacaagaaaaaggagcaaactccgtggacagtgtaaaggggacttagatccacttgtcaatgaattttgtagtaggtacaaggagacaatcaatgctgggaaaattttagtatcagttgacgaatgtgggtttagtgagcgtctcaagccacattatgggtattccccggtaggaaaacctgttatcgttaaaactactggtgggtgggtacaccacagtttgttgatggcagttttttcagatggtaggaaagagttcgttgtgaagaaaggatctgtgaagaagacggacttcgttgcatttattgaatcattgagtttgtgcaataactcagtagtaataatggacaatgccagtatccataagaaattggtcctcagtcaccccgtcaatatttgttacacacctccttacagtccagaattcaatgctattgagctatgcttcgctaaggtgaagagagactttcgtcgtttgaactacataccgaatgaaacaaagacgcacgtgtctgatatgatttccttatcattcggcaacctcactgataacattattatggtttttttgaacacgtttggaacacttatgtgtataaagcggtctgtgacgtattgattatggaagatggcgacgaaacctccgacagtcgcgaaattgaaggagctactgaaattggctgaagtaccatactcgtcgaagtccaacaaggacgatcttgtccgtttatgcgaagacaatggtctcatcgccagaccccctccagaatacaagacggtggaaaagatgtgtgtcgtgaaatgcgccctgaagaaggcaatgagtcttgacgatgaagaattcggtaagtttagggagcatgtggaccagctcgtcaatgtggtgagccgcatgttacggcggtccagtctggtgctgactttccacatcacgagtctcttagagaaaggtctggagattccagacctgtacaacatgaaagatacctactggaaggattggctccgtatcggggtagacggaatcttccctgatgaggaaagcaagatatcgtatgaagctgtgaaggactccatcggcgatgtaattggtaatgacgacgctgactacatcaagtcttatccgatatattttgatcaggtattgaactatgcaggtcagacattgagcactgtcgtgtcaaacaacgcatgggttcctttgataccacgtctggccagactcacttccaccactttaaataaattaaatgccccgaagacgctggacacatcgaagatcattcggggatacgacgtgatgcaggctattcagcaagaagtccaaaacatggagggatggccagagtctgttcaagagtacgtcaatgaagttagggagatgctgagtgttccagatggaagtcgagtttatgataactatggcaaagacatggactttccgaccatggtccggtttaattattggatacagacacggttggaggatatggatgcacgtcgcatccgattgatgcccatcttcaatgtccaacgggtgcatgttcgccttgacctgaagaccctcgtgaacctgttcaggcacatgttccccaatgaccagaacatcgttgagctttccaagtgggaacatgtaaagaatcccgacagcttcatgttgccccagaggcctgcacagaagaagaaaaaatcatgtggtcctggtgaatgggaggcatacaagtcggtcctgaagcagtacgatgatgatgttaaggatatcaaggctactgacgagtacagacatgcaaagggtttgtatgacacgcttgtgaacgccaaaaaaacagtcgcaggttccttcttcagaaaaccacctgtcaagaatgggtgggttttcgactgcagcatctgtactgacggagtctccttgagcatgcagtacagcaagacagtacaggtccttgtctcagatctgaagaagacctgtaagaaccctcgtaaagaagaaggtatcaagatcgcagaaaaatacgacggctcacttaaaacgatattgcccgatatgggtatcgtcgtcctgggtgtggacccaggacggagcaacatcgctactgtaacgtatttggcagacgataaaaataagacatggacgctgacacgtggtgcattttaccacaagtcgggtatcaagaagcagacaaggcagaaggaactgcgttttgctgacatgattcctatgtgggagtctctgcgtgaaaatggagcagctttgagtacatcgaggacggataagatctcggcgtacttgtcaaattacgctttgttttctgaagagtggtggagattggctttgcgacgccgagaatcccgtgacaacttttagcgttacatcggaaaactaaaggtcaaagactctttctgggcgggtatcaagcggtgcatgatgaaagaacttcctgatatgaaggtttgcgtggcctacggatctgccatcacgaaactgaagcctactggaccgggagaagttgcagttcccactggggccatgttcgcatcgtgtaaaagaattttcaaagaggacgtttctgtgacagatgagttcaaaacgactcttatgtcgtgggagacgggtaaagaaaaagaacgtgtttacaagatcccaagcgtttgttcagcagacgtgaagcttaggttgggtggtgaacgttttggtcagacgaaatcgaaaacgatgccaaaggtcgctgattgcgaccacttaggggtaaggttgtacaataaacgtaaaggcgcacaagagaagcacaggaggggtggcttcgccatttcccttgtcgattctcaaaaatcgatcgagcggtacccagaggtacgaggactgcgattctctccagaaacatgcatttactcggaccgggatcgctcttctgctctcacaatcgcaaggctgcactgcatggaattgatgggtctaggacgacctcttccatttgcccacagcagctctgttgttgttgatgaataaaaactcgtattgttgtagacaccactcggtccccctccggtggtcgcgacaacattaggttacaccgcaaggtgtgccgtacacgaagcggtttcatttaagtattccgttgactgtatagcaatcaatatgatggcgattggataccacacttgtgcaatacagattggtatgcatcaaaacacagacgtgttgtggatgcaacaacagtatgaactgtacaatgatgaggaacggtaccaactggctagagatccaaaacagtacgacgagatggttacagtcagaccggtcaataatgttacagtatattgaatcaattaattacaattctctatgtacaacttggacagaccgagtgtacaacatgagggggaatcccaaattctgaagcgactgatgttcgtaaacacataagtttttaacacacccaattcagaaaccattctcaacgccaattttctaacggcgatgtcgtacattcttatttatttccatctgatatatgttttatgtttcattttactgttccgctgactgtagcggttgcaacaaccattgcgcttttcatgtacttccaccgtcgtgctgatgcctatcgtgctgaaaatgaagctactgcccggcgtgaggctgaggaccgtgccgacaatgaagctactgcacgttgcgcagaagctactgcacttcgtgcggaagctactgcccggcgtgaggctgaggaccgtgccgacaatgaagctactgcccgtcatgcggctgaggaccgtctcaggcaaaagttgttgtcgttctcgcctgatgacgttgttgctattactcctaaacatattgcggagtataggacggcgtgtgcttcggttggggtagcatttcatttggatcagcatgtattgtgattttctttgaataaatatatgtcacccgccccccacaggacctctacgtgtgcagcgtagcacggcaacactgaagtgagcttgcgacaaaatgggacaaagcactgggtggatttcagggtcacatcaagaaaacagccacgaccctagagtccgaacttgtgaaggcggttcgtggtcagctggatgacagccagttgcttggacttagctacaactggcaggaagtgcgacagtccatgcctggcgacgtcgatggacttgttgtcgggtggctgcgtggtgacagcagacaacaagtcgtggttgtgtgcgaggcaaagtatgacagtcgcgcaaggtatgctctgcgccccgttctgggatcgttcaagcagacagtggatgatggttgttgccacctgggtccttttatgcgcaaggacctcacgccactcaacgcgcacgccaccgatgccctttcgggtcacgagatgtccatgtacagacagccatagtccatcggcaaacaacggattgtattcaacaagcggcggagcccctttcacctcttccccccacctcttccccccagcgaccgggggcgaccggaggggagcccccacaaaggagtccgcgaggaaccgagcgggtgggcgactggaggggagcccacagttcgcagttcacatcaagcattagacataactacagtcggcggaacagtaaaatgaaacatccaaaaacaaataaaacaaatagacaaccgtttttttattgtctatttgttttattttttttagcttggttgggtatccagggccaccacgtggaggtgctgattttggccccgttttgtttctcttgttttcaaatacttgaaacagaaacaccttctcatccagattacttcttggtgtgggacatccctttgcgtgttaacacaggcttggcgacgaaagtcgggttgtcgtaaatgacgaataccttgggtcgggacgcaatgattgcgaagacgtcagagattccaaacatttcgtatgacagatgcagtatattaaggggtgtgaggaggttgttgttgtattcctaacgttccgaaaaacctttcaatttttttgtatttaaagattctcagaccacgcgatcgaggactcggggatgataccggcactcacctgccatcgctggtgcttagccaactgcttcaccaacttaattccgttcttgcgggtctcataagaagtctcaatcgtgtctacgaaacggtcaacaagcacgtcacttgtaaaagcacactgacgcaggcaactgaacttctagaaagaaagaatatcctcgatgttcttgctactacacaactgaactagggcaatggacaaattacccttcgtagtgctcataaccacttgaaaccgcgactgatgttcatatgcaaaagggggatgacacccttcacataatcgctcgagtgaaggaagccctccttctcggaaaaacgaatgtcgtgtgactgagcgtttaacattaacacagccagcttagctgcaaaagtcgcatctccagaagtcttcttacgttttgaagtagaagaggaattgcggggtgttgaagacattttacatacacatgtatacatgtatataaaaatagcctagttcctccggaacgactcgctacagtcggcggaacagtaaagttgtatacaggatggacacaaagacagtatcgtacgcaccttttcatgcgctccggcgtgatccagagtttgtgatcaactcgttcactaccgccatgatgccgttgaatttaagctacccgtatatcctcgaacctatgaatttcttattacatatccgggggtccgggggacatgtagtaagaaagacaatgaaattctccataggggtatcataggggtcaactccccaggggatgctgtcctttacgaacagggattttctgttcgaactgccttcaggaagatgccagctgcccccacaatgtctctgtcgcaggtgaattgacagttcttgcaggtgcatgtctctccacacttgttcaagaaaccgcacatagggcatgtctgacttgtgtaatgctcaagcacatgcaagaacactgtcccgtactctgcacacttctccttcagccgattgaacagcacagagtggctcaaagtcagcatctgacgggcaaccttggttgtcagctcccgttcagcactgattgtcatcttcgccgtctccatttgaggtaccaacaacacatcgtagcgagcggccaagaaatttgttgtctggtccctaaactctttcttgaggtaaaaaattctcttccgaatgcgaatcatctcagaattgataaataatataagaatctctacaactaaatggatatcatccccagaatgcaacacccgtgtgggaggacaagaatgtaacatcccgagttcaaactcagcgaagaccttctaaaccgcaataggggcaaacacatttggaaatgtggtcagctagaaatggcagaattacaaccataccgatgcatgaaatgcaacctgacaattgcagagctgcagcaacttggcaacactggagtttgctcatcggaatacagatacactcgacggaatactaaaatgaaaccgctttctggagtgtacggcacaccttacggtgtaacctaatggtgtagcaacacggggtctttgttgatgcgcagcgtcgccggtgtgaggtaactgcagcgtcgccggtgtgagggatggtcgaggtttcaaaaccttgcaacctctctgaggatgtatggaagagggggatgcagagggatttcattttagcggtttaatttttgtttcaaatgtttcattacccactctcctgactcttcagatatgtttactacaaaactaaacagcaatctggtccagaacgacgaacatcttcctaatcttcgtcggcacatactgagcgtcgatggtaggagatgctgcgcgtagcgcattcgcgtctggctcccctaccatacttattatgttctctatcacgtcaggtggaattgatgacaatagggttgggtccaactgtctggcaagacatgtgctttcgtttgggcagaagcggatcacggaatcgcccacaacagcgtcggatgcaatgaggcgggttagtctcctttctaatacattccactccacataaatctcaacaatgcatgccctccgtctaggtccatccttattgttctcccatgctcgcatgttttccaacagtgtcagtctcctcataagcgcacagacgagtccgttgagattgcatttgcggatatgaatattctcatgccacattttttgagggtctaagggtatgctatcgtccttgacgtacgcctcgaacgcattgcgttgtagaaacaaaacctgcaaacggtcaggaaatccaaacaattgacgcacatcggcataccttgcacattgcactccaatgttcaacgatttaaaacccaccttgaaaggcatacttgattatacatgcacagatttttactccttatgttgagcagtcagtaccaacatccaggagtcattcctcgaatccgcgattcatctttcatgaactgccgtctcaagcaggcgtctgcttaacaaactattccgggatcatgaaagggaatcgcgggacccacggagtggggcaggggaattcagatgcggactcgcggaaacacgtgtcctaggatctgacttgtccatcggaggaggacacacgcaaacggcggaacactgccgaatgtatcggaggacgcacgcaaacggcagaacacataataatataattacataattgtatataataatactaattacataattgtatgtgtgcccggactgcagaaatgccgccgttttccggtacgttcagctacaagaatgacaacttgtaccgcagactgatcggagatggtgtgcacatggtcatggtgcgactagaccctaacattgccaagatccggtttgaggtccaacaccccgtggctgaggatacccaggctgaggcccccatcatctaccagccaattcagattccagagggggtcacattgatagtagcagactctgccatccctgctgcacgaattgggaatgatttttttatcgtcacctggataggcaactatctcgttctaagggggggtaatgtacttttcaggatcttcaataagcaatcccaggcgattcaattagctgagtaacagtgtcaaaaagtgcccggttaaaatctcgaatttagcgcaaccgccgcacaggtcaatgtcctaacaccgcacctgtgctccagcgcccgcactgcgtcgcgcacgtggttgatctgttgttgcatgtgcatgttggctgtgatgagctcagtcacgcatcattaatgtcgttcaaatgttgctgcatgtgttgcatgatgcggagctcgcatgcaacgaactgctcttgggtgacgtagaagggtagttggttttgtagggggggcggctccatgttcatgtccctaaaggcgcagcagacaagaaaacgcaatccaaagaatccatgcacgccggcggctcctcgtccagactcgtcacgcacacgcacggaactgatgcggcggtagcggcttatcgcccagccccatcacgcacggcagaggcagcgtctcgtccatccttatcacacatcatgccacgcggcggcttgagaaggttgcaacagttgactcgtttgctttccgaaaataagtaaacctaacagtgtataaggaatttgcatgtactaaatatcagaatgccatgtatggcaaccaacgtttctgtaaaattggcaaggcctccgatgcccttggtgtctccaggaccgtcctccgtcgatgggcggataatggcacgatcagaacgatccggactccaggcaaccaacgtctctttgacccaagcagcatccaaggctacctcatcggaaaaaaaaccagcagtcgtcaagtcattctctacgcacgtgtgtcctcacacaaacaacaacccgacctgctcagacagcaattgttcttgcaaacccatatttctgacaaacattccggatgcgagcaagtcattgaagtcaaggacgtcggatcagggctcaacttcaagcgcccaggacttttacgagtattgagactcgtcacggcaggacttgtatcgtcaattgttgtggcttccaaagacaggctcgcaaggtttggtttcgagctcatttaatggatttgctcgaagcactcctgctcgaagcactcctgctcgatcatcgttctcgatcaccaagacggagcccctgaagacgagcttggaaaagacctcatgtccatcgttcaagtatattgttgccgatggaacggtcgaagacgctacaaagtcaaatgccaaacccaagttgaggaccttaaagctgaagctgaacccaacaaaggctcagaaatcgatgctggcagagtttgcagggtgcagccggttcatgtacaacaaggcggtggcagcacggttgggcgtcggcagcactcacaagtctgtcttccgaattcgagacaggtatgtgacgaacaaggtgaggggggaggggaggatgccaaacccgtacttcaagaatcgccaatggttgcttcaatgccccaaaagcgtacgccaaagtgcaatcaaggctgccttggcaaacatcaaggcttgcttttcgaatctgaaagcaggtaacatcaagcagttttcagctccgttcagacggaagaagacagagcttgagaggggttgggtcattgagatggaccagaagaacgtttccaaggatggcgacaaactcttcatcttcaaagacatattgggcaacatgcgctacttcggtagcaaacaactccataagttgatgcctgagttaaacccgacccacgatccaaaggtccacaaatcacgcttcggcgaatatttcctcgtcttgtctgtcgctgccagggacaggagggcagagcggaagcctgtccatccagacaaggttgcaactgcatccatcgacccaggcgtccgcaaaacaatggtcacgtactcaccagagaatgaggaatccttcatgcttggtcagggacaggcatccgaccttgtcaagctcctgctggttcatgacaagctgcagtcaaggttggatacttagaaaaccttacgaacaaaagagaggatgaagataaaaatgcagatgattcgcattcggaagagaattttttacctcaagaaagagtttagggaccagacaacaaatttcttggccgctcgctacaatgtgttgttggtacctcaattggagacggcgaagatgacaatcagtgctgaacgggagctgacgaccaaggttgcccgtcagatgctgactttgagccactctgtgctgttcaatcggctgaaggagaagtgtgaagagtacgggacagtgttcttgcatgtgcttgagcataacacaagtcagacatgccctatgtgcggtttcttaaacaagtgtggagagacatacacctgcaagaactgtcaattcacctgcgacagagacattgtgggggcagctggcatcttcctgaaggcagttcgaacagaaaatccctgttcgtaaaggacagcatccctgggggagttgacccctatgatacccctatggagaattcattgtctttcttactacatgtcccccggacccccggatgtgtaataagaaattcataggttcgaggatacacgggtagcttaaattcaacgggaattacagcgtgtcccactttatttgagagtaagagcacatgatggcgtccgtgaagactcgtcgcgccttgttaatttttccaagttactacgtagactggttgggaaatgtgcttatgcacacattgcaagagtgtggtacgctgccaagggacttgaaggggtacagatgtggcggagccatgaaggaccatgatatttttgtcaacaagttttggggttctggtatggagatcagtgttctcgaaggcaccgtggtccggaggaccgtcatggaccaattggcttggttgttggagccctccgtggacgttgctctattgttattctgtgggcatggcatgaatgaggggtcgccacgtcacggtacattagtatgttcttacaaacagctggtgtcagatgaggccatcgatgcggtggtggcagagcaacgtttttgcggcacactcatccgcgtgctcaacatgtgcgaagcagatgccattgcccccggcattggtctgccgttccagcacggaagatctctgcgtgacgcagcaagagcagatcatgatgcacagttccatcgcgttgcacacaaggacgtgatgttgttggcaactgggacttttgaagaaacggcaggtggcaaggcaggcacacccttcatcgctgccctgggcagaatgtttgacgcagagtcgatcttaacctacgagcgccttgatgagctcttgcagaggcactggcctggtggcagtgggagggcactgctgtatcctgcaaggttgaaagggatcttcggatggccggctaatggttcacaggtgagtgcagaccacaatacgacgactgactgaccaagacgtcttaagacgatcaccgcgcacaaaatcatcttatatcaaacggcggaacgatgtcgatactcttgggggagcactcattggatgtgattcgatgatgatgatactcttgggggagcacttattggatgtgattcgatgatgattggtgtctccttggtggtttggatgtgacggcctcgtccatcattataaagggtgtcccactttatttgagaataactatagaatgacagattacgcttcggacatcactgtgtcgggtacgtccgacttgatttgcactggggtccaagatgttcatcttgatacaattgaaaagcaaaaaacattggaattggcccgcctcatgagaggcctcgtgccctaatggggtagtgattacatcgaacgatacattcctaacgagctccagtgccagttgcacaacaagagaacatggatggatgaagatggattctggtggggatttgacaaagtctgtgctaggaagtataagcagactaacgtcattattcttgctacgaagtatcacggacttgggacatatgaacataaagtactggtcactctaaataattcggtacatgtggtgtgggaagacgatttatggtgattctgatgctctttgaatcatacgggacatcgcatgttttgcatggcagccaatggccccaaatagcaatggggtactcaaagaacagcagtagcaaccacagtgaatgcggttgcgtaagactcaatgcggctttaatcgacgacaagtgtttcgtgtgcgtttctaaaaaacgagtctaaacaacgcaacatacatacctgataaaaacca

SEQ ID NO: 207 - DNA, 21737 bp, unidentified
  misc_feature 1..21737: note = Fanzor polypeptide
  source 1..21737: mol_type = other DNA
tattggtgttccactgccccgtgggttgctacaccatttggttacaccgtaaggtgtgccgtacacgaatcggtttcattttagtattccgttgactgtacacgaaacgttcgtgatcctgtgttgtaaatctatctatcactcttcttcacgtgcgtgtgcgtgcgtttgcattatcgcatgcattcggtcgatagtacaatgatcaatgaatccagtctcatgcatgtgaactgtggggccccctcccgctgggggggggtgtaaggggctccacagtttgcgtcgtgtgtacatagatggctggatgtgaatcgcggaagtccgatatcatgtttcatttgcggtattcgaactgtggaagagtccttggtggcatgtcagggggggggctaagaacaatatcagaggcgatgactttaaacattacagtgcggctggcgcatcctatgaatcataaatacggtgtatgcaactaaatgaaacaaatttggtgtatacaaactcaataaatcaaattttgtgtatgcaaccaaatgaaacaaatctggtgtatacaaactcaataaatcaaatttaatgtatgcaaccaaatgaaacaaatctggtgtatacaaactcaataaatcaaatgtaatgtatgcaaccaaatgaaacaaatctggtgtatgcaaattcaataaatcaaattttgtgtattcaaccaaatgaaacaaatctggtgtatgcaaattcaataaatcaaattttgtgtattcaaccaaatgaaacaaatttggtgtatgcaaattcaataatcgaattttgtgtaatcaaccaaatgaattttgtgtaatcaaccaaatgaattttttgcaaccaaatgaaataaattttgtgtaatcaaccaaatgaattttttgcaaccaaatgaaataaattgtgtccttatcattcaggtatataccatacgatgataccatcaacaaaattaactatcaccaccactatctcaggtgtgaggatcgacagacatgtgtcaacaccaccaaaaaaatcaccaccactatctcaggtgtgaggctcgacaggcatgtgtccaactccacccaaaaaatcaccaccactatctcaggtgtgaggctcgacaggcatgtgtccaactccaccaaaacaaataaccaccactacagtcggcggaacatagttttagatttccatagttttagatttccagggtcagggtcattaatgcgttcccaacctccgcacatgtgctagtgcggatacaggttgtgtagcaaaatattattgacggatcctctcccaccccttgaccgcatccgcattctccttcacaaacgccacccaggtgtcgctgcgcatgaaggcagcgaacgcttgcaggtccagcagatcgtcgaccggctcccaggtgtcgtgctcttcagtgtaggatttccaccgcacctgcgcacaacgtgaataatgtgtgtcaatcatgcggtcagtcagtcagtcagtcagtcagtaatattaatatgtaaagataggaatcctttgaatttgttggtcataaattctgagtagaaatttcaaaaaatccgccgtgaggcaggaacacccattacttacttggaacattgggataaacaggtagtgatggtctataataccaacgcaatcgttcccaaatctcatcttgacatccacaatgctgtggaccgagtatcttgtaccatcactgaaaaagtttacgtgacgacctttgcaagatagtcgaatactatcaacctgcagcacccaatgaattgaattgaattgaattgaattgaatttaaaactcagtcttctccagcttcactgcatgtgtcaacaaccagtgcccccaggacactctctcatgcacataaccccgcccctgcccccaccactaccacacacatacactcagtcttctccatcttcactgcatgtctcaacaaccagtgccaccaggactcaagaaaaacgcaaggcaggggggtactcacgctgacttccagcgaggatgacgtgggcgacaggtgcggagggcgtggggtagtagcgccagtggacagggtagtagcgccagtggacagggtagtagctccagtggacaaggtagtagcgccagtggacagggtagtagctccagtggacaggggagtagcgccagtggacaggggagtagcgcccgtggacaggggagtagcgccagtggacaggggagtagcgctcgtggacaggggagtagcgccagtggacaggggatgagggcgatggagagaggacaggggaggagggcgatggagagaggacaggggaggagggcgagggagaggggacaggggatgatagcgagtagagccagtggacaggggatgatggccctcaggcttaaaggccacattgggggagttgcaagtagctcccccaataagtaactccgatggggagaagggggggtcctcatcatccgaagatgacgacaagtttgtcaggtcgatgacgatctgcgccagcaataaaaagcagtgtaaacagtgaaatcagtgccccaacaaaatcacaggggcagccgtcagtagctgggaaaacacgcgcgcacgcatccgtcagtagctgggaaaacacgcgcgcacgcatccgtcagtagctgggaaaacacgcgcgcacgcacactcactcaccacatgcatagtagtttccatctcgatgcaggattcctagaagaaaaggagtagaatagtagtatagagtagattagtagaacagtagtttttacaagtagacaaaggacgaaaaggacgaaaaggacgaaaaggacgaaaaggacgaaggacgggttcggcggaatgctggctgaccgcatcgtcgcgcgagctgaaacatgataagggtttagtaggttcatatgctcgttccagcgatgatacaccacatctttcgctggttaccactcaattcctggaaattcggaagcccaaggtgaggtgtctttgaaatagcttccaggatttcgcgacgagttgcatcgcctgttcgctaatttgaattgcattgccgaattgcattgctcaggaagtgctcgctcgctcgctcgctctctcaggaagtgcttgctcacatggctcagaaagtgcttgctcgcatcgctcaggaagtgcttgttcgctcgctcaatcgcgtttgttcaatcaaccaggtgaagttggtcggatatagcttacaggatagttgttagatgctgctgctgctgctgctgctgctgctgctgctgctgctgctgctgctgctgctgctgctgctgctgctgctgctgctgctgctgcaatgcctgcctgcacagtcgcaattgttcgattacttacaggatgctagatcgagttgagatggtcgggcctagcttacaggatagttgttagctgctgctgctgctgctgctgcaatgctgcaatgcttgcctgcactgtcgcgactgttcaataactgacaggatgctagatcgagtcgagctgttcggatatagcttacaggatagttgttagctgctgctgctgctgctgcttctgcaatgcttgcctacactgtcgcgactgttcgataactgacaggatgctatatcgagttgagatggtcggatatagcttacaggatagttgttagatgctgctgctgctgctgcaatgcctgcctgtactgtcgcgactgttcgataactgataggatgctagatcgagttgagcttttaggatctatattacaggatagtcaaatgctgttgctgcactgccttcctcctcccctgactgattttatgctccattgtttcgtaacacaggaaacatgcccaagtcaacacaggtagcccagaatactaagggaccctcgaataagtccctaagaggtgtgaggaaagctgcaaagctaaaggctgcagcctccgagtcaatgcgtagtccttcattgttcggatcagccttggtagttgaaggaagtgggggggctgatgcttttaaagaagacacatccaatcttggtgagtaatttgaatttattagtagccagatgtgtgtgtgtgtgtgtgcacagttctgtgtggaagtgcatggatattatagtattgtgcttgcatatccgtgtatttgagtgtgtttgtgtttgcatggggtcatcttgtagtgcatggacatccagatgtgtgtgtgggaatgcacagtgaagtgtggatgtgtaaggatggcaatttattttgtgcatgcgtgcgtgtgtatttgagtgtgttcatgtttgcatggggttgtcttgtagtgcagccagatgtgtatgtatgtactagcacattgctgtgtggcagtacacggatagaaaatttctgtttctgtgtgcatgcttgattggctgagtgtgttcatgtttgcctgatgtgtgtgtgtccgtccttccgtcacaaactactttagggattcacctgttatcacaataaatcgaatcttgttgttgtccttaaactgacacacactgcattccccatggaaccccattgcacagggatgactgtgaaatccatcctgaagacctcacgaagaggagagttgttgatgtgcataatgaccatctcaattctcatgggagcagccttcattgaggttaacaccaaaggaatcctgcacgctacattcaacccagaagctgatttcttcaagcaaccccttgtgagtttgatttgtgacatactttacttgtttattcataggtttctcttgattgcaatgttactgtcatgttaagcacttatgtatggtcatactgatgcaagtaatggatgctacctttgcattttgtaatgttactgtcatgtcaagcacttgtgtatggtcatactgaatcaattaatggatgctacctttgcattttgtaatgtatttgtcatgtcaagcaattgacgaattcattggcaattgtcagccctacttgtaggatgactggtgcagtgagatgtgtcttcaaacagggttgtgcccttgtcaaattcataggtttttcttgattgtaaagttactgtattgtcattcacttgtgtatggtcatactgaatcaattaatggatgatgccttggcataaacttatgtatgaattgacgaattcattggcaattgtcagccctacttgtaggatgactggtgcagtgagatgtgtcttcaaacagggttgtgcccttgtcaaattcataggtttttcttgattgtaatattactgtattgtcattcacttgtgtatggtcatactgaatcaattaatggatgatgccttggcataaacttatgtatgaattgacgaattcattggcaattgtcagccctacttgtagaatgactggtgcagtgagatgtgtcttcaaacagggttgtgcccttgtcaaattcataggttgttcttgattgtaatgttactgtattgtcattcacttgtgtatggtcatattgaatcaattaatggatgatgccttggcataaacttatgtatgaattgacgaattcattggcaattgtcagccctacttccattacattacattacatgttaaagtctacttgacaccgcgagggtgtatgagactctgtgctttaaacaaaaagaaaaagcacccacaaagcaaaaaccccattacatcaggggtgtgtcgaggacaaacaaaccaaactcccaaccaccgttttggtggcgtaggtattaaaccccttagagccggacccagatctcaaccacttacagtggcggaggtaagaagctaacaaatgagaagtcacaagaagaagaaaaaaagggatgataaattacggtgccactaagcagtccacggcttcctgtcttgctcttctacaagtagaaagatagtcggctaggttgctccaaaaagacttagtgccatttccattcataaaggttctgaatgtggaatcgcagaattccacattccatacggttaagttggtatcctcatggacatgcctataaatatctgtaaacagcttctggtagcggaggcgaatatcattatacttgtaggatgactggtgcagtgagatgtgtcttcaaacagggttgtgcccttgtcaaattcataggttgttcttgattgtaaagttactgtattgtcattcacttgtgtatggtcatactgaatcaattaatggatgatgccttggcataaacttatgtatgaattgacgaattcattggcaattgtcagccctacttgtaggatgactggagcagtgagatgtgtcttcaaacagggttgtgcccttgtcaaattcataggttgttcttgattgtaatattactgtattgtcattcacttgtgtatggtcatactgaatcaattaatggatgatgccttggcataaacttatgtatgaattgacgaattcattggcaattgtcagccctacttgtcagccctaggttgtcagccctaagttgtcagccctaggttgttcttgattgtactgttactgtcatgtcaagcacttgtattgtcaaaattaatttactcccctttgtcttaccttatttaatgtatccttttttttgtagactgacatcagagacgctcgcgtgaaggcgtccaattccgattcaagtgcaggctgtatgtattgcagaattaaaaccgaaattctgacgtacgccaatgagaaccatcttgtgtgcccattatgttgggatatgagagtgttgggtcctcacatgactatatttttggataaggacatctctgctgtagctatgaaggtgttggagttagtttctaatgcggcaattacgattgatatgcacagatacgctcccactattgtctccacatcgtgggaggtattacccacagcatccgagctgttcagaatcattcaggactccttcgattctgaagagaagtttaacatgctttccgagaaaataagaattaatatgtctcgtgtcactaaattgactgtccaaaatactgagtatttcatctcacgtgtatacttccaaaccacattgaatttattgcacaacaatcagctagatagtatagcgaaggctctatttatggacgctgctgcagtcaatatccgccctgaccagaacatacgtatgaaaacgatgttgtttctgtcaacgcaaggaggagatggaactggtttacattgggatattacccggggacttaatgttgctttctcattgaccccaggtatgactggtccattagcatattggctttttatccccccttggggatttgaagaatttattgcttttgtgcagtctggcaattgtgtgaaggtagtcagagacaagtttgaggaagctattagactaaaaactgacttccccttgttgtcagcggatgaaatgtttcaattacatcgccaagtccccaacttggtccgaattgtttcccaaagccatggacaggtagttcatgtggctccaggatggattcacagtgttgtgaatgttttaccaaattggaagctagcttttgatttcgaaagattggaagagttccctttatatgcatattacagaaaaatatttggatctggttttttcaagatagatgtccagaagattacgtcacacaagatgcagttatcaaagacaatgttgatatgatgacgaagggccatgtacccgactcgttgacacaagcaacctaaaatatttaatgggtatatgcttgtgtatttatatatgtgtcccactttatttgagaactactgtgcctaatatttacacattgacatataatgggtgttcctgcctcccggctgattttttttaatttctaatcaggatttagagcctcctgaacgactcgctaacttgagacatcagcactaaggaatcacaaatccactccataccatgtttcgcaaccagtcaaaatcggccgggaggcaggaacgcccattatatttgacattttgtaaaacatcttaaattgactacaagctccaaagcaccagtatcacactcctatcggtcagtcgacagagtggcccagatttccctggcctcatcctcaagattttccagttcctgctctgacaactgtggcacacaacccggtggcacagacttgactgttactacatcacaaaacttagaatcgaacccgtccatctgcactttctcctccatcaaaccacgttgtttcaccgattcctggctcagcggtcccggtatgacctctccatgggattgcatccccgtaagaatgatcgtcagcatcactgcagctgctgcaatcgcttcatccaatgtctccccaccaccaatgacggatgacaatccgggcacccacacctcgtggaattcgaaaccgtcccttgagcacttgttgtgaacaccaaagaattcgtacgaatcatcatactcaaaaaatctggtaatcatggcgatcgtcgtcctgcaaggaataacatatgtttacgctgtagaataagtgggagcttaacggcgccggtgaaataccgctacttttaacgacaccttgtattttggggattctgaaacctagccccaaacaagttttgcatgagcctccgcatcttacgcaaccgctttcactgtggtaatgggcagatgtaagtgcattcactacctccatcatgctcacgtctggacatgaggtaggcatcacacccatgcatctcatcaatacggatcctgtcgagttacgtcacacagcgaccaacacgaccggaggccaaggaggaggagggggagcccgtggagaactcgccagcagacgtggcggtaccacttaagtcggcggaacagtaaaatgaaacatatatcagatggaaataaatgtacgacatcgccgttagaaaattggcgttaagaatggtctctgacttgggtgtgttaaaaacttctgtgtttacgaacatcagtcgttctactctgtggaggtggaaacgctttggtgtaaatcgaaaacgacgtgaatttgtaagcaacctttttgagacgaataaggatttgttaaaatcgtttttattgtcaactcaatgcacaaccgcaagaggcgttgttgcttttttcaaaagtacttacaatgttcgattatcaactaaaacagtgtatcgtttcataaaactcattggttttacaagaaaaaggagcaaactccgtggacagtgtaaaggggacttagttccacttgtcaatgaattttgtagtaggtacaaggagacaatcaatgctgggaaaattttagtatcagttgacgaatgtgggtttagtgagcgtctcaagccacattatgggtattcccctgtaggaaaacctgttatctttaaaactactggtgggtgggtacaccacagtttgttgatggcagttttttcagatggtaggaaagagttcgttgtgaagaaaggatctgtgaagaagacggacttcgttgcatttattgaatcattgagtttgtgcaataactcagtagtaataatggacaatgccagtatccataagaaattggtcctcagtcaccccgtcaatatttgttacacacctccttacagtccagaattcaatgctattgagctatgcttcgctaaggtgaagagagactttcgtcgtttgaactacataccgaatgaaacaaagacgcacgtgtctgatatgatttccttagcattcggcaacctcactgataaaattattatgggttgttttgaacacgtttggaacacttatgtgtataaagcggtctgtgacgtattgattatgaaagatggcgacgaaacctccgacagtcgcgaaattgaaggagctactgaaattggctgaagtaccatactcgtcgaagtccaacaaggacgatcttgtccgtttatgcgaagacaatggtctcatcgccagaccccctccagaatacaagacggtggaaaagatgtgtgtcgtgaaatgcgccctgaagaaggcaatgagtcttgacgatgaagaattcggtaagggagcatgtggaccagctcgtcaatgtggtgagccgcatgttacggcggtccagtctggtgctgactttccacatcacgagtctattagagaaaggtctggatattccagacctgtacaacatgaaagatacctattggaaggattggctccgtatcggggtagacggaatcttccctgatgaggaaagcaagatatcgtacgaagctgtgaaggactccatcggcgatgtaattggtaatgacgacgctgactacatcaagtcttatccgatctatttcgatcaggtattgaactatgcaggtcacacattgagcactgtcgtgtcaaacaacgcatgggttcctttgataccacgtctggccagactcacttccaccactttaaataaattaaatgccccgaagacgctggacacatcgaagatcattcggggatacaacgtgatgcaggctattcagcaagaagtccaaaacatggagggatggccagagtctgttcaagagtacgtcaatgaagttagggagatgctgagtgttccagatggaagtcgagtttatgataactatggcaaagacatggactttccgaccatggtccggtttaattattggatacagacacggttggaggatatggatgcacgtcgtatccgattgatgcccatcttcaatgtccaacgggtgcatgttcgccttgacctgaagaccctcgtgaacctgttcaggcacatgttccccaatgaccagaacatagttgagctttccaagtgggaacatgtaaagaaccccgacagcttcatgttgccccagaggcctgcacagaagaagaaaaaatcatgtggtcctggtgaatgggaggcatacaagtcggtcctgaagcagtacgatgatgatgttaaggatatcaaggctactgacgagtacagacatgcaaagggtttgtatgacacgcttgtgaacgcccgaaaaacagtcgcaggttccttcttcagaaaaccacctgtcaagaatgggtgggttttcgactgcagcatctgtactgacggagtctccttgagcatgcagtacagcaagacagtacaggtccttgtctcagatctgaagaagacctgtaagaagcctcgtaaagaagaaggtatcaagatcgcagaaaaatacgacggctcacttaaaacgatattgcccgatatgggtatcgtcgtcctgggtgtggacccaagacggagcaacatcgctacggtaacgtatttggcagacgataaaaataagacatggacgctgacacgtggtgcattttaccacaagtcgggtatcaagaagcagacaaggcagaaggaactgcgttttgctgacatgattcctatgtgggagtctctgcgtgaaaatggagcagctttgagtacatcgaggacggataagatctccgcgtacttgtcaaattacgctaagttttctgacgagtggtggagattggctttgcgacgccgagaatcccgtgacaacttgcagcgttacatcggaaaacgaaaggtcaaagactctttctgggcgggtatcaagcggtgcatgatgaaagaacttcctgatatgaaggtttgcgtggcctacggatctgccatcacgaaactgaagcctactggaccggaagaagttgcagttcccactggggccatgttctgcatcgttgttaaaagaattcaaagcgagacgtaaattaggtttgccgactttgtactttcttatattctttagttccccttgcttttggcccttccgggttgccactttacggtaaccgatctgtactatctgatacctatgaatttctgatatcacagagtgggcgtcgggggttttacatggtatagtagggacaagacaagaattctccataggtgggtatttccatcggggtcaactcccccgggggactgcgtcctttacgaacagggatttttctgtcgaaccctgcctgtatcttaaggaagatgccagctgcccccaaaaaaggtctctgtcgcaggtggaattgaccagttcttgtatggcgtatgtcgatccacacttttcaagaaacaccgcacatagggcaggtgacttgtgtaatgctcaagcacatgtcaagatcatgtccccgtacctctgcacacttctccttcagccgattgatacagcacgagtgtggcctcaaaagtacagcatatgcgggcaaccttggttgcttgactcacgtcagcacgttgttcactcttcgccgtctcagcatgaggtaacaacaacacccttagtgagcgctttttttgtgggcaagaaatttgttttttgttctgtctcctaaacctcttcttgaggtttagaaaatgctctccgaggcgaagcattttgcttcgttatctttcaatcctctgctctttgatcggtagttttctcaggatccaccttgactgccagttgtcatgaccacagctagggtttgacaattggtcggattgagttgtcccgatccaagcgtcatgagcattcctcattatctggtgatgtaacttccggattgaccattgttttgcggcgcctgggctccaatggatgccttttcgttcaccgtgtctggatggacaactggctctacgtgcctacgtcattcgacttgtgagccaagcgtttacagaagaacagaccgatggaaatttataggccacgatggggactcttgtgggccacccgccctccctaatttggactcggttgttgggcggcgttttccgaggatataactctatggagtggtttgtaacgaagtagctgcatggtgtcccaattgtcttttgcaagatgaatagagtttgtcgaccatctggaaacgtttctgtcttgatccatttctcaatgggccacaacccccctgcctcaagctctgccttctacggctagaacggagatccgagcaaatgcttgatttagtactgctgccggacttccggaaacgcaagacttgctgtttgccaagtttgccgcctgagtggctttggcgttttaagctgttgtggcactttgaagttcgtatgagtaaccatggcgatttttgaagtacgttgtgttgtgcatcttccctccccctcaccttgttgtgcgacttataccgtgtttctcgaaaaaactttcgtgaaggacagaacttgtttgagggctttcccgacggcccctagatcacgatgctgccacccgccgttgttgtacttgaattcacgtgactgaccccgtcaaactctgccatgcttcacgatttctgagccttggttgggtttcgcttcaggctagtttatttttacttgcgtcctctttaaggggtttggcgggagtggacttttgtaccgtctttcgaccgttctgagcgcgaatctcatactgaaactgatggacagatggtctttccaagccgtcatccagtgaggctccgtctggtgatcggagagtagatgctgagtcggagtgcctgtgagcaaatccattaacccatgagcttgaaacacacttatgggcctgcttgaaccgcccaaagtgcaattgacgctacaaagttcttcgtgacggagcccaatactcgtaaccagagttgcattacgtttgccctttgatcgccgttctcttacttctcctcctctctggaagtttgtccatacaatttgtttcaataacacttactgtcttcctgcctgccgatgccttttttctgtttttcgattaaccaattgtattttattttttgtgctttctgatcgttcctttccttttcttatttctcagttgtctgtcggcggttaaggaggatctagctcatgcttagaaaatgttaacaatacggccgggatcggcaaggaaaagttttcccattaattgcctagaatttcccgttcgttgcttggtttttctttgagcaggtctgggttgttgtttgtgtgaggacccacggtgcgtatgcgaatgacttgacgagctgctggttttttgtcgcgctcgattgaggtagcttggagtgtgattgggtcaaagagccgttttgtgcgctggagtttcagggatgtgtccttattatccgcttccgctcgacgttttgagcggcacagttcttgtgagattacaccccgggccataggcgtgccttgcccaatttacagacgggttcgggactactggcatgtctggaatcgttacacttgccttagagtccttaacccgcggttaggtttattctcttttgggcaagcaccacgaagagtgaatgtcttgcagcttaattcctttttctgtgacgacgcgaagatactttgttgctcgccgaacgtcgagtgtgagtggaagacatgtattacattgtgttagaatgaattcctaaactgttgcaacttttaaccccattgaaagggtcacggttcgaattttctcgtccactcgtcagcgtaatgaaagctgtaacaacccattccttctcagtgtccagaaccgactcatttactgttccatgagtttctttgcgaatcaatgaagatgtattggtgatcattctatgccactgctgattctcgaacgcagcccctccacccccgtggtgtctcgttggccaaagcagtggagatgcgtcgcactgtctccggattttcgtgtcacaatggattccccataaggacatttataaacagtttggatatcgtctccgctttttgcagtggctcccagcgtgtaaaactctgtatcacatagggggaaagacgtaaagaccatacgaaaaaggtcgggctcgatagcagccttgtccgggatcttacttcgtggtcactcgaccgttgtacacctagttgaccgacaatcacccccgctccggcctatgctttcgttggttcctgacccttttgaacatgtcgtcgtccccagtgtggacgacctatcacacgtcggactcaaatgcgttgcatcactcgaccttttccgtacacacttctggaaacgggacatatcggccgtagaaggcctcgaattcatttgttcacccgaacatatgtaccaaactcggtgttggcttacgtattcaccgctgtcggccctcactcattgatcacttttcgaacatggatgattacgaccacatgggaatgaaagacatagtcagccctgtcggttctcactggaggttgggttccccttgagaaaatagtgttggtcaacgccgtgtggacgaaatctcactactgtacccggcctcacttcgttgtgtgcctgatggcatatatcgatgttattgcacgacgtgggtccgaccgtctacctctgtccgcctgctatttcattgattcacctgaactgggaagtacgacacactagggggacgcgtatatctaacacgagactgtatactgattccttcgaggtggattaaccgtttggctgcacatgtcgtcgtcctcacgttgtggcgcccgtgggacgaacaccacgtcctctccagactcgttggttcatatggatatactcgtcaagcgacgtgggctgctatagcatccgctgcggctcaattcattgattcattgaaacatgagtacccaaacctggtcggaccggcaatcacgatgtccggatttctcacttcgttgttgtcacgcctgcctacatatcgtgtaccctacgtgaacgacctccctatcacctctgtccggactcgctttgtggagttaacccgaccatttgtcttcgtcacacgtgtgggcgaccatatcacactgtcggactcacgcgttgctgcacccgacccatttccttgaacccactaccgggacgaccaatcaaccgctgtcaggccttcactcgtttggtctaacgcaggaggactgctgggggcacgctaagtattcagtgtgactcccttaatatgacgttaggtgcaaaataccaaagaccccgctgttctttgggccatggtactggggatattaggcacatccccttagtgcggatgttcttcaagtctgcgaagttagggtcagacgcacattggttgtggcgctggttcactgataaagacagagcgcgcccgtgcgctgaatggaccaccatggcacttctcttttcacatagactgttaatgttgcccggccactatgtggttgacgatccgacgattgaacatatgccaactactgtccacgtggtgcattggtttgtaatgcgacttggtacggactgtcgccttggatgcacgttcaccgcaacaccggcagacacgggcccgacagttgtttgttgctgcttggccatccttttctgagcttagtttgttcatcatacagactttttgttacacgaacccaaatttgagcgcccctgatccttgcactccaaaagataccattgaagcagttggatctatggtctccgccttccaagcgcgcgttgattgttagggcgctctcgcgtgacaactggatttccagacaactggctgtcgatgtaactgtatgaatgtcccctgaaataagaatccctccatttgggcaccgcacagtgtagcggaatcccgcaagtctctcatcacagcggtcttgcacgatctgacaacaacaatggccagaggcgcctcctgactgatggatgcaaaataatcaacaacaatttctgtatgtacaaatcactcacaaaacccgttcctgtatttgtgttctttactggcacgacaagtcagcataatatatttaataggtggagttgtagcggaatctaatggcgggaatactctaccacacgcaccaccaagcgatgattgtctgcgggtgtagccccgaagcctttcaaccgactctgtagcgggtgtgtcgccttctcgtcactcgtatcgctatgatgtgaaaaatcaccattcatctttccagtaaacaaattcggcatgagttcttgacgaaatcaatgaaggtagtattggttagagattccgtgtctatcacatgcggtgattttcgaaagaatggccacctgcaaaaacaacgcggcatgtccgtcgcaaaacagtggaagtattgctggtcgcaccacggttgtgtctaaggagccacctgagtaccatttagtacagttttgatctggtctcacgcattgggtacggcgcgaagtagttggttgaacactattggtcttcaatcgtgggcaatacgtcccactacaagaaaaaaatgtcgtacacctcgcggcgggcgaacaatggacctatcacgttgtccggcccacgagtgagttcacctagacatttccgcacacagacgtgttgaataatcactctgtcggatttttatcgactggcgttggtttcttggctatgtgcgttacagcctcaggcggcggaagcctatatagcgtgtcctgcttcactcgcgtttctgggttcacctagtacgattttccaaacagatgtgttgggcatattcaccgctcgctcctggttggagtcgccttgcgttggtttatctgtgatatgtcatttaccctcagcacaggcgccacgaccgtctcactctgctccgggcccctccccttagttgcttatagctgtagctttagcgggtgacaaccgaccaggaagactagatactcacctccctgtcgcgggattgctcaccgtcgttgccgacctaacatggtggcccaggcatacgaccaagtgtttgacaatcaccgtcggcacctcctgtcgttgatgtccgcgcttttaaatgacaatcccttacagaacgtgtggaaaacatatccaccgcttttcggctcactcagatggttcacttctgaacatgtcgtacacccacgctcggcgaataccatctcccccccctggtatatcacctcgtatcgcagcggcctcaactccgtttgacgcactctggataaggtcgttacaacgaagtggtgggaagacatgatcacgactatccgccctcacttgtagacacacttggattgtagtagaaccatgtcgggaatcggtatcgtctgccctgaactatcagacggctgtgtcttgcggactcacttcgttgatcacttggatattgctgaccgcttgtggacaaccaatatcactctgtccgtctcagctgtatgatgacgcaccttgcagttgggactgacctgtgcgttacccgtagtggtatcagacctcttcacgcgtgtgtcccgattcgcttcgtggtgttgatccgtcttaccttgtcgaccctcgaagacaggatcatgagcttcttgaccggctgtccacggttcggtctcacttcgttggttgcctgccctagccatttcacactcgtcaccgctcgatgaaccgactatatcaccgcacgacttacccgcctcattacttcgttgttgtcgcatcacgcaatattagcgcaaccgcgtgacgacccgaactaaccaacacctatccgcttccggcctcattcgttggttcactgaatatggagaccgtgcaccgcgtgggacgattaatattttcaccactggtccattggcccactttcatggtgccatccctggccttagtacgaaaacgcaccgactgtgggcgaccatatcccgcttcgggctcacttcgttgatttttttctctgaaaatgccggaaaacggttgcaagtagtaccgaatgttcccgttgagcgggaaggaggatttcaggtgcaacggaacgaactactaccgtcaacggccggaaacagtcgacttccattccgttggccatccgaccacgatgcgggcgtcggatattgtatttgtgatgtgtcaacccccacctaatgggtgtcttgttctcccggcctctttttacctttcttatatcaggattttttatgagccctctctgaacgattcgcgctagcttgagacatcaacaccaaggcctcacaactccgctcccataccatgttgggcaaccagtccaattcggcagggctggtccgggaagccttccaattgttgactcttgtattgcatggtcacacagccccgtggagcgatcaccattgttatggtacctttgctggccctgttaccgtgtatcgggatccgccgacgtagctgcctggtggcggttagatttatacgtacctacttccttggccttttaagtggaagctcgacattatccgatgacaagtggttatggaccggggatcgcgtgttgagcgacgcggcgtcaagtttatctctatctcctcccgcgttgcttatggctaaacgctccttccgtcaaggtcctccccgagtatacggcggtcgtattactcttcgataaaaacgatgagaggcggtgccgccgtgcgcgcacccgcaggcgtgcgacctggacacaaaggcgatccgcgagcacctgcagcacatcgcaggactggacgggcttttctaggactccgaaaaagcaaagtctaaagcgtccaggtcattgtcgattaaaaacttcatgcgcaagcaaggcaaggataccgtacagacgagcatttacagtggggacacactgtttgtcacctgctgctatgatgacatctattcgatcacggtgatcccgaacgaaaagcgacctagcacaccgctgtccgatgaggacacactgcgcagcctgtgcgcgctccgcgcagtcaaggtatcgaagaaatcccaacaacaaaaacaacaacaacaacaatcaaaaataaacaaagcttacgacgtggacggcccattcctggagactcgcagcacaaagcacaaaaacgcgaccgttgccggcgtggcgagacagctgcacgacgctgaagcagcggtcctggtacgagcgaacgaggagggaatcaccggcgcgcagatatttccgtggagcggcagaatcacaccacagggcgacgccttatacgagggaagcttccacgtctgggtgacgctcccgcacgatcgcattgtagacatgaccttgcgcgagtacaagctgctgcaactgcagcacgcgtacctgggccatcttctgcagacggttgagccattgctcataagtcttttctcgggcgacccccgcgccctgggcgacgacaagaacacgcacaaccgcgccagcatgcgcgcggacaccagttactatgccggatacggcaccacagccgtgaagtacatcgcacgagggccggacgtcgattcaattaccgggttccaggtcatgtggttcgaaaacgagtcggacatgctggcaagacgcggggcacgcatgcagctcgacgacatgtccaagctattcgtgtggatcgatggcaaaaaagtcccgttcacagcatgcattggctcacacatgcggaacgagtattattaccctaatcacacgtggaatatcccattacataagagtccagaggcagggacgggggccgacatccgcagcaggctctgcgactctttagacatgtccctgaagaagggctgggtgcccctctggctccgcgtccgcgacacactggaactccggttcgtgcttggagaggggacaccgaaggtcaaggtgtcgcggaacgcgccgattgacgcgaggcggtgggggaaggaactcgtcggcatcgagttccaagcgatcgacaacatgcccacgcaccaaatcgatcatgtgcttcacctcgtcgtgctcttgggcgcagccgccgtctcgcaggtcgaaaaaatatggcatgataacgccgactctgacccagacacccaagccttcttcgccacgcacgccgccaccctctcgccccactggaacgccgcgctcgacgccgtacgcaagcagggagcgaacgccccattacccaaggcgtacaccacctacatcgcgtcccaggcgggtatttcatccctgaagacacgcaatgcatcatccgccaccgcgttcggtgcgctgcaagacttcgcgaagagccttcacgcagagtacttcgcccactccgtcacagccctcatgcatccgcggtcgaacgacgaaggaccgcccgcgttctcgaacaccaaccaggaggcgtgggaagcgatgtacaacgaattggatgctacggaaaaaatattggtagaaaagtcaaaattggacgcaccatatctcgtcgcaatgatgaacagagcgacgcattctacagtcggcagaacagtaaaatgaaacatatatcagatggaaataaatgtacgacatcgccgttagaaaattggcgttaaaattcttgcgagtccaaagaaatattgcatactggaaattgattacaagctgacagtttctttagataacgcagtgtcgagcttactgtagtaattcccttgtccgagtgtaccactactgaatgttgaaatagactttaaggctattgatagcgattagtccggacagcggtgtcaggtctaccaagctgttggaagagacgttaaggctcttgagaaaggttagtccggacagcggtgtcaggtctaccactctggtgcgagcgacgttaaggcttttgagagcggttagtccggacagcggtgtcaggtctaccactctgttggaagagacgtcaaggcccgtaagagcggttagtctggacagcggtgtcaggtctaccacgctgttggaagagacgttaaggctcttgagagaggtaagtccggacagcggtgtcaggtccactactctgttgccatagaattgaatatc

SEQ ID NO: 208 - DNA, 21359 bp, unidentified
  misc_feature 1..21359: note = Fanzor polypeptide
  source 1..21359: mol_type = other DNA
cgtccaccgtgctttctacagtcgacggaatactaaaatgaaactgcctcgtgtactgcacaccgtacggtgtaacctaatgggtcaccgcattataccgttttttgatgtttcattttactgttctgccgactttagagtggtctggtatgtcgtcttgtggacgattgatatcacatggctaccactctcgtgacggcggatcctgtcgagtcacatggctaccactctcgtcactgcggatcctgtcgagtcagtcacatggagacttcatgatcagctcgtgcgtttcctttgccgcgtggtcttcatgcaggatgcgtttgatttcttcgtgtattttggcgtacttgattttggacatgtccgggtacgacgaccgatgaggacattatttaattttattctcaaaagtatttataatatgttcaaccaaacatttgacgcaagcacagcactgtcaagtattttcttatgggttttgttcggacacctgtccaaactattaaactgtgatctgcaacgcattatggtttcgcatccatttgttgtgcatttgattggaatcgctacatttttctttctttttacaatattggacccaagcaacaaaaaccacatatcgattgtatggttcaagactatatttgtatacacaatattcattataatgaccaagtcaaagtggtactttattgcaccaatattaggacttttgttgatagaccaaacactaaaaaagcacgtagccatccaaacagaacgcggtgacgatacagataaattacaaaaaatacaaaaagatatcagcaatatattagtcataattattctataattgattttcatcggagccgcgcattacatgtatctgcaacgcatagaatacaaaaacgatttttcgatgaccaaatttttctttggagtaacaacttgcaaaactaaaacaccgacgtacaaaacataattgtcataaaacgcagaaaaccaattcattcaatctttgtaaccgatactgtcttcagtcggcggaacagtaaaatgaaacatatatcagatggaaataaacgacatcgccgttagaaaattggcgttgtaacatgccttcctaatagagagaatcatgtcacacacaaacaacctctaaaacatatgtggtttgagatcaatccaccccagctccatgcgtgttccatgcatttgatgcgttatatatatggattttcattatattccctaaagagtctacgccgacatgcattataaatagggtttgtattgacatgtcgccatattttttgtatggttcttgctgctctacatctacgtatgatatcacaaatgtcttggttagataactgcaacatattggggtttaagctcaatctaccccagctccaatgtttattagggttgtcttgtataagatcccatgtgatactggggtttttactgatcaaaaaccagtcccatggtttatctgggttggcttgtataatatcccacgtgatgctgggatttgagctcattacacaccaaacccatggtttgtcggggtttgcttcgacaatatcccatgtgatgcaagggtttctgctaatataataccaatcccatggtttgctgggattatctcgtacaatatcccatttgatgcaagggtttttgctaatataaaaccaattccatggtttgtcagggttggcttgtataatatcacacgtgatgttggggtttttgctgatccagtaccagtcccatggtttgtctggattggcttgtataatctcccatgtgatgttggggtttgcgctcaactcataccagtcccattgtttgtctgggttgtcttgtataatgtcccatgtgatgctagggtttgagctcattacacaccaatcccatggtttgtcggggttgtcttgtataataccccacgtgatgttggggtttgagctcattccaaaccagttccacgtgatgttggggtttgtaatgacaatctcccatttgatgcaagggtttgcgctgatccagtaccaattccatggtttgttggggttgctttcgataatgtcccacgttaaagatgagttacaactcaacaaaccccaatcccacttgtgttccatacatttgactcgtctcgagatgtggttatttatttccgctgaaatcattaataagaatatcatcaatgcataatattattaatggtggagtacacgcatcgtgacacgcctccacgaaaacggcggcacactgtcgattcttgaagtacgggtttggcatcttcccatcccccattttctgacttgggtgtttaaaacttctgtgtttattggttttacaagaaaaacaaaaacaacacttttttgtttggcattttgggcatgttgcgtttaaaatctcacatatataatatatgcatgtcatgcaaataccatatttgttaacaataatacttggactagttggctcatgcacaagcataatattaccattaaatgaacaaagcattctcgaccaagtaaacgattatagaagaattcactgctctccaccagtttcatttaatccagcaatttcaatatccgcacaaacatggtccgattaccttgcgaaagaaaataagttcgaacatagcgattcaggtcgatatggagagaactttggtttgttttcgttttcagctttaaataccataaatttaacgcattattataccaggtcggtaagtttgtggtacgatgaagttgacttctacgatttcaatacgccccgtttttctccatctactggtcattttacacaattagtttggaaatttaccacagaaatcggtatcggtatttcgtattcagaatctaacaataatattcttgtgtgtatgcaatatttcgttcgtggaaatcaaaacagtgttgcagaatttcaaaaaaatgtactgacaggaaattataaatctcccattcttgagaactgcaacctacctagttcaccacaacattcaccatcaccatctcctcgaccacaacattcaccatcaccatctcctcgaccacaacattcaccatcaccatctcctcgaccacaacattcaccatcaccatctcctcgaccacaacattcaccatcaccatctcctctcccccctatcaagactccaaagaaggtgaagaaggtcaagaaatcgaccacgcaccacaacgaaatcgaccaatcaccacaacattcaccacaaaaatcgccatcaccatatcctcgaccacaacaatcaccatctcctagaccacaaccgcgaccaccaatgtctcaatctccatcacccatacaaattaatgagtatataaaggtgacaacccgttaccctttttcacaaattccatctccggacgaaattgcagtaacttacgtaaatgatactctttgtccagcatatatcaacctactaaatcgcgaaaacatgatacaaaatacttgtaaagtacaattggtatcatccactgctgtatactatgggtcttgggtgtacggtattagttataatcggttcagagagatgttacaaagttcgtattttacaaatgaagcaaagttaccatgcggtagcacggtcgctgtgtataacgtatcaacaaatgattcattcagatatgccgccaatcgcgaaacgtgtttaactgtataatttgaatgatatcccctgaaaccagatacaggcaatgaatgatctgcggaagacaacgacgtcttgcgaactcccacgttttccgccatctttgtctgtcgtcgactgaggtgtgcttgcatcatgcggtcgatgcatctcaatgaccaccaaacccaatacagtaagggacatttgatattggaacaccttctattgtgacaccttgtcaatacagatactgtcttcaggtgattgacacaaaaaaatcaaggcatctaaagacactgaatttacatgttcaaagtaccctgaaaactgatggctaaacatcgtgcgcatcaataatcctgttcaaagcgttactgtaatcaaatatatctgatagtcggagattccaggtgctcccgcacatatacgaaactttgtctggatatcttttacaaggaatgggcgttcctgcctcccggtggacttttactggttggcctggagcggaattgtgattcctctgtgctgatatctcaggctagcaagtctttccggagactctaaattctggtagaaatttcaaaaaatccgctgggaggaaggaacgcccatttaggggcactatttagtattttctgttccgctgactgtagcagcgtaagaacgtgtgaggaacacatcaatggccaccagacccatgcccttgagcccacagaaacgaatccactcgatagtcagagattccaggtgctcccgcacatacaacagcccctccaataagacatccgagtacgcagtcggggctttgtcctgcctcgcgagctgcatcttaaatgttatgtcgtccacaagagggtgccgcttgaagtagccgacgtaactcacacgggacttgacaccgcgccgaatccaaaggtcgtacgcgagcccatgtattaaatttcccaaggtatggtccaaaccgggaaaaagaatgctcctcgcgccacccgggacggtcgagtcctcaaacgagacgcgctcggcacggacgtcttccgagagatcaatgatggctcggacaaggaagcggaaccctagaaaaacgaggtagtaaggggacatgctcgggtccacgctctcaacgaaaaaatcgaacttgtcgggaaccgagtcgtcgtccaaaacaggctccttgtaacgaaaatagcaagagcagactggagaatatctcgcatgctcccgaccggagccaagcctcgcagtcgccgtgatgttcacagcctcaccgatgccgccacacatgatgttggggcgcaagacagtaagtaacacactgtcacccgaccgctggtcaacaggaaacagacacttcaaacgctccgtctggaacgagacgccttacgcgttacgaactacgaagtctacgctcaccacatcaaacacctcattcccggtgttccgcacggccaaggtgcattggtagtcgcccggggcgaagttctccaactcgttgggagtcagacacaaaggcacaagcgacacacggagagccaacatctcgttgtgcatcacggacgtgttctcaagtacgcgcacaccaccaccaccgcccccaggaggaaccacagtgtcgaacgccgcggtctccacacaagcgatgatcgcacgacgcaacgaattcacgatgcacaagtcgacgccagaaactgagaaggaccctccgatgttactatgtatgaagtgatccgtaccgactgagggtgaagggatcacaggagccagaacgtctcctacacgaatcgacatttctaaagatacgacaggaataatacacaacaatatctacatcatcgaagaaaacatttatactcggtttcaaaaaccaaatcgaaacaatctccaaggaaacaatgggcgcaataatcaaatatttctgctacatctggaattattgggcacatgcagcgatattttcgcttgagcaaactgaacaccagccgcctcaggatccatcaaaagcgtgcagacatcggcgtgatcttccttggcaaccgcccacaatgccatgctgttgacagagttcgcccaggccctgacctcaattccagcaaccgctggatcccatgagcagcttgcagacatctgcgtgacctgccttggcaacctcccccgaagcccagatgtgtgtagagttcgcccgggccctgaactcaagtccagccaccactagatccatgagcatcttgcagacatctgagtgaccttccttggccgccgcccacaaggccctgctgtctctagagttcgccctatccctgaactcaattccagccaccgctggatccatgagcagcttgcagacatctgcgtgaccttccttggcagcctcacacaatgcccagctggcgttagagtttgccctggccctgaaccccaatccagccacatctggatccatcagcagcttgcagacatctgcgtgaccttcccttgcagccgcccacaagacccagctgccgctagtgttcgcccgggccctatactcaagtccagccacctctggatccatgagcagcttgcaaacatctgcgtgacctttcgttgcagcctcacacaaggccctgctgtctctagagttcgccctggccctgaactcaattccagccaccgctggatccatgagcagcttgcagacatctgcgtgaccttccttggcagcctcacacaatgcccagctggcgttagagttcgccctggccctgaactcaattccagccacatctggatccatcagcagcttgcagacatctgcgtgaccttcccttgcagccgcccacaagacccagctgccgctagtgttcgcccgggccctatactcaagtccagccacctctggatccatgagcagcttgcaaacatctgcgtgacctttcgttgcagccgccaacaaggccctgctgtcgcttgagttcgccctggcccttttctcaattccagccaccgctggatccatcagcagcttgcagacatctgagtgacctgccttggcagcctcacacaaggcccggctggcgttagagttcgccctggccctgaactcaattccagccacatctggatccatcagaagcttgcagacatctgcgtgaccttcccttgcagccgcccacaaggccctgctgttgatattgttcgcccgggccctgtacttgagtccagccactgctggatccatcagcagcttgcagacatctgcgtgaccttccgttgcaaccaccaacaaggcacagctgtcgctagtgttcgcaagggccctgtactcaattccagccaccactggatccatgagcatcttgcatacatctgcgtgaccttccttggaagccgccatcaaggccatgctgttcatatggttcgccctggccctgtactcaagtccagccaccactggatccatcagcagcttgcagacatcggcatgacctgcctttgcagcctcacacaaggccaagctggccatatggttcgccctggcccttttctcaattccagccacctctggatccatgagcagcttgcaaacatctgcgtgacctttcgttgcagcctcacacaaggccctgctgtctctagagtttgccctggccctgaactcaattccagccaccgctggatccatgagcagcttgcagacatctgcgtgaccttccttggcagcctcacacaatgcccagctggcgttagagttcgccctggccctgaactcaattccagccacatctggatccatcagcagcttgcagacatctgcgtgaccttcccttgcagccgcccacaagacccagctgccgctagtgttcgcccgggccctatactcaagtccagccacctctggatccatgagcagcttgcaaacatctgcgtgacctttcgttgcagccgccaacaaggccctgctgtcgcttgagttcgccctggcccttttctcaattccagccacctctggatccatcagcagcttgcagacatctgcgtgaccttccttggcagccgcccacaatgccaagctgtcgccatagttcgccctggccctgaactcaattccagccacatctggatccatcagcatcttgcagacatctgcgtgaccttccttggcagccacatagagaagattgttttcattttggttcgccctcaattgtaggaccccgttcacgtgtacaagaggattggacaccaagcatactgctagaaggtcggcgcgcccccctttcgccaacatctctccaactctctgtggtggttggatcagtacggtaaggggccatccagaaaatcttttgtgcagagttttacacactaatacaatctttgggttggaagataatagggcaatacgatcaagaatgtcatggggaaacgttaggaatgatcgcgtgtgcgaatgcatgttcgatgaacatgtttgtacaatgcgtgcaagcgcacaggatggtataaataaataatgagttgggataaaccctataaaccctataaaccccataaaccctataaaccctgggttgcacttgcctggcggtatctgcaagcggtacagaatgggtgttcctgcctcccggcgatttttttgaattttccaagcagaagttagagccgtacgaacgactcactcactcgccaaccagagatttagttctccgatgaatttcgattccgaccagaccaggttccgaaaccagtcaaaacccctccgggatgcaggaacaactagtaatgggcgttcctgcctctcggccgatttttttaaatttctagtcaggatttagagcctcttgaacgactcgctagcttgagacataagcaccaaggaatcacaattccgctccataccatgtttcgcaaccagtcaaaatcggccgggaggcaggaacgcccatttcgtgcaaattgtcaatacaacagatattgtcttcaggagattgattgacacaaaacattcaaggactgttacatcttcaaagtagcctgaaaagtttgaggagagtggataaatacttgctctacggtggcaagacccagctgctgtcaagattcacaatggccctgtactcggggccagccgcctctgcatccatcaaaagagtgcagacatctgcgtggaccggccttcgcatccgcccccaaggcccagctgtcgtgagagtcctccctagccctgaactcaattccagccacctctggatccatgagcagcttgcagacatctgtgtgaccttccttcgcatccgcccacaaggcccagttgttgacagagttcgcccgggccaagacccagctgctgtcaagtttcacaatggccctgtactcggggccagccacctctacagtcggcggaacagtaaaatgaaacatatatcagatggaaataaatgtacgacatcgccgttagaaaattggcgttagaatggtcgctgacttgggtgtgttaaaaacttctgtgtttacgaacatcagtcgttctactctgtggaggtggaaacgctttggtgtaaatcgaaaacgacgtgaatttgtaagcaacctttttgagacggataaggatttgttaaaatcgtttttattgtcaactcaatgcacaaccgcaagaggcgtcgttgcttttttcaaaagtactcacaatgtacgattatcaactaaaacagtgtatcgtttcataaaactcattggttttacaagaaaaaggagcaaactccgtggaaagtgtaaaggggacttagttccacttgtcaatgaattttgtagtaggtacaaggagacaatcaatgctgggaaaattttagtatcagttgacgaatgtgggtttagtgagcgtctcaagccgcattatgggtattcccctgtaggaaaacctgttatcgttaaaactactggtgggtgggtacaccacagtttgttgatggcaggtttttcagatggtaggaaagagttcgttgtgaagaaaggatctgtgaagaagacggaattcgttgcatttattgaatcattgagtttgtgcaataactcagtagtaataatggacaatgccagtatccataagaaattggtcctcagtcaccccgtcaatatttgttacacacctccttacagtccagaattcaatgctattgagctatgcttcgctaaagtgaagagagactttcgtcgtctgaactacataccgaatgaaacaaagacgcatgtgtctgatacgatttccttagcattcggcaacctcactgataaaattattatgggttgttttgaacacgtttggaacacttatgtgtataaagcggtctgtgacgtattgattatggaagatggcgacgaaacctccgacagtcgcgaaattaaaggagctactgaaattggctgaagtaccatactcgtcgaagtccaacaaggacgatcttgtccgtttatgcgaagacaatggtctcattgccagagaagagatcttagagaaaggtctggagattccagacctgtacaacatgaaagatacctactggaaggattggctccgtatcggggtagacggaatcttccctgatgaggaaagcaagatatcgtatgaagctgtgaaggactccatcggcgatgttattggtaatgacgacgctgactacatcaagtcttatccgatctatttcgatcaggtattgaactatgcaggtcacacattgagcactgtcgtgtcaaacaatgcatgggttcctttgataacacgtctggccacactcacttccaccactttaaataaattaaatgccccgaagacgctggacacatcgaagatcattcggggatacgacgtgatgcatgctattcagcaagaagtccaaaacatggagggatggccagagtctgttcaagagtacgtcaatgaagttagggagatgctgagtgttccagatggaagtcgagtttatgataactatggtaaagacatggactttccgaccatggtccggtttaattattggatacagacactgttggaggatatggatgcacgtcgcatccgattgatgcccatcttcaatgtccaacgggtgcatgttcgccttgacctgaagaccctcgtgaacctgttcaggcacatgttccccaatgaccagaacatcgttgagctttccaagtgggaacatgtaaagaatcccgacagcttcatgttgccccagaggcctgcacagaagaagaaaaaatcatgtggtcctggtgaatgggaggcatacaagtcggtcctgaagcagtacgatgatgatgttaaggatatcaaggctactgacgagtacagacatgcaaagggtttgtatgacacgcttgtgaacgcccgaaaaacagtcgcaggttccttcttcagaaaaccacctgtcaagaatgggtgggttttcgactgcagcatctgtactgacggagtctccttgagcatgcagtacagcaagacagtacaggtccttgtctcagatctgaagaagacctgtaagaagcctcgtaaagaagaaggtatcaagatcgcagaaaaatacgacggctcacttaaaacgatattgcccgatatgggtatcgtcgtcctgggtgtggacccaggacggagcaacatcgctacggtaacgtatttggcagacgataaaaataagacatggacgctgacacgtggtgcattttaacacaagtcgggtatcaagaagcagacaaggcagaaggaactgcgttttgctgacatgattcctatgtgggagtctctgcgtgaaaatggagcagctttgagtacatcgaggacggataagatctcggcgtacttgtcaaattacgctaagttttctgaagagtggtggagattggctttgcgacgccgagaatcccgtgacaacttgcagcgttacatcggaaaacgaaaggtcaaagactctttctgggcgggtatcaagcggtgcatgatgaaagaacttcctgctatgaaggtttgcgtggcctacggatctgccatcacgaaactgaagcctactggaccgggagaagttgcagttcccactggggccatgttcgcatcgtgtaaaagagttttcaaagaggacgtttctgtgacagatgagttcaaaacgactcttatgtcgtgggagacgggtaaagtgtttacaagatcccaagcgttcgttcagcagacgtgaagcttaggttgggtggtgaacgttttggtcacacgaaatcgaaaactatgccaaaggtcgctgattgcgaccacttaggggtaaggttgtacaataaacgtaaaggcgcacaagagaagcacaggaggggtggcttcgccacttcccttgtcgattctcaaaaatcgatcgagcggtacccagaggtacgaggactgcgattctctccagaaacatgcatttactcggaccgggatcgctcttctgctctcacaatcgcaaggctgcactgcatggaattgatgggtctaggacgacctcttccatttgcccacagcagctctgttgttgttgatgaataaaaactcgtattgttgtagacaccactcggtccccctccggtggtcgcgacaacattaggttacaccgcaagttgtgccgtacacgaagcggtttcatttaagtattccgttgactgtacatccatcaaaagcaatcagacatctgcgtgcccttcctttgcagcctcacacaatgcccagctgttggcagagttcgccctggccctgtacttgggtccagccaccgctggatcccatgagcagcttgcagacatctgcgtgacctgccttggcagccgaccgcaaggccctgctgttgacagagttcgcccgggccctgaactcaattccagccaccgctggatccatcagcagcttgcagacatctgcgtgaccttcctctgcagcaacccacaaggccctgctttcgctagagttcgccagggccctgaactcaagtccagccacctctggatccatcagcagcttgcagacatctgcgtgacctgccttggcagcctcccccaaggccctgttgttgatattgttcgcccgggccctgtactcaattccagccaccgctggatccatgagcagcaagcagacatctgcgtgacctgcctttgcagccgcccccaaggccctgctgttgatatggttcgccctggccctgtactcaagtccagccacctctggatccatgagcagcttgcagacatcggcgtgacctgccttggcagccagccacaatgccctgctgtttatatggttcgccctggccccgtactcaagtccagccaccgctggatccatgagcagcttgcagacatctgcgtgaccttccttggcagccgcacacaatgccctgctgtctctagagttcgccagggccttgtactcaattccagccaccgctggatccatgagcatcttgcagacatcttcgtgaccttccttggcagccgcacacaaggccctgctgtcgatagagttcgccagggccctgtactcaagtccaaccacagctggatccatcagcagcttgcagacatctgcgtgaccttcattggcagcctaccacaaggccctgctgtcgctagagttcgccagggccctatactcaagtccatcaaccgctggatccatcaaaaacaagcagacatcggtgtgaccttcctttgcagcctcacacaaggcccagctgtcgctagcgttcgcccggaccctatactcaagtccagccaccgctggatccatgagcagcttgcagacatctgcgtgaccttctctagcagccgcccccaaggccctgctgttgatattgttcgcccgggccctgtactcaattccagccaccgctggatccatcagcagcaagcagacatatgcgtgaacggccttggcagcctcacacaaggccatgctgtctctagagttcgccagggccatgtactcaagtccagccaccgctggatccatgagcagcttgcagacatctgcgtgacctgccttggcagcctcccacaaggccccgctgttcgtagagttcgccgaggccatgtactcaagtccagccacatctggatccatcagcatcttgcagacatctgcgtgacctgcataggcagcctcacgcaaggcccagctgttcatatggttcgccctgggcctgaactcaattccagccacatctggatccatgagcagcttgcagacatctgcgtgaccttccttggcagccgccccaaatgccctgctgtttctagagtttgccagggctctgaactcaagtccagccacctctggatccatgagcagcttgcagacatatgcgtgacctgccttggcagccagccacaagaccatgctgttgatatggttcgccctggccctgaactcaattccagccacctctggatccatcagcagcttgcagacatctgcgtgaccttcattggcagccacatagagaagcttgtttttattttggttcgccctcaattgtagggccccatcaacttgtacaagaggattggacaccaagcatactgctagaaggtcggcgtgcccccctttcgccatcatctctccaactctctgtggtggttggatctgtccggtaaggggccatccagaaaatctgttatgcagagttttacacactaatacaatcttggggttggaagagaatagtgcaatacgatcaagaatgtcatggggacacgcaaggagtggaaacgatgatcgcgtgtgcgactgcatgttcgatgtaactacatctttctttattactttaagtatttctgaaaagtttgaggagtctctcagagtggataaatacttgctctacggtggcaagacccagctgctgtcaagattcacaatggccctgtactcggggccagccgcctcttgatccatcagcagcttgcagacatctgcgtgaccttccttggcagcctcacgcaaggccaagctgtgcgtagagttcgcccgggacctgaactcaagtccagccaccactagatccatcagcagcttgcagacatctgcgtgaccttcctttgcagccacccacaatgccatgctgtcgttagcgttcgcccgggccctgaactcaagtccagccaccgctggatccatgagcagcttgcatacatctgcgtgaccttcattggcagccagccacaatgcccagctgtcgctagagttcgccctggccctgaactcaattccagccaccgctggatccatcagcagcttgcagacacatgcgtggccttctttgtcagccgcccccaaggcccagttgtcgctagagttcgcccgggccctgaactcaattccagccacctctggatccataagcagcttgcagacatctgcgtggcctgcattggccaccgacaacaaggccctgctgtctctagagttcgcccttgccctgaactcaattccagacacctctggatccatcagcagcttgcagacatctgcatgaccttcctttgcagccgcccacaatgcccggctgtcgttcgagttcgcccttgccctgaactcaagtccagccaccgctagatccatcagcagcttgcagacatctgcgtgacctctctgtgcagccgcccacaaggccctgctgtcgatagagttcgcctgggccctgaactcaagtccagtcacctctggatccatcagcagcttgcagacatctgcatgaccttccttggcagccagccacatactgctagaaggtcggcgcgcccccctttcgccatcatctctccaactcgctgtggtggttggatcagttcggtaaggggcaatcctgaaaatctgttgcgcagagttttacacactaatacaatctttgggttggaagagaatatggcaatacgatcaagaatgtcatggggaaacgttaggaataccgatgacttcatgttcgatgcatgtacaatgcaatgcatgaaatcgcacaggatggtttaataaatactgagttggaataaaccctataaaccctgggtttcactttcctggcatgcaagcggtaagcggcacttgcctggcggtatctgcaagcggtatagaatgggtgttcctgcctcccggcgattattttgaattttcaaagaagaagttagatccgtacgaatgactcactcgccaaccagagatttagctctccgaggaattgcgattccgaccagacaagggtccgaaaccagtcaaaatccctacgggacgcaggaacaaatatactggtgcaaattgtctttctttcttacattaaggaattcaagtttcataaagttttgtaaccgatcttgtcaatacaacagatattgtcttcaggaatctgcctaacacaagacctagctgctgtcaagattcacaatggccctgtactcgggtccagacgcttctgtatccatcaaaagcaagcagacatcggcgtgaccagccttcgcagcctcacgcaaggcccatctgttgacagagttcgccctggccctgaactcaactccagcaaccgctggatccatgagcagcttgcagacatctgcgtgaccgtccttcgcagccgctcccaaggccctgctggcggtagagttcgccctggccctgaacccaattccagccacctctggatccatgagcagcttgcagacatctgcgtgacctgtattggcagccgcccacaatgcccagctgtcgttagagttcgcccgggccctgaagtcaattccagccacctctggatccatgagcagcttgcagacatctgcgtgaccttccttggcagcctcacacaaggccctgctgtcgctaaagttcgcccgggccctaaactcaattccagccaccgctggatccatcagcatcttgcagacatctgcgtgaccttcattggcagccgcccacaatgcccagctgtctgtagagttcgccctggccctgaactcaactccagccaccgcaggatccatcagcatcttgcagacatcggcgtgaccgtccttcgcagccgcccacaaggccctgctggcggtagagttcgccctagccctgaactcaagtccagccacctctggatccatcagaagcttgcaggcatctgcgtgaccgtccttggcagccgcccacaatgccctgctggagctagagttcgccctggccctgaactcaagtccagccacctctggatccatcagcagcttgcagacatctgcgtgaccttcctttgcagcctcacacaaggccctgctgttgctagagttcgccacggccctgtactcaagtccagccaccgctggatccatcagcagcttgcagacatctgcgtgacctgccctggcagccacatagagaagcttgttttcattttggttcgctccaattgtaggccccccttaacctgtacaagaggattggacaccaagtatactgctagaaggtcggcgcaccccccctttcgccatcatctctccaactctctgtggtggttggatcagtcccataaggggccatccagaaaatctgttgtgcagagttttacacactaatacaatctttgggttggaagagaatagggcaatacgatcaagaatgtcatggggaaacgttaggaataccgatgatagcgtgtgcgactgcatgttctacgaacatgtgtgtacaatgcatgcaagcgcacaggatggtataaataaataatgagttgggttaaactctataaaccctataaaccctgggttgcactttcatggcatgcaagcggcacttgcatggcggtatctgcaagaggtacagaatgggtgttcctgcctcccggatatttttttgaattttcaaagcagaagttagagccgtacgaacgactcactcgccaaccagatatttagctctccgcggaattgcgattccgaccagaccaggctccgaaaccagttaaaatacctccgggaggcaggaacaaatgtactggtgcaaattgtctttcttacttacattaaggaattcaagtttcatcaagttttgtaaccgatcttgtcaatacaacagatattgtcttcaggagattgacacaagacattcaagtactgtaaagacatagaagttacatcttcaaagtagcctgaaaagtcaaagtgctggctcacatcgtgcgaatcaataatcattttcaaagagttcctgcctcagaatcaaatatttatgctacatctggaattattgggaacacacagcgatattttcgcttgagctaactgaacacatttttgaaaagtttgaagagagtggataaatacttgctctacggtggcaagacccagctgctgtcaagattcacaatggccctgtactcggggccagccgcctctggatccatcaaaagcaagaagacatcggtgtgaccggccttcgcagccgcccacaatgcccagctgtcgacagagttcacccgggccctgaattcaagtccagccacatctggatccatgagcagcttgcagacatctgcgtgaccagacttcgcagcctcacgcaaggcccagctgttgacagagttcgcccgggccctgaactcaattccagccaccactggatccatcaaaagcaagcagacatcggtgtgaccggccttcgcagccgttcccaaggccctgctgtcgctagagttcgcccgggccctatacttaagtcaagccacatctggatccatcagcagcttgcagacatctgcgtgaccttctttggcagccgaccccaaggccctgctgtcgaaagtgttcgccctggccctgtactttagtccagccacctctggatccatgagcagcttgcatacatctgcgtgaccttcctttgcagcctcacgcaatgcccagctgtcgctagagttcgccgggccctgaactcaagtccagccacctctgtttccatcagcagcttgcagacatccgcgtgaccttccttggcagccacccacaaagccctgctgtctatagagttcgcccgggccctgaactcaattcctgccactgctggatccatcagcagcttgcagacatctgcgtgacctgccttggaagccgccctcaaggccaggctgttgatattgttcgccctggccctgaactcaagtccggccactgctggatccatcagcagcttgcagacatctgcgtggccttctttggcagccgcccacaaggcccagctgtcgctagaattcgccctggccctgaactcaagtccagccacctctggatccatgagcagcttgcatacatctgagtggcctgcattggccgccgaccccaaggccctgctgtcgctagagttcgcccgggctctgaactcaagtccagccatcgctggatccatcagcagattgcagacatctgcgtgaccttccttggcagcctcacgcaaggcccagttgtcgctagagttcgccagggccctgaactcaagtccagccaccgctggatccatcagcagcttgcagacatctgcctggccttccttggcagccagccacaatgcccagctgtcgatagagttcgcccgggccctgaactcaattccagccaccgctggatccatgagcagcttgcagacatctgcgtgacctgccttggcagcagcccccaaggcctggctgtcgatagagttcgcccgggccctgtactcaagtccagccacatctggatccatcagcagcttgcatacatctacgtgaccttccttggcagccgcccacaatgcccagctgtctctagagttcgccagggccctgaactcaagtccagccacctctggatccatcagcagcttgcatacatctgtgtgaccttcctttgcagccacccacaaggccctgctagagcttgccagggccctgaactcaattccagccacctctggatccatcagcagcttgcacacatctacgtgaccttccttggcagccgcccacaagaccctgctgtcgatagagttcgccggggacctgaactcaagtccagccacctctggatccatcagcagcttgcagacatctgtgtgaccttcctgtgcagccgcccacaaggcccagctgttgacagagtttgcctgggccctgaactcaagtccagccacctctggatccattagcagcttgcagacatctgcgtgacctgccctggcagcctcacgcaaggcccagctgtcgctagagttcgccctggccctatactcaagtccagccacctcttgatctattagcagcctgcagacatctgtgtgacctgcctgtgcagccacccccaaggccctgctttctctagagttcgccagggctctgaattcaattctagccaccgctggatccatgagcagcttgcatacatctgcgtgacctgcctttgcagcctcacgcaaggccccgctgtcgctagagttcgcccgggccctgaactcaactccagccaccgctggatccatgagcagcttgcagacatctgcgtgacctgcataggcagcctcacgcaaggcccagctgtcgctatagttcgcccgggccctaaactcaagtccagccaccgctggatccatgagcagcttgcagacatctgcgtgaccttcatatgcagccgcccccaatgccctgctgtttctagagtttgcccgggcctgaaatcaagtccagccacctctggatccatgagcagcttgcagacatctgagtgacctgccttggccgccgcccacaaggccatgctattgatatggttcgcccttgccctgtactcaagtccagccaccgctggatccatcagcagcttgcagacatctgcgtgaccttccttggcagccacatagagaagtttgttttcattttggttcgccctcaattgtagtccccccttaacctgtacaagaggattggacaccaagcatacttctagaaggtcggcgtgcccccctttcgccatcatctctccaactcgctgtggcggtcggatcagtccggtaaggggccattcagaaaatctgttgtgcagagttttacacactaatacaatctttgggttggaagagaatagggcaatacgatcaagaatgtcatggggaaacgttaggaataacgatgatcgcgtgtgcgactgcatgttcgatgtatacagtcagagacagaatttatgggacacccttaccggtgacccttgaacccaatgggtaggtcagctaaaggttttgtatcaaggtcccaatccttcgtgtccttcatcctgtatttcagcatttaagctggcccagaggataacaattgtaagctgctaactgacccaggtgggtcggttggttgagcgcccacatttgcctctccggaaactgtggtttttggggtgggcgatgaggagggcacacaaaatgccgctggtcgctctttcccgtccatccacgtcgtcagaagcagaagaaggttcttggcagcgttcacgtctcggttccaggttgcaccacagcgcacattggatgatgcgcttttgacactgttgcgacagtgcagtactttgtggaccttaacgttcttcaccaccgtcttctgcttctcaaacgttgttgttgttgttgttgttgttgttgtaggagccccgtcgatgagggcggagggct

SEQ ID NO: 209 - DNA, 21014 bp, unidentified
  misc_feature 1..21014: note = Fanzor polypeptide
  source 1..21014: mol_type = other DNA
atcgccttgttgggtttaggctttctctcagtatcatggatcaagttggaccacctggacatcagaaagcaggccgagacagaaacagaggcccctgtcattgtgtctaaccacatgggttggtcagatatcttggtgcacatgtcaagaagctggcctgcttttgtggccaaggaaggcattgataaggttcccattgtagggtatatcagccaacacattggatgcatctatgccatgcgagccatcaaggagactagcaagagtgcggctgtccagctgaaggatcgtattgctgcaaaagccattgaccctaccagctctgtacgccccatgcttgtgtttcctgagggcaccaccaccaacgggcgctacctctgcaagttcaagaccggagctttcctggcaggggcacctgtacgacccgtggtcatgcacttcctgaaccaagactacgtctccccgtcgtgggagagtatcaacatcaagcgacacatcttcatcatgatggccacactcttacacaaagtgatttgctacgagctgccaatctactacccatctgatgcagagaaagaagacccggttctatttgcagaaaatgtgcgacagaacatgttaagctactgcgggaatcagggagtccccaacctcattccatgtgactccaccctggataacaagttggagtaccacaagctgagcaaggcaaccattgcagagcactccggcaagtttcgaaagagcatcaagaatgagtgatattggattggattacagtcaacggaatactaaaatgaaaccgcttcgtgtacggtgtaacctaacttagtcaatttctcggctgccgatatcttgactgaagacgcgtccaccgcgatccacagctgtcacgatcatacgacgaattgtcacagatccaagtgttgtttcgtctgtcatgtcaatgttgatgagatgcggtatccaggacgacagtctactcgcgcacataatggcctgctgtatggctttcaacaccttcgcatttccagtcttggcaggggctttgaggattttcgtctccacgacgaaaagtgtgttgatagcatgtgagaatacaagggcgtccccgttggcgcgcttgaagcagccgtcatcgaagacgtactccacagcgactaggaacaaccgtgacgatggggatgtgtggtgtttttgtttaatcaggtggtgcaatgcgttatactccaatacgcgtggatcaccggaagtagccgatgacgtccgcagtgcattgagacggctgacattccggcagtgtaggcgatcaagaaacttggatgtgtcgagactgtccatgtccagcgcccttcctagttggcggactggctttgaaatgggctgacaaggttgtgtcggcatcgcgtcgatgaagactcttttcttcgcgcatacgtggatgtgcaattactccaatctcaaaagaaggctttaaatacactcgacggaatactaaaatgaaaccgctttctggagtgtacggcacaccttacggtgtaaccaaatggtgtagcaacccacggggcagtggaacaccaatacgattttgaatcaacaaattgcaggatgttaacgagaatatcgtggttcttttttagatcacggctctccatcctgcagactccgtatcattcttttgtcggtactttcgagagtgtccattgaaggaccagccgcacttaagcgatcgactcttccccggtaccgtggcccaaaagaacacggggtctttgttgatgtgcaatgcgtcattaaaggaggtttctttgctggacgggccattttgtaggaccatccactcgtacactataatgtctgtcgacgccttataccgtttattgggatgtttcattttactgttccgccgactgtagctaatgtagggaagagaaaaaaaaaatatgcagtctcggggcgaggaggtccttttaattcccggctatcgtacctccagcaatacacaaggattgggcatgcctgtgtgtgccattcgacagtgttccgccgtttgcgtgagaatgagtgagagtggttggtgggcatcaattcgacagcagccgccgctacgcgtgtgtgaggatcatcttctgtgtcaagtttaagttgtcgtcgactgtgatgtagtgtttggctgtcttcacaatactgtatcagataagacgatcttcctgaaaaaattgtcacaatctagaacaaaaacgcaaattgcattctctccaaatccagccatagcaaatcattacaatggggtacaacaacatcgcaacttgttgatgcgcagatgacgtggctcacgcacgacctatgattgggagtaagatctgtaaacctgtcacacaacacaaacacacgatgttttaaaccaagggcattcaataacacaaaatctggctcaatgcgcacctcctcaatgtcatcaaatgcatatgctaaatgcccattctgcacacaaagtatgacaaatggaatgtgtttgtgagggacaaccttaaatgcgtcttggacagtattgaaccctgtaagcacacacactgtcggcttcgacaatacggattcctcatttaaaaatcccatctgtaccaggtatcattatacccaatcaataaaagtcctgaattaaaacccatgtcctctcccggtggtgcaatgagaaaatgacggtcgcataaaaaagatccctatataattcaatattagaaatcctcgaagcttcacacgagtcagcagctcaatttcagacaaacatggcatctcgggaagatccccttaccgacatcctcacatcggcaatcgcccacatcaagcgaacgcttccagattggtcaccaccagacctcgggcacccatatgctaacctgacgccgtacaagagcggctatgctatgctcggcaagcttaagcctggcgcccagatcatggtcaaagacgcatccggttacaggcaccatggcatctttgtcgggcagcaagtggtggcaccaggggatatcgaagtcccgacagtcgttgatgtgtggggaatttcgaaggagcaggccaacgtctccttgcgatcctacgaagacttcgttgccaacggctctatctttgcggaggctttgtacaccgaaggggctgctccggatcagaccctctcggcaagccttgccctcgctctggtcaaagatgctgagcaaaccccatttgtctacaacgccgcattcaacaactgcgagcactttgcaacgatgtgtcgctgcctcaggtgtgcatggaatttatccgatgcaagggcatgccatctcatcattgacgcacagtttgctgaactgaatacattccctgcatcacatctgcctccccgcggttttgtaggtatctgaatgaatcatcaacacaactgacatggatactaccggatccctattttaaacggaaaatgaacaataatattactaaggatgacccgttgaacaattttacacatcattccatccatttttcaagtacgtcaacgaagtgagtcctgccagcggtgatatgtcgtccacgtcggtgttcgaactgtccaggtgaaccaacgaagtgagtcctgccagcggtgatatgtcgtccacacgtgtggacgccatgttcaggtgaatcaacgaagtgaggccggaaagcggtgatatgtcgtccacgtcggtgttcgaaatgtcgaggtgcaccaatggagtgagtcctgccagtggtgatatgtcgtccacacgtgtagacgccatgttcaggtgaatcaacgaagtgagtcctgccagcggtgataataggtgttcgcccacccgtgtgtacgccatgttcagatgaaccaacgcggtgagtccggaaagctgtgatagcgaaatgtctaggtgaatcaaagaagtgagggcggccagtggtgatatgtcggttacaagtgtgtgcgccatgttcaggtgaatcaacgaagtgagtccgtacagagcttgtatgttgtacagaggtgtgtgcgacatgttcaggtgcgtcaacgaagtgagtccggacagaggtgataatatgtgttcgtccacgtaggtgtgcgacatgttcaggtgcgtcaacgaagtgagtccgtacagtggcgatatgtcggtcacgtaggtgttcgatatgtccaggtgaaccaacaaagtgaggccggacagcggagatatgtcttggatcttgtcttcaatagccgacattgattggtagggtacgtattccccacgattgacacctattttcaactctttgagccttcaaatgcgtgataatgcgtattccaaactgttataatgtcttaagtggatcattgtgacacaccggggtgcggcgcatttccactgtttgcaaacgagaggcacttgttggaggtgggattcgttcgaaatcgcattggctagaatgatctccaatacatcttcattgatttcgtcaaaggaactcattcgtttgtgaagtgtgctgtgctgatggttgtttatactgaagaatggttgtttacacttcagtcgaggggggtgtttttttcacatgaacacctctgaaaagactctccatctcgggaacaacaactatttgaacaaaaataaatactgaagaatgccggaggctcacatcaatccctattttaaacgtgttccgccgtttgcgcgtgtcaatgagggcctgcgtgtgccattcgaccgtgttcggcctcttgtgtacactcctatacattcgacagtgttcggcctcttgtgtacactcctcctatacattcgacagtgttccgccgtttgcgtgtgtacactcctatacattcgacagtgttccgccgtttgcgtgtgtcctccgatggacaagtcagatcctgtgtcacagaagactgggggtttaaatatccaaatttctaggacattgcgaatgtccaaattgacactaatttctgccgtttctgctaaaggtatcgttcattacaagatccttgatcacaattgcaagaaagtcgactttgtacagtttgtatctgagtttcatgtacagcggggtacagtcgctgtccttgacaatatacagttccatcattcaaaggagacgatttctatgttcgattctgtaggaatacgaccactctttgtacctccttacagtccagagtttaacgctattgagaatgtctttagtttgctcgagcgaaaatatcgctgcatgtgcctaataattccagatgtagcagatatatttgattacagtaacgctttgaaaaggattattgatgcgcacgatgttagccatcagtttgacttttcagggtactttgaacatgtaaattcagtgtctttagatgccttgaatttattgtgtcaatcacctgaagacagtatctgaattgccaagatcggttacaaatcttgaattggtcaacttttcagaatccccaaatataaggtgtcccaatatcaaatgtccctagctgtatgggtcttcctcctccaattcttagtaaatttcctggctgtggatatcttgacagaagacgcgtccaccgcgattcatagctgtcacgatcatacgagaaattttcacatatccaagtgaggttccgtctttcaggtccatgtttatgagatgcggtagccaggacaaaagtctagtcgcgcccatagtggcttgctgtatggctttcgacaccttggcatgtccatactgggcaggggggggtttgaggattttcggctccacaacgaaaagggtgttgatagcatgtgagaatacaagggcgcttccgttggcgatcttgtagcagccgtcatcgaagaagtactccacagcgaccaggaacaaacgtgacggtggggatgtgtggtgtctttgtttaataaggtgaagcaaagcgtcatacttcaagatgcgtggatcaccggaaacagccgatgacgcccgcagtgcatggagacggctgacattctggcagtggaggcgattaagaaacttggttgtgccgagactgtccatgtccagcgacaacgcctttcctagtttgcggactggttttgaaatgggctgacaaggtgggatatacatatcggtcggcatcgcgtcgatgaatactctttttcttcgcgcaatcgctcaatggtttttatcaggtatgtatgttgcgttgtttagactcgttttttagaaacgcacacgaaacacttgtcgtcgattaaagccgcattgagtcttacgcaaccgcattcactgtggttgctactgctgttctttgagtaccccattgctatttggggccattggctgccatgcaaaacatgcgatgtcccgtatgattcaaagagcatcagaatcaccataaatcgtcttcccacaccacttgtaccgaattatttagagtgaccagtactttatgttcatatgtcccaagtccgtgatacttcgtagcaagaataatgacgttagtctgcttatacttcctagcacagactttgtcaaatccccaccagaatccatcttcatccatccatgttctcttgttgtgcaactggcactggagctcgttaggaatgtatcgttcgatgtaatcactaccccattcaggcacgaggcctctcatgaggcgggccaattccaatgttttttgcttttcaattgtatcatcttggaccccagtgcaaatcaagtcggacgtacccgacacagtgatgtccgaagcgtaatctgtcattctgtagttattctcaaataaagtgggacaccctttataatgatggacgaggccgtcacatccaatccaccaaggagacaccaatcatcatcgaatcacatccaataagtgctcccccaagagtatcatcatcatcgaatcacatccaatgagtgctcccccaagagtatcgacatcgttccgcagtttgagataagatgattttgtgcgcggtgatcgtcttaagacgtcttggtcagtcagtcgtcgtattgtggtctgcactcacctgtgaaccattagctggccatccgaagatccctttcaaccttgcaggatacagcagtgccctcccactgccaccaggccagtgcctctgcaagagctcatcaaggcgctcgtaggttaagatcgactctgcgtcaaacattctgcccagggcagcgatgaagggtgtgcctgccttgccacctgccgtttcttcaaaagtcctagttgccaacaacatcacgtccttgtgtgcaacgcgatggaactgtgcatcatgatctgctcttgctgcgtcacgcagagatcttccgtgctggaacggcagaccagtgccgggggcaatggcatctgcttcgcacatgttgagcacgcggatgagtgtgccgcaaaaacgttgcgcttccaccaccgcatcgatggcctcagctgacaccagctgtttgtaagaacatactaatgtaccgtgacgtggcgacccctcattcatgccatgcccacagaataacaaaatagcaacgtccacggagggctccaacaaccaagccaattggtccatgacggtcctccggcacacggtgccttcgagaacactgatctccataccagaacccaaaaccttgttgacaaaaacatcctggtccttcatggctccgccacatctgtaccccttcaagtcccttggcagcgtaccacactcttgcaatgtgtgcataagcacgggtcccaacccgtctacgtagtaacttggaaaaattaacaaggcgcgacgagtcttaacggacgccatcatgtgctcctactctcaaataaagtgggacacgctgtaatttcctttttgatgatccggtaccgagaattaataataagaagtgtctgtgataagagtccgccgtgttgttgttatgctgcaataaatgacgatcgatttccattgttgccgttgaatttaagctacccgtatatcctcgaacctatgaatttcttataacacatccgggggtccgggggacatgtagtaagaaagatttgacacatgcctgcaggtgggatgccggtgcccaggatgcgccactggcagagaacaagaagcgctccgcaaaaagctcctgcacgaaacacgaatttgcgtaagttttaccctgtagtgcatcccggtgtatcatgcagaagcaggggcacaagccaagccgcctgcttgagacggcagttcatgaaaaagatgaatctcggattcgaggaataattcctggatgttggtactgactgctcaacataaggagtaaaaagctgtgcatatataatcaagtatgcctttcaaggtgggttttaaatcgttgaacattggagagcaatgtgcaaggtatgccgatgtgcgtcaattgtttggatttcctgaccgtttgcaggttttgtttctacaacgcaatgcgttcgaggcgtacgtcaaggacgatagcatacccttagacccgcaagaagtgtggcatgagaatattcatatccgcaaatgcaatctcaaaggactcgtctgtgcgcttatgaggagactgacactgttggagcacatgcgagcatgggagaacaataaggatggacctagacggggggcatgcattgttgagatttatgtggagtggaatgtattagaaaggagactaacccgcctcattgcatccgacgctgttgtgggcgattccgtgatcctcttctgcccaaacgaaagcacatgccttgccagacagttggacccaaccttattgtcatcaattccacctgacgtgatagagaacataataagtatggtaggggagccagacgcgaatgcgctacgcgcagcatctcctaccatcgacgctcagtatgtgccgacgaagattaggaagatgttcgtcgttctggaccagattgctgtttagttttgtagtattattaaacatcctggaccgcatcgtgcttcctgtgcttgttgaggagttctggttcagattgtgatgatgtgtacaccgggtcatcgctgacttaccttaacaaggaggtgctagagactttggggtatgagccaagctacgacatcctcaagagggacgagatgttcgacgtcaagatcaacgggtgggccatgcaagtggggctctgcccgaaagagcgttgcaagcacgtgtgtctgttgggtcataacgttttcagaacgcacggtcttaatgtggccatcaactacagtcggcggaacagtaaaatgaaacatatatcagatggaaataaatgtacgacatcgccgttagaaaattggcgttaagaatggtcgctgacttgggtgtgttaaaaacttctgtgtttacggacatcagtcgttctactctgtggaggtggaaacactttggtgtaaatcgaaaacgacgtgaatttgtaagcaacctttttgagacgaataaggatttgttaaaatcgtttttattgtcaactcaatgcacaaccgcaagaggtgtcgttgcttttttcaaaagtactcacaatgtacgattatcaactaaaacagtgtatcgtttcataaaactcattggttttacaagaaaaaggagcaaactccgtggacagtgtaaaggggacttagttccacttgtcaatgaattttgtagtaggtacaaggagacaatcaatgctgggaaaattttagtatcagttgacgaatgtgggtttagtgagcgtctcaagccacattatgggtattcccctgtaggaaaagccgtacacaatgttccttcaagtgtattgttatcgttaaaactactagtgggtgggtacaccacagtttgttgatggcagttttttcagatggtaggaaagagttcgtaccataccgaatgaaacaaagacgcacgtgtctgatatgatttccttagcattcggcaacctcacttatcaaattattatgggttgttttgaacacgtttggaacacttatgtgtataaagcggtctgtgacgtattgattatgaaagatggcgacgaaacctccgacaatcgcgaaattgaaggagctactgaaattggctgaagtagcatactcctcaaaggacaagaaggacgatattgtccgtttatgcgaagacaatggtctcatcgccagaccccctccagaatacaagacggtggaaaagatgtgtgtcgtgaaatgcgccctgaagaaggcaatgagtcttgacgatgaagaattcggtaagtttagggagcatgtggaccagctcgtcaatgtggtgagccgcatattacggcggtccagtctggtgctgactttccacatcacgagtctcttagagaaaggtctggagattccagacatgtacattatgaaagatacctactggaaggattggctccgtatcggggtagacgaaatcttccctgatgaggaaagcaagatatcgtacgaagctgtgaaggactccatcggcgatgtaattggtaatgacgacgctgactacatcaagtcttatccgatctatttcgatcaagtattgaactatgcaggtcacacattaagcactgtcgtgtcaaataacgcatgggttcctttgataccacgtctggccagactcacttccaccactttaaataaattaaatgccccgaagacgctggacacatcaaagatcattcggggatacgacgtgatgcgggctattcagcaagaagtccaaaacatggagggatggccagagtctgttcaagagtacgtcaatgaagttagggagatgctgagtgttccagatggaagtcgagtttatgataactatggcaaagacatggactttccgaccatggtccgttttaattattggatacagacacggttggaggatatggatgcacgtcgtatccgattgatgcccatcttcaatgtccaacaggtgcacgttcgccttgacctgaagaccctcgtgaacctgttcaggcacatgttccccaatgaccataacatcgttgagctttccaagtgggaacatgtaacatgaatgggttcccattggctgaacacagaaagaatgagggtggtggatagagcacacatccctcgctcaatgagacactgtcaaatgtgtgggttccaaaaacctgaggatgaaatgcatatgtttgagtgccctttttataatgatattcgcctccgctaccagaagctgtttacagatatttataggcatgtccatgaggataccaacttaaccgtatggaatgtggaattctgcgattccacattcagaacctttatgaatggaaatggcactaagtctttttggagcaacctagccgactatctttctacttgtagaagagcaagacaggaagccctggactgcttagtggcaccgtaatttatcatccctttttttcttcttcttgtgacttctcatttgttagcttcttacctccgccactgtaagtggttgagatctgggtccggctctaaggggtttaatacctacgccaccaaaacggtggttgggagtttggtttgtttgtcctcgacacacccctgatgtaatggggttttttgctttgtgggtgctttttctttttgtttaaagcacagagtctcatacaccctcgcggtgtcaagtagactttaacatgtaatgtaatgtaatgtaatgtaaagaatcccgacagcttcatgttgccccagaggcctgcacataagaagaaaaaatcatgtggtccaggtgaatgggaggcatacaagtcggtcctgaagcagtacgatgatgatgttaaggatatcaaggctactgacgagtacagacatgcaaagggtttgtatgacacgcttgtgaacgcccgaaaaacagtcgcaggttccttcttcagaaaaccacctgtcaagaatgggtgggttttcgacagcagcatctgtactgacggagtctccttgagcatgcagtacagcaagacagtacatgtccttgtctcagatctgaagaagacctgtaagaagcctcgtaaagaagaaggtatcaagatcgcagaaaaatacgacggctcacttaaaacgatattgcccgatatgggtatcgtcgtcctgggtgtggacccaggacggagcaacatcgctacggtaacgtatttggcagacgataaaaataagacatggactctgacacgtggtgcattttaccacaagtcgggtatcaagaagcagacaaggcagaaggaactgcgttttgctgacatgattcctatgtgggagtctctgcgtgaaaatggagcagctttaagtacatcgaggacggataatatctcggcgtacttgtcaaattacgctaagttttctgacgagtggtggagattggctttgcgacgccgagaatcccgtgacaacttgcagcgttacatcggaaaacgaaaggtcaaagactctttctgggcgggtatcaagcggtgcatgatcaaagaacttcctgatatgaaggtttgcgtggcctacggatctgccatcacgaaactgaagcctactggaccgggagaagttgcagttcccactggggccatgttcgcatcgtgtaaaagaattttcaaagaggacgtttctgtgacagatgagttcaaaacgactcttatgtcgtggtagacgggtaaagaaaaaaaacgtgtttacaagatcccaagcgtttgttcagcttgggacgtgaagcttaggttgggtggtgaacgttttggtcacacgaaatcgaaaactatgccaaaggtcgctgattgcgaccacttaggggtaaggttgtacaataaacgttaaggcgcacaagagaagcacaggaggggtggcttcgccacttcccttgtcgattctcaaaaatcgatcgagcggtacccagaggtacgaggactgcgattctctccagaaacatgcatttactcggaccgggatcgctcttctgctctcacaatcgcaaggctgcactgcatggaattgatgggtctaggacgacctcttccatttgcccacagcagctctgttgttgttgatgaataaaaactcgtattgttgtagacaccactcggtccccctccggtggtcgcgacaacattaggttacaccgcaaggtgtgccgtacacgaagcggtttcatttaagtattccgttgactgtacaagcaacaaacggtgaaggtcgccaaggcaaacgaataatgtcggacggtgcgatgagaaattataaattcaggtcaaaataccttaagggggagctgaatgagataatggatcggaagaatgcagtgggagaacaaagtgctagtgctgtcggagggtcagcgcgaggtgagctgtcctgcgctagactgggatgcggtggcgagcgaggttaggggtgctctagtgcccggcaaggcggtgtcatgtatagcgttcataggggctgggagcgcagagaacgaggtggcgctgctgcacgctatggggaatgtgggcgggtgtttatgcactgacggggtgcggaagcaacaggtagcttttctggacacatgctttaccacgcgatcgttacagaatgttaagtgctatgcggacgggctgagtgatcagcagccccgaccagcgttgttgttttcattcaaggacctgacaacattcttgcagcgacagcatgcgctgcggcctgcggagcagttcatagtgctcggcatcaacgcggggatgaccatgaacagcgcggaggagctgtacgaatgtcaccggttcctgtgccagtgcgcggaatgggcggcaggtggcgctatgcaccagcagtacatgaatttcatgggggtcgccaaccactggagggttccgggccggtcggtgcatctgggcaccgggctgtggtgctaccagagtccctggtgggagctggccaagtacctcatgacagatacaagcgcagaactgctcctgttgggacggcgaactgcctgatgctgaggtcaacatacactctctcgatggaaacacgcattgatcgagtgcattgtttctgttcctgcttgaccctgacatccggattattttttaagacctaaaaaactgagaacaagaatgccattattttgttgataaataatataagaatctctacaactaaatggatatcatccccagaatgcaacacccgcgtgggaggacaagaatgcaacatcccgagttcaaactcagtgaagaccttctaaaccgcaataggggcaaacacatttggaagtgtggtctgctagaaatggcagaattacaaccataccgatgcttgaaatgcaacctgacaattgcagatctgcagcaacttggcaacactggagtttgctcatcggaatacagatacactcgacggagtgtacggcacaccttacggtgtaacctaatggtgtagcaacacggggtctttgttgatgcgcagcgtcgccggtgtgaggggtggtcgaggtttcaagaaccttgtcttcttcacccccgattgcagagaactgttaacatcagtcagtgccatctcatggagcatcacgacatcatcgcatgcacagctcagcgaaattccatgcagcatgaaatttccaacgaggcttcaaaagccgccgtgtcgtgggtgagaatgaatggacggatggggggcatgcgaaagctgcatgtgaaaaaaaaattgactgaattgtcataaaagaaaccgataaccaccacaaacacacacaaatacccacaaatacccacaaaaacccacaaaaatggcaaactttactgaattatacaacgatgttgccaatgacacttcgggcgttccgtcggatccattttgcgatcgcgcaagagaactcattccgcccatggcgcgcgtttgggaggtacttgcaaagctcgccgttcaatcgtgggacaacgaaatacaacaggtctgccaatggtcaactgacatgactgccaaagacttcacagacggaaaccacgccaagctgtttatcaaccatctgataacagaaccgccggacggatacacatgctatccccgcttccaaggcatgtttcttggtttggaagccgtcttcccgtacacttcttggtgttccgtagattacattacccacacacgcaagattttaagcagcctgttcattgagttggatgagttcagtatcgattgtgtggcatctgatggattcgccaatcatgaatgggacattgtacagaacatagcgtcccagtggttgcgagcgtggtgctcggcgcgcaagatccagcgcacgtaccgcaagtacatcgagcacaaagagatccagcgccaaaagcgcctcctcatcacaatccccaggatcgtgtcattgctcaaggattgcatgggtcgcgaataagtaattattcgagaacaacttttttttttttttacattcgatgatgaagaacagggattttctgttcgaacagccttcaggaagatgccagctgcccccacaatgtctctgtcgcaggtgaattgacagttcttgcaggtgtatgtctctccacacttgttcaagaaaccgcacatagggcatgtctgacttgtgtaatgctcaagcccccacaatatcttcaacctgctgcaccccccaacgttgccccaaagcaactatctgcagtctggatgagtataaggtgtgtcccactttatttgagaacaactgtaagggtttaccaatatgatcgtgatcggggcagatgccaccggtgcctgtgagaagttccccagtcatgtcccgtgcgccattgtcaccattcctatgggagaaatcgttgagatattcagtctgtcaggcgacggcacattcaagaccggtgccaccctgcaactcaaaataggtgacgaacacacatggcatgcggtagccgccctacgaagggacatgatcaataaatagtttgatgtggacaaggcggtgttcctgccaccacggaccatcacagtgttcgtgcctcgttacaccaccatctatgacacgagtggtgctggcgagggcacatgcagcctgtcatgcaccactggggacacgcagttgcatgtcggagaccgcattggattgtatgccacactgcgtagtttcggcaaacatacggtttgtcatgctgacgattcatatcacagcttggcgttcgaatgcgaaggcatcacggcggtagtgaacgagttgatcacaaactctggatcacgccggagcgcataaaaatgtgcgtactacgatgtccatcctgtatacaactttactgttccgccgactgtagcgagtcgttcctatttttatatttttatacatgtatacatgtgtatgtaaaatgtcttcaacaccccgcaattcctcttctacctcaaaacgtaagaagacttctggagatgcgacttttgcagctaagctggctgtgttcatgttgaacgctcaatcacacgacattcatttttccgagaaggagggcttccttcactcgagtgattatgtgaagggtgtcatcccccttttgcatatgaacatcagtcgcgaggggtttcaagtggttatgagcactacgaagggtaatttgtccattgccctagctcagttgtgtagtagcaagaacatcgaggatattctttctttcgaaaagttcagttgcctgcgtcagtgtgcttttacaagtgacgttcttgttgaccgtttcgtagacacgattgatacttcttatgagacccgcaagaacggaattaagttggtgaagcagttggctaagcaccagagatggcaggtgagtgccggtatcatccccgagtcctcgatcgcgtggtctgagaatctttaaatacaaaaaaattgaaaggtttttcggaacgttaggaatacaacaacaacctcctcacaccccttaatatactgcatctgtcatacgaaatgtttggaatctctgacgtcttcgcaatcattgcgtcccgacccaaggtattcgtcatttacgacaacccgactttcgtcaccaagcctgtgttaacacgcaaagggatgtcccacaccaagaagtaatctggatgagaaggtgtttctgtttcaagtatttgaaacaaaacggggccaaaatcagcacctccacgtggtggccctggatacccaaccaagctgaaacaaataaaacaaatagacaataaaaaaaacggttgtctatttgttttatttgtttttgtatgtttcattttactgttccgccgactgtagttatgtctaatgcttgatgtgaactgtgaactgtgggctcccctccggtcgcccccggtcggttcctcgcggactcctttgtgggggctcccctccggtcgcccccggtcgctccgctggggggaagaggtgaaaggggctccgccgcttgttgaatactatccgttgtttgccgatggactatggctgtctgtacatggacatctcgtgacacgaaagggcatcggtggcgtgcgcgttgagtggcgtgaggtccttgcgcatacagctagggacatttgatattgggacaccttatatttggggattctgaaaagttgaccaattcaagatttgtaaccgatcttgtcaatacagattctgtcttcaggtgattgacacaaaaaattcaatgaaatgctaccccaaccgaagcacacgccgtcctatactccgcaatatgtttaggagtcatagcaacaacgtcatcaggcgagaacgacaacaacttttgcctgagacggtcctcagccgcatgacgggcagtagcttcattgtcggcacggtcctccgcctcacgccgggcagtagcttccgcacgaagtgcagtagcttctgcgcgacgtgcagtagcttcattgtcggcacggtcctcagcctcacgccgggcagtagcttcattttcagcacgataggcatcagcacgacggtggaagtacatgaaaagcgcaatggttgttgcaaccgctacagtcagcggaacagtaaaatgaaacatgaaacatgaaacatatatcagatggaaataaataataatgtacgacatccccgttagaaaattggcgttaagaatggtttctgaattgggtgtgttaaaaacttatgtgtttacgaacatcagtcgcttcagaatttgggattccccctcatccctgagcgcgtgcacgtatgcctcgcggaacgcctgtgcctgaggtccgcagtcagggatcgcaaacgatccgaacatggggtcccccatggcaccgtgagttgcctcggtgggggccgggaagttcttgacatgtgccgccgccagaataacatcaagtgacatattgagtgtttaataaacattgtatgattcttctttaagcttttccctcactatttttgccagatctttgattgccatatttctgtttctttggtattcgcactgttttgccgtgtcccttgctccatacattggtccctccgggtcaaactgcataatttccctgaattctgtgagtagccttgctaggatgaccccttcgttttcttctttgctgactccgatgagtatctccttgaatttttcttctatctgtctgtaccgcctctttgatagcatggactgcccctttttcatgggggcatcagaagcagtagcagtagcagagtcattagcagaggtaaatgatgatcccgtattgtcttcagccttagtgcccatactacctgattgatttgtcttagtaatgcttgtgagattagtagtagtaatgccgtgtattatcgttttcactttatacataatcgattggattgtttctcccttaaattcccctccaaaaagagatcgagtgcgcatgtgcttcgcagagcgcaactcccctgcactttgcttcacctcccaagcgtttcaatgaaaatcccaagcgttacatcgagaagcccagtgcatggtgtatgtaagtcaattaacgttttaatgttttaacatcacaatgttatgatgttaaattgaaaaaagaataatgattctgaaatgaaactcgacatcttcttctctactttcgtcaggtactctcactcccaaaacgacaggtaccacaagataccctattaaatatgtggtgaagttggtatcgttggtatcgttggtgacatggtttatgaagtgaggaagataattcagatgatgaatcaacaagcgaagagagtagacgtcatgcgtcaaaagaagaccctgagtaggaatgtaccgttgttaccgttgttaccgttgttaccgttgttaccgttgttaccgttgttacaatttagttggttacactgtttatgaagaagatgagaattcagatgatgaatcgtcttgaaaaaagaaggatatcatgaattgataattaatattaccatgttaccaatgataccaataaaaagtaagtatattaaaatgtcacttttcacttttcaatatgaaaaatgaaaaatgcaattttctcataaccctattaaatctgtggtaacgttggtatcgttggtgacatggtttatgaagtgaggaagataattcagatgatgaatcaacaagcgaagagagtagacgtcatgcgtcaaaaaagaccctgagtaggaatgtaccgttgttaccgttgttaccgttgttacaatttagttggttacactgtttatgaagaagatgagaattcagatgatgaatcgtcttgaaaaaagaaggatatcatgaattaataattaatattaccatgttaccaatgataccaataaaaagtaagtatattaaaatgtcacttttcacttttcaatatgaaaaatgaaaaatgcaattttctcataaccctattaaatatgtggtaacgttggtatcgttggtatcgttggtgacatggtttatgaagtgaggaagataattcagatgatgaatcaacaagcgaagagagtagacgtcatgcgtcaaaagaagaccctgagtaggaatgtaccgttgttaccgttgttaccgttgttaccgttgttaccgttgttaccgttgttaccgttgttaccgttgttaccgttgttacaatttagttggttacactgtttatgaagaagatgagaattcagatgatgaatcgtcttgaaaaaagaaggatatcatgaattgataattaatattaccatgttaccaatgataccaataaaaagtaagtatattaaaatgtcacttttcacttttcaatatgaaaaatgaaaaatgcaattttctcataaccctattaaatctgtggtaacgttggtatcgttggtgacatggtttatgaagtgaggaagataattcagatgatgaatcaacaagcgaagagagtagacgtcatgcgtcaaaagaagaccctgagtaggaatgtaccgttgttaccgttgttaccgttgttaccgttgttaccgttgttaccgttgttaccgttgttaccgttgttaccgttgttaccattgttaccgttgttaccgttgttaccgttgttaccgttgttaccgttgttaccgttgttaccgttgttaccgttgttacaatttagttggttacactgtttatgaagaagatgagaattcagatgatgaatcgtcttgaaaaaagaaggatatcatgaattaataattaatattaccatgttaccaatgataccaataaaaagtaagtatattaaaatgtcacttttcacttttcaatatgaaaaatgaaaaatgcaattttctcataaccctattaaatatgtggtaccgttgttaccgttgttatgtggtaccgttgttaccgttgttaccgttgtaacaattagttggatacagactgctatacactcgagcgaattgctgaatgtcgaacagcgcagcgattctgagactgcatatcgcggaaacgcattcaatgttgaccgcattagtgactgtacgcttgcacgcactgcatggctggtggcatgatgtggcatgaccgggccatcatcaggagtttattgtgtacataagggggaatcgtgtgtttattgtactcagtg

SEQ ID NO: 210 - DNA, 21188 bp, Ectocarpus sp.
  variation 41: note = n is any nucleotide
  variation 2498..2729: note = n is any nucleotide
  variation 17704: note = n is any nucleotide
  variation 18310: note = n is any nucleotide
  variation 18582..18743: note = n is any nucleotide
  variation 18890..20521: note = n is any nucleotide
  source 1..21188: mol_type = other DNA
tgcagccaaatcacatcaatcacattttggcctcgagtgantgttcattggctggctcgtgtgatttttctcgttgtacagaagaacggggggcggtccatcatcaccagctagagaggggggtggtatccatcatcattcgctagaggggggggtggtgacgatccctcaacagcttttttttgcaaaacaaaacaaaaagcgtacccctaacgggacacacttttcacaaaaaaaaactaatatagaaaggtgctctctggtgcgctgacagagttgtaggaccacgagacggcaatacggcctgctcctcatttattccaatcctccgatcctccggcgcggtgaaaacgcgaggaagaagataagtaagtgtggcatgcagccaaatcacatcaatcacattttggcctcgagtgaacgttccttgctaacctcgagaatacgcagagggtgacacgggcagtggcacgggccttgagattcgggcgggtgtgagccgacccggtcgccatttcgctttgaagctaatatattgtgctttgctcacaacgaacggcttcattctttgtgcacttcacgaccgcctacatatggcaacagcctcacaacgcgtagtactacatatgcgaaatatgcgataaggtatgtagcagccggcgactcatgtctctgttgggatgtacctgtagcgctgtcctgatgctgctgattacgcgactcgtgcagaggtggaatcactggtggctaagccagtgtgttgaacaacccttgacgatgttgtgaagtttcgcctgtgtgcctctgatgatgtggtgggttgttcttgaactgctgtagctcgatggctgtgtttagaaggtgatagttggaagtgagcccggttggcgagcatgttctgtacatccgtgtgtctcgaggacccaaagatttgatgatccggaaacgttctggaaccctacgtaccgttctacgtagtacctgagcgacagttctcgagaaatcctcatgaatcgcattctaattggtacgtacttgaactgcctttgtcccttccaacataagtaagtgctgttcctgtcatcgttcccggtccaggaaactcagaaacctcttgggatattccttggggagaaaacacgcgttcaaccccaaatgatattattcactactctgttggtaatttcgccaaggcggtccacggggctcaccgtggtcaactacggcgaacaccttttgttagccacggtgaaccacggagaaccggtcttgtctataggctatgctctccgcgatacatcgtggcggcagccaccacggtgcgacccaccgaaatctaaatctaccgttacaatatccgcgatgcgccgtggcggccaccactgctgtgcggtcgcccaccgaaacctgggtcctccaaccacaccaggatgtgggcatcttagctcagtcccgctcagtcaccgggctcatctgcctactaccgcccaccgcgctccctatgttctcatgtgcatgattcaatggccaatcacttcgtctaccctcagaggagcagccagcgacagcggcggggacttttgggtcgggatttcacgaagagtcttcgacgacaaacgtactctgtacataaatttaacgactaacaaagtatgtcagccacgctgcgtactaccttcgaaacaacccgcagagtacttgatcgtatatagagagagtgttgcttcattcttgagtgaatgtgttcgtttccctcttagcgccgactgagaagacggcttatttcgctcgaaacacaatcatatcagactccaagatgaaacggcgttctagagtgtgagagaaagccatgttcgtatagttgatgctgtgtgtgtcgacagagtgacgtagaacaacttgattggacagtttgcattgcgggactgtgcgcgttgaagatcgttgagtagccacatattatcagcacagcaaggaacgttctgtgggaatgttcttcgtggatggtgcattaccccgagtgtgtttcttgtggatagtgcatcagtcagaggattcatggtacgtcgtgatgtacgtttacccctgtctgttgagtctttgtgttccgatatcattgtgttctgcttttgtgcgttggtcgagcgacatgggtggtggctgcggtgctgcggtgctgtggtgctcccgacccttgctcacttcaccttttgacctgttctcctggtccaaggtctcaacaataaaacatcttttgcttagacatgggttgtagtgaaggggggggtctttctggcgagcagggctagactcaccctcaagggatgaccgaaaccttcttgctgctgcgcatatgccgcgaggagtgcgtgtggtggtagagttgggtctgcactgatggggtcaggcgggaaaatgtagatgcgtgggcctttctggccgtcggcgtaggcagtgatgcccatctcatttttgtgcgcggaggcagacaccatcannnnnnnnnnnnnnnnnnnnnnnnnnnnnnnnnnnnnnnnnnnnnnnnnnnnnnnnnnnnnnnnnnnnnnnnnnnnnnnnnnnnnnnnnnnnnnnnnnnnnnnnnnnnnnnnnnnnnnnnnnnnnnnnnnnnnnnnnnnnnnnnnnnnnnnnnnnnnnnnnnnnnnnnnnnnnnnnnnnnnnnnnnnnnnnnnnnnnnnnnnnnnnnnnnnnnnnnnnnnnnnnnnnnnnnntcttttcctgactttccgtgttggttttgtgtgatgacgtcgtcaccagttttgtagagagacccgtcagagatggcgtggctaacccgggtgccttggttttgtgcctgatcgtggaagaccccttcaatgtggaacgattcttagctattgtcgatattttcactgcgtgcctaacgcagacgatcgggagagattcgggtgattgtccattgcaatcatggctttggttggttgttctttttcactgtacgtccgcagacacattctgacagcacttcagacagcagctttgtgccccgccagcttcttgttccatgcctaccatggtgtttttgtacagacagcacttcagacagcagtatgctgtagtcgggaatcttccgttttggtatagagtgggacagggagggggtgatgctactgtagtcgaacggtgggacggacgtgctgcagttcagtttttgggcacgcatacggtgctgcagggatttttaggtgtacctcttcgggctcttggatacctttttctcgttatatgtgtgcgtgttctttagatcctcagatagctctagcactttcgtgaccacaggctgagagtctttgctagattttggcatttagcaactgacatgcggtttaatgtgacgacaacaacaacaacaacccagcaatctcttccggaaataccggcctaaaagctttcttgcccggcttggccgcgttagccgcctactgcctctccccaagagtatcgcacgccatgagttctaaccaacatttgaaacgaacatattgacggtatgcttcttgtacaggtccatgaatgaagcaatgtatgcctttaagtgcaaaatatctttcgacccgacacagatacgacgatgctcgttgaccgcggcccactcgacaatctcacgcttgacaccatcctctcccttcagatttttatgggagatcatcccttgcattagcgttttcagcacaacagacgccggtactcctgctaccaagagctcatttaagctatccctgacatcaatcagctttcgcgggctctgctccagaaaaacacccgtgcatatggattcgatgtacttggcccacaccatcgtgtcggctctgcccgccttggccatgaacatcgctcgagaaatggacctcccccagctttccacaatttgcgaaaccaacgccttgtcatcgatgtcaatctcctccgctaaattctctgcgctaggaagtggcacacgtatcaacacgcaccgcgaccgcagaggctcgatgactctcgaggcaaaggtcgacaccaacaccaatcgacacgaggcggtgaacttctccatcatccttcgcagacccgcgtgcgcctgcttgcttaaattggcggcgccgcgcaacacgatcgtcttgtgcgtcacgtcacagtttttgaagacggcggcgatggacccgttgttggccatctccttgatggcgtgctgcaccacacacgtgtcgttggcgccggcgtcgctcggttccatctcgatgtggtggttggatacgcgaacgtcgatctcgatcgtatgctttgacgaggctgtctccaccacgcgtttttcggtagtcaccctgtttacgcctggaccatacaatttctttaaaaggtgtctaactagcgtcatcttgcccgattctcgtgggccgtggaagaggaggtgcgggctgtcgccgtggcgcgacatggaagtcaggcgatcctcgatctcggggtgcatggcttttttttaaaagttgttttatgcgtgtctcacgaatcaaaatttacagttgaatgtcgtgaagcacggggatgtctttatagacgtccttgaactcgtcgcgctgcggatgagtgtgggattgacaagttggtttccgatcggccacgaacaggtcgtggtacattcggcgacagagcaaatagaggaggcaataaagcatttatagtttatgaaaaaaaaaaaaattctctgtgtttccgcaactaaacttccgacgacgacgcaaaaatattgagagcatgacaaatgtcggccaccgagaaaggttttgtgatcgaaagagttctgggatcgccggactcgtgactatcaccgctgcaaagaatggatggcaaatctcttggcaatcccatcaccccacctctccgcacgctgcaaaaaaaatctattcccgtctcgtctccgatgaagctgtcggtgatcaccacatcgaactttcatggacgagcacgagactcttcggccgaacacgcattcacaacctcgcaaccaagcgaactcaagtacttcgacaatggtctcaggatcaggactgaatcgtccatcgcaagaacgcgaaacgaaaatcgcgtcgatacctgcttttgtctggagacgatgctgcgacgttttcgtggcaaaaaaagcgtgaacgtgcttcctttaccctcgccgggactcgaaacttctaccttcgcgtctatcgcatcacaattttttttccacgttggacaaaccaaggccagttcccgaattgatctgtgatgctcttccgctcctgaaaaagagatcaaaaactttgcaaacgtcggcctcgcttagaccaatgccactgtccatgacgcgaatctccacggtgttttccgaagcgcaacggcgcccagaacgattttcccgctctgtgtgtacttgacggcattgctcagcaagttacacacgattttatggaggcgctccctgttggtctgtgctccgaagttttcgccgtcgtcgtcgattctcacgcccactgtgatgtctttgtcctttccctccaacagcagcaatcccgtaccaaccatggaatacacattcaacagctctgcgatgtcgacatcttctttggggacaacacggtgtacttgcttgccgttgaccatgtcgaccatgtcagacactagcacgttgccaagaatgttgacggacttcacagtttccagaattctgttgtccgcatcggtctcaccgacctcgcatattgtctgaattaaagttgcattgtttttcatatcgtgcccgatccggtataggtcaagggtctgcctctcagccagctcttccgcttgacaacgagagatcctctcgaacttctgtagatcgcggagctgtgataccagaatgaccacgaatgcgttcaaggccgacagcgccgcgattcccatctgagtactacctatcaacacctcttctgcttcaccacccttggtgacatgcacaaaaggtcctcggccagccgccgtgaaccctaagattgaccccgtgaacgcaagctggacgagacttgcttggaactgatcaacatatgcactgactccaataagcagagcatacattattccgacgatcgacgccaaacccaagaggtgatagttagaaacgggacacatagatgtgattccgaggaaagcgctgatgccgcaaaccagcgcgttgggcgatcgaggtcgggttttccatagggtcggcacgatcagtagagggtacagtagtgttatcgttcctgaaatgtgtccaagtgtgtagtttacgaccactgaagacagttcgacgtccgtacctaggaagtaaaacgcaaggctcccgggaatgctcgcgacgatactcgcgataatcaccggaaaagcaacaaatattgcaaggaatctaagcgttccaacttcctcggatgatagcaccggatagaagtgcttcattgagacgtacccaaacaattgacccagagaattgcttgcgcaaacagctaacagcaatggtaccggaaacttcctgaagcgaaaagggatgtagggtaacgtgctgctcgcgatgtgcccgacgcgctcgggccaatgtgtatcgggggtgtgcagcattgccgcgatcgcgatcgcagtctgtgtccatgagaagatagtacctccaggtgacgcaaagaccctgatgctagcgaggacgccgatgtattgtgcgatgaaaccacctaaaatgcgaccaacgcatggaaacatttgtgcgagtcataattacaggataccaaatattactcaactcaactctccttcttcaagcatctctcgataatggtagcgtattcgtcgatgtcgtggtcggacaccgaatccaatctccaagttttgagaaaacctgctttacaccagttattaatttactcgtaagaaatgaaaaagaaacatccaaaagtggtcattagtgtaaagttaagcatttggaaagttaatatattttcatacgacaacatgaaaaatgacttactcgacacaccatgaaatatacgacgccttcaagaaatgtgacgaacgatggatacagcgacgccgaaaaatggacacatcgtccactttctacacgctgatcaggtgttgtattcaaggaaggggtgttggtcatattctgaggatgggcgatgaacaatattcaacaaggttttcgtgtgattgagagcgaagtttctgattgagagcgagattgcgcgatgcgctgtacctggactaccgctgagaggtggagcttgctgcgtggcttgaattgaaggcctagcccgtagctacaagccgataccctggtcatcctgtgggcgtctctcgttgtggagctacagcggggagcagaatctgcagcagagctcaccgcgcgcgatcaaatcgccctgaaacagtttgaggcaggaatagccaatctggggaaatctagcaacttgtctagctcctagctgcagcatccgatcgcgatgacacgcatatgctcgtatgctcgtgacgctgctgatgagaccttccatttgcgccgcttcttggaagagcccgccccctacttcccaagaaatggcaagaagaggcgtctggccccgaaatttcaatatttttggctcccgctctcaatcgtatactccgctctcaatcaggcgaaaaccctgttattcgtcacacacaggaaattcatctcgccaggaaaaaacttcccacgggagctttcaaggaagtgaatcgtttcttacacagaggaccacatgaacctcgtgtttttgccatcgatggatcgaaggttcatgtcaatccttccttcatcggcgaaaacccgaacaaacgataagccagtaccgcgtccagcaaaaaaaactctcgtcatgctttcttcgatggttgatgtgaaaaccagagcatgtatgtgtggacttcgaactcacgagacactttaatgaaaggaaggcggccgtatcaatgctccgaagcgaaagaaaaggtgacacgctggtgtttgacagaggatattactccaaagacttggttcgcagcgttcacgactcataggcgttcggagtttggcggctgaagataagtgcattcaagggcacgaggtctttcttcaattcgtggaaaacagaagcaacatgtcttctgcttggcttcagggctagtctcatgaaatatttcatcaacggcaaaacgtatgtttgcctaacgaacgacccgtctttgtctcggagagacgtcaaggccatctatgcgtcgaggtggagagtcgaggagtctttcaaacggttgaaatcaaatctcaagcttgagaaagctcacgcaagaacacccgctctgtacatccaggaggtagaggctagagtcttgcttgacacgatcactttgaggttgcaaaaaaagataaaggagccatcgtatatttacacacttgacgcgtacgtcacaagtatcctgcgtaacgtgagaaagtttctagtcgcgcgaaatacaggtcagtcagcgcaccagcgccggaatcaagtaagtgtggtcggcatcatgtaaccggcaactaccaactacctccaaactcgtgttccacagagatgcatccccatcaacttcaccatcccacgggtcctctttgtgtgaccaatcacatgcgccggtgaacccaagccatgtgtgaatttacagtaaatagtggaagaaaaatgctcccccttcccgtcacaactcattgacctgcaacaaaacagcatagagtccgaagaaaacaacatcagctgcagcacacctccgaaacgaaaagcacacgattcggccacggagaatgctggtgatgacggtgataacaaagaagacgacgacaatgacgaaggctctacaagcgtcgcaacgaaagatgaactcaagcagtttgccgaagtgagagggatcaaagacgactcaatacgagtaaagagtgtcaccacgtccgttgatgcttgtgtacgagacgacgttgtcggcaaggacgttctgcttggacagatcgacaaagacgcgagatctctcggtattcttcgtcacctcgtctctgtatgtctaaactttcttgcagaagaggacccttcgaacccgctcatcgtcaaccggacgtttctacaactactattgtctcacatctctggaaatgaactacatagtcgtgcaaagatgctacaccatcctagcctggaggcctacttcgagaagcacaagttggacaaagagacgctgaaggaagtgcgatctttcccccttcgttccagggacgtactgtgcggagagatgctcacctcgatcaagaaacacattgctggaaacttcgaaaagagagcaaccgagcacttggcgtgtgagatcgagaaaagactctgggagtttctggacgacaagtacttttggaccaacgtttcaggggcggcgactcagctgtacagggctgctggacaaaagcaggaagaacgaactctgtcagaaatacacgtcttcgcatcaaaacaaagggggaaggacaagagaacgctacccagcgagtggaaaggtgtactcgaggacctcttgatcaatacaggactctctttgaaccccttcattcggcgtttcgaccacaaaaatcttcgagaagccctcgaagaagccgcgcaaaaaacgtccaaagaaaacccacgcaggaaacagcagtgccgaacaaggaaacgcgccaccaaagtcatccgccagaagaccgagtgtgaagaagccgaccgggcgggaggatttcttctacaatgtcaaggccaagctaaacactgttctacaaattgaagcgacgtttcgagaaaaaagctttcaacctgacgagaagaagaagcgagtactgggccgtgatttacgagaggcagccgactatcaacaagtctgacacgaaagaaggctatctgaaacagcgacacctcttgggggagctcccggtcccagtgtggttcggtgaaggcatcaacatgaccgacaaggtctcggctattctactgcgagatgtctccagcgcccggaaagatatgtggatcaccatgagagaaccaggcacggaaacccccccaaacctttttccctgatgccgcatttttctcttacgagagccttcgtcaaatacgacgaacgaagtctaggccctctccttcgaaaccttgatctcgccgtgggcaagaacgatgttaacttacgaacagaagaggtcaagaatgccggacgacaacaaaggctgtggtggacaggggccttcgactttcacaccgagagaatggtgcgcagaccacttgggacccggaagaaagctcaacgcggtaaggggaaaaaggtccttcgtcaagtgacccgcttccggaaggggattgggttgttcacgaaggatccgtgggttaccgacgacctcttgtatgaagcaaatataggggatcctacttgcgaagttccgtggctcgtcaactccatcaccactgacggtttgcaggataaggtgtgtctgacgacgctcgaaaagtccaatccgcttgcgaaaggtgtaaaagagctcgtgaaggaaggattcacgggtctttctccttctccgttcgccgtctccaagcattcgtcgggggtttttggaaaagcaaagaaactgacgaaagtcgccaagtccagtctctcatctgaagaaaatcacatcgaagtggtcggtgtcgatcccggacaagtttctatctacgcagcggttcgagcggacgtgaaagatcccgacgtcttcgatccagcttcgttcaagggatcgccatcgtcattgtcttctcgggagtacaaataccagtctcttgttcgattcagtgcaaagtccgagactagacgaagggagcaggacgtcgagcatggggaagctgtcaaagcttttgattccgtctctttgaaggatccgggttcttcttttgcctactctgccgtaacctactcaacgctgagagcaagagtagctgagcttctgtccgaagagcgtagacgcgaaaggttcgctaggcttcgtgcaagacaacgttcagtagatggtatggcgagagacatcgcgtttagtgacgcgtataagcaagagattgccgaacgtccaaacaagagggccggaaaatctctcttcagaggaagaaggaacttctgaagaagattagagcaaagaggagcgtggtatttttcggaacggccagttcggccatggttccagggggccttgtcccaggaaagcattgatcagagctttgggtgctgtgtccggtcgttctggtcgatgagtttcgcacatcaaagtgctgcttcggttgcgatactccacttaagcaagtggaagggtctcgggtgtttcgctgtgaaagccagacggacaagaacctttcttgctccgtgggcttcatcgacagggatgtcaatggttcggttaacattggagtgtggtatttcacagctcctaggatcagagagaccgacatatctttgtcgagagtctagcggagtcaaatgtgttcagacgcattttcagaattttctactaacttgacagtaatgaaaagtggtaggcctcgtttaggtcaaaagagtctatattcatttattatttttgccttccgacaattgcagatgtacctcagaaaactttcacttaatgtctcatactctacatgagtattaaaccaatgcgaagtacaacaacatatgtaggacttatttctactgtcatttacatcgtaaaagtatctcctcttcaacttgaaataaaaccaatgataatcctgatggtatcctatatgcgttcgtaagcttgctaaaatactactgcgttgatgtccgcttgtaaaagctgaaatccaacaaatgctttgatccatgctacatctccgtgttggaaaagccctttcatctccgttcatgataacatcttaccctattctacgcaaatctgtcacatctactctcaaacaagacgccaacttcaaacgaaaacgcgttctacgatgcgtctacactccatccccatatcattggcgttgactggtccgaggtcgatcttgttcgcctgttttcggcgtcttgacgcccgcgcaatgcgaacttgtacctctgcactcgccgagatatggccacctgtatagccaccgaaacggtagtctatattctcgaaagtaaccacttccggacatgtagagagatcgtaaccagttattgccgtacccgaacagatcgagtctaaggtggcatctaccacaccgagtacttccgacttcacaaacttgtaaacctccttgtttacgcaattctgaagacggctcttctccttgatgtagtagttcctcgccccatgcaaatccctttccacgtttcttacacaacaaccagaacacgagtaaacctcggatgatccgggatcgttgcggagaccacagaccccacaacactttgtggttccccactccgaccccccgatcaccgtcttccctagggtgttcgctctgtgcctgagcttctgccggaaaccaaagtgtctctggtagagcatcctctttctggtcttgacgccaaatacaaagcttacagttctcacagaaccccaaattttgtcacagaaacactagcatcctctacaagcctctcgggaaatatatcgcagtgagataaggtaggtccatgtcgaataggatagccccgttactctagaccgaccgccatcgccctgaacctgtatcaaccgtgcttccgctgcaaagtagtttcgaaaagccaacaaaaaactactcaggcgaaggccccaaagccaaagtggcgcatttttttttaacatactccttccatgaaagagtcaggcggttctcgacacagctcttgatcaagatgttacgagctccgttctcgtccctgtccatgactaccccgcacgactgacagctgaagaccttggaccttcccagggcgcgatgtagacgtccacaacacgaacaggtcttggacgtagactcctctgtgacgatgacaagcttcacaccttcgcggagcgctgtggtttttagcagctccttaaacttgtagtgagatcatgtcatcatcccccgtgccgtaccattaccaatgttccgcttcgccctgttgaccacgtctttcgtgttgaacttcgggaggaagacgacgtcgtagttcttgcaaaggtgcttcaccgtcttgttcctcacgtccgtcaccagatgtgttactctcttgattgcccggtgccatgctttgcgtagacgatacctcttcttgctgcccacggacttgtcgaaagctttggactgtagtaagtccatgtggtgacaaagaggatagatcctccccgcgtccccaggagcgaactcggtagcatttccctttgtgtccaccccggtgttgaacgtcctaactccgggatcaagcgcgatcactttcaagtcttcgtggtactcgacttgaggagggatgtcggactgctcggtgacgccatgaacttcctcacccctgggtctgttgagactttccggttgaccccctcatgtagggacgaccgtcgaccttttcaggaaagcaaaaatagtatctcccatacacgcgacaaatccttcctcttaggcttgagcctctcttccttcgtcgcttggttgttggtcttcttcttcttcttcttcttcttcttcttcttcttcttcttcttcttcttcttcttcttcttccactttttctggccaaaactcttgagcttctccatgtttgagtggtaagcctcgtatgcatcaacggcagcctggtgaccacacgtgatcggtcggttgttggtgtgccggcgcgatgcttggagctgggagacacgacggaggaagaggcgctcgagctgctgctgaagacgagcgggactgcgggacggcctggggacgctgtccggacacagatgaccaaggtgatgatatgcgttgaatctttcgtcgaggtgttgtatctctagcgcatgggttgagacttcctcccttgtttttgtgccacctgatgctgagtgtggcatcgattggcggcttggcctttgagtgtacacaggtggtcgaaacaagcatcaggtacataggtttgaaccgtgttgtagtttaccaccacctctcattcgcaattattccgtggatgtggtacgaagttcatcttcggtgatgaaacggccctgttgctagcgatattcccacgggggaggggtatagcgcctgatcgtgtgtcgacgttgttcctggatattgtctcacaccacatgacgatcatcctccttaaagttgatggggctagtagacacgaagtgccgttgttgcgtgctggttatttcgcattgtccgcgttttttgtcaactcaactcccaacaatcaccgatccaggttgttgagcgctgtggacgcctgccgctgatgctcgccatcgcgggttccatgtccgtcgttgaagggagaggcttgaccgccggcgcctgggaagagctgatcaagctcttcgagaacacggcgacgatgatgtgggagtcgggactagaggcgacatcgctggatatggtccttggggccagcttcagtgctttggcagccaagaagcggaaggagtttctcaagatggctgtgttggcgccgggtgctgttgcgccgatcgcgatgctgcgaaacctgtgggagaccgaggtgcgttgcggcgtcatccttacctgggtgttttgtttgcagatgaatgcctattggaggatagacgcgttgtgtggattgcgtgaaaggttggacaagcgctactcctctgcgcttctttgtgtcctgtgggctgacgtcgatcatgtcctccatgttgtttaattcgcaggacaacaagggtgcgcgagaggaagctgacggtttaacgagcaagagcctgctgcaagatgtgggtggtggtggtgggtatcgcgtacatgacctcgttctggacttcgtgaagatcaaggtcaaggcagacgtggagatggtacgattggttaccgcgcttcaggcgcattttcttggaagactggatgtgctgaggggttttgataatccagagcatggtcctggcaaccaaggcttgttcgttttggatgccctctggcgctcggtggaatagctctcgggaaactccaaactggaggtcgcctcgtatggcaccagccttggggagttggagtcgtgcgaggcaactacggatgtggctggttcctactcgtctgtcggttttttgttcattcaggtacggcacatatttttattgaggattctgcactgctgttccgcattcgttgtgcttacaatggtgtgatggcgcagtacccgtgcgggtttctactcactcggcctggtaaacaattggattttcgaggcgttccatgacacactcgttcgcagctctggatagggaatctgttcgcgagggctttcatctcggtgaggggacttgcgtacacctggcaaagaatgagcgcattcagtaaacgggctttctctaggtagcaggtggctgtcgttggtcccaggagctctggtaagaaagtgtctacgtatggtcttgtttgttttttgtgcattctgcgtgaaccactgccgtataacgacgcactgatgttcgcatagggcaagttcatcgagggcgaaccattctatgagagagcacaggctacacaaaagcagatcttgggtccggagcattcggatgtggctacgtcgctcaacaaccgggggttgttgagaactttttctccacaatcccatttacgactttcacactgaaatacgactccaccacgctgtcttcactgcatccagggcaaatactcggaagctgagccgctgcatgagcggtcacaggccatcagagagaaggtgctgggcccagagcaccctgatgtggccgcatcgctcaacaaccgggcggggttgttgagaaaatgtttctccacaatcccatttacgattttcacgctgaaacacgactcatcacgctatcctcactgcatccagggcaaatactcggaagctgagccactctatgaccggtgtcaggcgatgaaggggaaggctctaggccctgagcacccaagtctagccgcaacgctcaacaaccgggcggagttgttaagagcgcaggtgagagccatcagaaaatgccaagaagtttcttgtggtacctgatagatttcggcagtgctccacaacagggcggggttgttgagcaattgttagcccgttgtcaatccccgctagcattgaccacacttctgacgtgcttgcccttcacgtctcagggtaagttcgccgaggccgagcctctgtacaggcgggcgaccgagactttggagacagcgttaggtcctgagcacccgaacatggcagcagcgctcaacaaccgggcggggttgtcgacagatattccccccgccattactattttgttttgtctttgaccacactcgcatgacggtttctcacgtggcgtttgctttccgcttccaggggaagtatgctgaggcagaccctctgtttcttcgagctattgagatcggagagaaaacgctgggccccgaccacccagatcttgccacaaggctcaacaaccgggcggagttgttgagagcgcaggtgagagccatcagaaatttccaggaattttcttgtggtacccgatggatttcggcagtgttcaacaacagggggagggggcgaccgaggttttggagacagcgttgggtgctgaccacccgaacgtggccacagcgctcaagaaccgggcggggttgttgaagcgccaggtgagagccgtgagaattttccaagattttccgtagggttcacacttgatttgagagtttggttctctctcgcccagtcgcttacaccgccccactgcttcgtacacagggcaagcacgacgaagccgaccctctctatctgcgagctattgagattggggagaagacgctaggccctgaacacccagccagcccttgccacccgactcaacaaccgggcgtggttgttaagcatttgttccgccgcaatgtttttttcaaacttgagcacgcccccaccttgctgttccctcgcgttgtagggcaagtacagcgaggcggaaccgttgtatgttagggctatcgcaatcggagagaaagccctgggtccggagcatccagatcttgccgtgtggctcaacaacagggcggggttgttgcagagccaggtgagagccaaacgatccctctagatggttctagaaaataatgttcgtccgcacttccacatccgaccctccactaagcgacacggcagcgacacggacatcccggcgctccgcgggcccgagggaagctcgcccgctttggcgagccggcggagctcaccagccgccgactcagggagaaccctcgccggaacacgaggtacgagtcgtcgccgtctccaacgagtgccgaaggcctgctcgcccgccatgcgtcggcggcggggctgcccatcctgcccatcaacagcacggaggagcacacccgctggatgctcgcgtgtgtggtcgacgtggtgaaaaagctagaggcgagggcagtgcaagcgctgctgtgcgagcgcgcggagaaggccaacatcgcgcgccaagagnccgcatcccccgaacgtggactacttccactcatcctccccttgcccatcatccgcatccaataaactgatgctcgcggtagccaacgagaaatcgctgaaactcaaccactgggatgtcaagcaggcgtttacacacgctaagttggacgaggatgtgtttctgaggctccccgcggggtgcggggaaaaatcccacaaagttgtgaaggctgagcgtgctatttacggcttgaagcagagcggcaggcagtgggggtaccacgctgccgatactcttgtagaaaacgggttcgagcagtgcaaggctgacccgtgcgtcttccgcaagatgaaagacgatgtcgtggtgatgattatcgtgatttatgtggatgaccttttggttgctgggtctgatgatgattgcaaggagttgcttgattccctcgacaaggcattccccaccaaagaccttggagagtgcgtgtggttcgacgggtgtgccgtcgagagagacctagaggctgggacccttagaatctcccaaaccgcgtacattgacagcatcgtgaatcgctttgatgtgcagtcgacctcctccatccctgcttcccctggtgtcganggccggtgagggaggccatcggcagcatgatgtgggtgtcgacgttctcgcgcccggacatctcgttcgccgtgcgtgcggtagcgcgccacgcccatgcccctgccgagaggcactggaaggccatcgtaaagatcctcgcctacctcaaagagacgagggacctcgggatcacctacaaacggggatcggggttggggctggcggtgtacgtggacgctagctacgccgacgctgaggataggcgttcggtgtcagggctggcaacaacnnnnnnnnnnnnnnnnnnnnnnnnnnnnnnnnnnnnnnnnnnnnnnnnnnnnnnnnnnnnnnnnnnnnnnnnnnnnnnnnnnnnnnnnnnnnnnnnnnnnnnnnnnnnnnnnnnnnnnnnnnnnnnnnnnnnnnnnnnnnnnnnnnnnnnnnnnnnnnnnnngtaccaccggcgcaagttgatgaatttgccggagtagctagcagtttttagcacttgggagcggccatgtttaccatgcgggcaaatcgcattactgtcgcggtctgtgtacccatggcaggggtagggggcgttgggaggccatcnnnnnnnnnnnnnnnnnnnnnnnnnnnnnnnnnnnnnnnnnnnnnnnnnnnnnnnnnnnnnnnnnnnnnnnnnnnnnnnnnnnnnnnnnnnnnnnnnnnnnnnnnnnnnnnnnnnnnnnnnnnnnnnnnnnnnnnnnnnnnnnnnnnnnnnnnnnnnnnnnnnnnnnnnnnnnnnnnnnnnnnnnnnnnnnnnnnnnnnnnnnnnnnnnnnnnnnnnnnnnnnnnnnnnnnnnnnnnnnnnnnnnnnnnnnnnnnnnnnnnnnnnnnnnnnnnnnnnnnnnnnnnnnnnnnnnnnnnnnnnnnnnnnnnnnnnnnnnnnnnnnnnnnnnnnnnnnnnnnnnnnnnnnnnnnnnnnnnnnnnnnnnnnnnnnnnnnnnnnnnnnnnnnnnnnnnnnnnnnnnnnnnnnnnnnnnnnnnnnnnnnnnnnnnnnnnnnnnnnnnnnnnnnnnnnnnnnnnnnnnnnnnnnnnnnnnnnnnnnnnnnnnnnnnnnnnnnnnnnnnnnnnnnnnnnnnnnnnnnnnnnnnnnnnnnnnnnnnnnnnnnnnnnnnnnnnnnnnnnnnnnnnnnnnnnnnnnnnnnnnnnnnnnnnnnnnnnnnnnnnnnnnnnnnnnnnnnnnnnnnnnnnnnnnnnnnnnnnnnnnnnnnnnnnnnnnnnnnnnnnnnnnnnnnnnnnnnnnnnnnnnnnnnnnnnnnnnnnnnnnnnnnnnnnnnnnnnnnnnnnnnnnnnnnnnnnnnnnnnnnnnnnnnnnnnnnnnnnnnnnnnnnnnnnnnnnnnnnnnnnnnnnnnnnnnnnnnnnnnnnnnnnnnnnnnnnnnnnnnnnnnnnnnnnnnnnnnnnnnnnnnnnnnnnnnnnnnnnnnnnnnnnnnnnnnnnnnnnnnnnnnnnnnnnnnnnnnnnnnnnnnnnnnnnnnnnnnnnnnnnnnnnnnnnnnnnnnnnnnnnnnnnnnnnnnnnnnnnnnnnnnnnnnnnnnnnnnnnnnnnnnnnnnnnnnnnnnnnnnnnnnnnnnnnnnnnnnnnnnnnnnnnnnnnnnnnnnnnnnnnnnnnnnnnnnnnnnnnnnnnnnnnnnnnnnnnnnnnnnnnnnnnnnnnnnnnnnnnnnnnnnnnnnnnnnnnnnnnnnnnnnnnnnnnnnnnnnnnnnnnnnnnnnnnnnnnnnnnnnnnnnnnnnnnnnnnnnnnnnnnnnnnnnnnnnnnnnnnnnnnnnnnnnnnnnnnnnnnnnnnnnnnnnnnnnnnnnnnnnnnnnnnnnnnnnnnnnnnnnnnnnnnnnnnnnnnnnnnnnnnnnnnnnnnnnnnnnnnnnnnnnnnnnnnnnnnnnnnnnnnnnnnnnnnnnnnnnnnnnnnnnnnnnnnnnnnnnnnnnnnnnnnnnnnnnnnnnnnnnnnnnnnnnnnnnnnnnnnnnnnnnnnnnnnnnnnnnnnnnnnnnnnnnnnnnnnnnnnnnnnnnnnnnnnnnnnnnnnnnnnnnnnnnnnnnnnnnnnnnnnnnnnnnnnnnnnnnnnnnnnnnnnnnnnnnnnnnnnnnnnnnnnnnnnnnnnnnnnnnnnnnnnnnnnnnnnnnnnnnnnnnnnnnnnnnnnnnnnnnnnnnnnnnnnnnnnnnnnnnnnnnnnnnnnnnnnnnnnnnnnnnnnnnnnnnnggcgctacttttcattccccagagagcaaaatgtgccaggcaacgaccgcacgctccggtacactttgacaaaatcaaaacaaaccaagcctggtgtcgacgctcttgatcacatgctgaacgaaaatccaggcaccggcgccaaccaagagctagacgttgctcacaaagtccttcgagagaatttcaatggaaggagacacgatttccacgtcggcgcaatacttgtagatctctgtctggcgttctgtgtatgcgtttcggcatgggaaagcctaggctgatgggtgatttgatcgtggaggccctccgagaaattgaccggtacaacggacttaacgtccatcagggtaataactacgagggatcgcacatgtcgagactctggaattggatgataacaatgagtgatcacgcgacaacaatggctcttcctttgttgaacgagaactcagtcaacaccgtggagatggtgaacagaggctacaactcagggaacaagcaagaaaaaaaatagataatttcgcaccactcctaggaccgcccgaaaacacggtgcatcaagtcgcaagaagagtgaggctccgaaacaatcaaatgcaatacttggaaacaccccccgagatatacaccgggcatgtcgtcgcccccggcgtggtcgctgagc

SEQ ID NO: 211 - DNA, 21188 bp, unidentified; identical to SEQ ID NO: 210
  misc_feature 1..21188: note = Fanzor polypeptide
  variation 41: note = n is any nucleotide
  variation 2498..2729: note = n is any nucleotide
  variation 17704: note = n is any nucleotide
  variation 18310: note = n is any nucleotide
  variation 18582..18743: note = n is any nucleotide
  variation 18890..20521: note = n is any nucleotide
  source 1..21188: mol_type = other DNA

SEQ ID NO: 212 - DNA, 22091 bp, unidentified
  source 1..22091: mol_type = other DNA
cagccctagagcactggcaaggaacagcgtatggattggcggctattctggccataacgccatgcctcggatttgctttcaaggtcaacgtgctgaggctatgtctttgatattctgtccatttcttcgacttgtaaagactgcaccaccatctgcagggcttgttagctaaactttctagtccgcaggcaatttctatgaagccagcagagttcagcataggactggctttgttttgcgtcataggactggctttgttttgcgtcatgccaaccacacttgcggcagaaggatgtcggtccgaatgcatgcaagatgtctctcaaccctgtcacaatattcaataattcgcaattgcgaactcttgcatgtgcagatgagagcaactttcactgaactccatccaagatcgtcctcaatatttttcttcttgacagctggtttggccaacattggtggtggatggctgaaggcatattcatcactacgaaaaactcaacatgaatataattcactccacttcagccacaatcctagaggccacagccaaccctatatctttacaggcacacccttgctccagtcttccttacacctacaacctagctgagctgtatcacagtaccacatgtacgacccaaaaacccacagtctctcagaaaataaaattcaactcgatcagaatgattcaaacctcactttgcactgcagcacttttttgcggagctgcagcagcttttctctgtcagttgggagaccacgtccttggtgcactcatatgactctggaacagcagaacttgcgcctgaaagaacgctattcttggcgctgcagcaacttttcttcggcagtggtgtgaccaactcagcggcgcattccgttttacatggagtttcgcgacttgcacacgatgggatgtcatggctcgggcagcatgatcgcttggtgacctctggcgggtcacagcagccctgccgtcctccctgctgtgaacagcaggcggggggatcctcagttccagtcgccgaggagcgcgtgcctgcctgcttgagacaggcggtgtcgctccgcgcaagcctccagccccaaatggaccctgtgtcaatgctccagcgcaggcagcgcataccgttcaggcagacagcacatgccgtccccacgtccaccaacaccgcgccccagagggtgaacaacccaagcgctgccaaaaccaggacggccacctgcgtcagcatctcgattcactattgcctcctatcaccaacaaaatcgcgccccagagggtggacggctcaagcactaccacaatcgcagcctgtgacagtccattctaaggatccacttctcctgccaacaccaccgcgccacacaaatcaaacagcctatcactgccagcagcaggacaggaacctgccttgcgaataccatttgttttttactccttccaccgtaccgtatcgacgcatatcatcagccctaaaacgacttctgccaatttggccggacaaactgcgtcaaaaatccataatatgcccttggcttgcagtgcaactgccattaccttggtgacaatgcagaccgcgatgttgaacatgatgatgctccgcaccgtgcagccgaggcggatgatgggtgcaaggcatctcaggtcgttggtgaacagtgtgatatctccagcttccacagcaattgctgcccctgcattgttttgcgaggacttcaattgtgttgcaggtgatgcagttcaaaatttgttggcagataaaaaaaccactggtgcagttcgctcagacgcgcttgccattcagaactccaaaggaggcgttcccaggggttgttcgagacgttcctcaacaagggttttgtgcaggaggccctctgctgtgctgttctgctggcgtatcattgacaacatgtttctggttcgatgcacacagctcctgctcttctgtgacactacacatcacttgtgtctctccacacatagttatgcgttttggcgtaaatatgccatcagctctatcgcgcatcctttgcgtggcatgaaagtctttttctgcgacacagaaatccagcgtcagcctacctgatgtgcccatggagatgcccacggaggctgcagccaaggctggggcatcgttgactccgtctccagtgtgcaggactttgccttgggtctggagctcctcaatctgcgtgcagagtgcgataatttccttgccagacttcattatgggatttcgatggaaggctggcatttgcaactgtctccttgcttcatatggcaaaatactaaaatcgattgtggttcttgagaggaccatccttcagaagacgatcagattgaagtcccttgatgatatccaaagcacgccaggaagacaacttcttaccgtcattgtgagtacttcttgacccctgtccccaaattcaggggaaaatatcgtggattactggcaaaaggttgtcctcacatgggacttacccgaattgagtagggaatgtgattggttggtaaatttgttgtgctcacagtgtcaacttccggctgcaagcccttaccagattcagcttgccttcagggagcagcgctgcatgcacatcatcgggttccatgccaattgctaccgcaactgcataggctggccctggcgcatctccagtcaccatctttgtcccaattcccagtttctgcatacatgaaaaaaatctctcttgctgcaagccggctattgtcctggttaaatgatctaaatgatccaagtggagagcaggcagcttgaatgcattactggcagagcttgtctcaattttaaatctgcacagcgccaagaggttcttgccacaaggccctcggtgaactacctataccaggggtgagcaataatccacgtgcattactgccaggagaggtcatggcagtgctgttatatttgatcagacgtcaagatctcctatgcagcatgcaagccaacgcctcaacttaacaatgcttgacgactgaaaagagtctccacaccccccacaaaggtcttgcatccaaacagatcactcgcagcctcagcgtcatgcaagcaaacgcttttaatttgccgacgcctgaagcacaaaataaggcctcgcaaggtgcacccaaaaagattcacctgcaatctttgaatcgcttcagctgcctcgggtcgcactgcatctgccagtgcaagagcgccaacaagaaggccatcacgcgcaacaaagcagatggtcgcacctggcagtatcattgttcttttgcacatgttaaatttatacaagaacaataacactgaatgctccagtcagacatcccatacgaagcatctttggggggaagaattgctctacaactgcacagttgtgcatgcttctgggactgctcatacacttattggcttatctagaaaggacatcttgccatttgactgaaaagcctatgttcctgttcttgactgccccgctgagagatttgcgtttagtggagcatcaaataccagctcgacagccccgctgaggttaaattgcttgtagttaagaaatagccaagacaacaagattcatacatgaatgacatattgcatggaatgaaccacatactgctgagagacttgcagcggacgtgcagtgaagttgtaacaggtgggctgagattggaggtcatattttcccgtgccccgtcaatgattcagattcaggaatcagtaatgttgttagtgaacaaacttgcttgggttaggcagcaagggctgaccttcttccccccagctcgcttcaacgctgtcgatcacattgctctccatgattactcccttttgcacaaggagcgctttgctgccaagcaatacttgcatgccctgtatgtaacccatcacacctaaacctgcaaatggcagagaaattgaggggaacaccttcgccatctaaacaatgcagcttcgcaactccaggaacaatcatgatacgcatacgctttgcaggtgtccactcacacacaaatacgtcgctgtggcgagggacgcagcagtctaaagtattaacgccctcaattgaccatctctagaaaagacttcctccctgtcacagtaaaggctcctccacagttgaccggctgcctgggtcaccgtactcaaaaatttcctaggctgttctctaccctgcaagagacccataggggttagggtttagggcagatcatcacaccggccacgcaggggtacccctttcgggtgtcaatttgtttccatcaggctgagagaaagcaccgggcagattctcaaaagctgtgacgtcaaggttgattggggagccagcgacagcagcacaggcgacaatgcaggaggcaattggatgcgttgacaggcgttctaggctgcctgcccatgccagcagatctgcttcagatgtactaattgctttctttgcaatcacctgcaagcaatgtggtgtctctgtgagtcgtgactgactgatgataggaagtgtctgtattaaaaatctgacacgtgatggggcgtgttatgtcatgtcctgtcctgagtgtcaggacacccaaaccaaagactggtgtgtccattgtgtgaaggcatatatgacctatgagacagatcaatgtcaggtgcggcagggcaagacagaaatggagatgcgagatcatggaacatgctcatgggagaagcagaaagagcttgctggcaagcgagtcactatggccagcagggagtgcagaacgttcacaagtcaggatggaaagcccagtgcgcacctggaagcgaccttttgtgagggtcccggtcttgtcaagtgtcactatcttgatcttcgccagcgcttccaagtgcgagccaccctgaaggcatgggaggtgatcatcctttatgtactgctctcatgattggtggcatgtttgatatgcagcatcttgtcaagactcctggcagcaatgacacacattttgtgtcaataattaaaagtatgccaaacagtgagctatgcagtcagtgagaatgatgccatgaagggaaggattgccagacaagacaagccaagccacctttatgagcacgccctggcgggcagatgcagctagtccggcaaccacagtgacgggggtggacaacaccagggcacatgggcaagccgtgaccaggatctggagggagaggtagacccaacgagacttgtccctcgctccagctgcaattggaatcagagctatccccaggcatgcagcaatgatgatgggcgtgaaccaggtggcaaagcgggtgatgatggactccactctggattgctttgatacagcctgcaggaaaacaatgttgtttttgtaaatctaggcctcgtcgtctatcaacttgactcatcttgagtctacttgattcatcaagtatattgcaccaatgatgatcaaaccaaaaactatgacagccaaaacaaaaattccaacaatgattgaaaggctgatcaatattgaaatccagagttcagtttgacacatataattgatttgccgctgatggctaaatgggtgtggatctcctaataacaacttaatattggatcgtgattcctacctgctcaacgagctctgccatgcgggccactgcgctctcaccagcagtggcagtggtctcatatgtcagggcgccagaaccacaattcaaggttccacccagcagctgcgcaccaaattataaagggattgaagggtccgtatcgacagacagcattgagcaagatgaagatcaggcgcgttggtattcgtggcctctagacctgctgaggaagcctgtgaacattgcaattacaagtacagatgtgcaccacttagctataagagatgttcagaagggtgtaatatatgacaccggcattgatgactgaaaggctgctgacctgatcactggcggatctcttgactggtttcgactcgccggtcagaaggctttggtcgacatctgatgatccagtgacaacagttccatcaatggcaatccgttcccctggccggacaagcaacaaagtcgatacagccacagtgtctgcaggcacaagggtacctgcaccacagcaaccagatgtaatgagatagggtgttctcgatagacatcgttggagctacttttcacaatatggtaaaggccaaagataatgatgtcacgacgcaggaccgggattgtcatgtacttgtctcagacttgcagtgtttattccagagaaaacaacaagattacctgcggggagagctgcagcaagattaggatttgctgcaaaaggtgttacctgaattggcgaggacagcaacttccggcttcaaagccagtacggccgcaattgcatttcgggctgatgaagtgcaggaagattccaaccaatcggcaagcgaaaagaggacaaccacagctgctgcttccgtcacatcctgcatgtcatgtcccatttggtccctgaagaaagcctcaatctgggcaaatttcctgtattctccgcaaaactgctccagaagcagaaatgatcactctggtggtcgtcagcaggggcatatacataaacggggaagcctcggcaagacagctcctcacaaagaatatgtggaactttctatatcagctcactacaaatggggcagacctgaagtgccagagcgcctcccactgctacagtcatcagaaagttgatatccaggcgctgcaatgctaacatgtcaggtcaggccaggttgggggaacatttacatgttgtgctaagcaaagaacaggacaatgcagggactaggtgatacttttggaccatcacgtgtctgaatttaaacctgggaacgcaaattgactcacctttctcctcaaagatgccagtgccttcaatagtattctggggatggctatcacgatgctccccattgcaatccactgttacaaacagcccagctggtcacatccaaacccaaatccgcaaaggttatagtttaaagaacttatcagactttggactggccagagtgaaatggaaactgcacaccttcatgtactctagcttctggttgccaattctgctggccaggtagtggaagagggagaccacaagcaagaacgctgcaagaaggactgcacagggagagagctcatcacacctccaagaatacaatctggcccaccttggaaaacttctgagcaacaatccagttaacaagattgcgtgtggactcaagtggtgctgctggcatacctaatgctactgcatcgcttggggagttgaggtctccaatgcaaatatgcgcagtggcatgggtttgcaaggaagagatcttactgttatctcctctgcatgcaagaagctcaccattccagctgggaaggtactgatagcgcaactttccctgctgccttggcgcttcacaagaagcgtccagatgggcatggttcagacaggccgtgagtgtttgtggcaggacagccgctgtgtgcttgatcacagcagacctcgtgaccactgacacatcgacctgcacagtggaaaagcagtcatttgatgtacgacacgagccagaacaggaaaatgggggatttcggagcaacatgagcactgtggcacatcagatgttcaacggagttcaaaacaggagaatgtggcattttctgacctgcagaactcctgggaagttgtccaacaaatcgtgaatgatggtcgcctcgcttgagcaacacatcccctcaatgtacagcttggtagagattacggcaccctcgggtctgccatgctctcccgcgcagtcctcaagggactccgatgtgaggatatcacagaggtcggctgtctggacatcttcccttgtcctcctggcacagattgagcagcaaagtttgcatgggtgaagcagcaatcatccaggcagacactgcttaggcaacagcaattcaagcatgagcatggtggcacaggtgccggaggggtgaatgaatcgtggaaggggaaagatctgctgggcactgaggtcagcaaggacaagctcttaggtgcaaacctgttccgaagcaccgaagcatctccatgatcgaagatgaatcctccctttgtcagaggtatgcactccttgtcgcagcacttctctgagatgtggtacaacttgctgtttacctgtcaccgggcaagctctggtaccaagccatggggcagataagggtccaatgcagagacagtacatgcaaagaaccagcaggtgcaagatctgtggcaacgaaacatgtgttgctcaccaggtagtcccagtggtcaccatgtcggaccagagggtactgtgatatctgagaatcaaacagctccccagcgtaatcctcaagatcaggagttgtgtcgtgagagataaagtatccgttctttacggacacgaagtaccgccccgccaccacgcagcctgcagaaaggcagaatcaggttgttaaatgttttcactgatggcagcagaaggcttgggtccaattcggaggtcggttggggccaccaccttgcaagctggacgcgagcatgatcagttgtttgtaagaagcaaagacagcaacgctgctgctggcgaggctttttacaacccttccgactcagaatgttgcaccatgagatgtcgcctaagctcttgcaactcttttccgttggcaaacatcatcatctaggcttgtgactacactgtctaggctgaactgtatatacagacaaatacagtatacttcagcctttggcgttattcaatacacttcgctctgtatttttccaggtatctgatgcgtactcctcctgaccctaaccctagctgatgcaatgggaccccccacgccgcccttaccctcccacttacccctctattttgacctcgtcactgcatttggcgtcagctccagccaaccagtagcttatacgagacgacagtgtattcaatactttacatgacagtacagtgtattttatagcaaaaagtcttagtatggtcacaaccctacaaacttggcggatccgtggtggtattctccgtcgcaaacccttcggagaacattctcgacattttctggttcgctttgatccatgcggccccaggctcaacgagacctcatgttcagtttgctcgataggggcagaagtaaatccgagattgccgatatccttcaaatttcgcggatgacattgcatcgctggcagaaggcaggacgcggacgaatacccaaaagggggcccagattggggaaaagaagattgaatgtgcttcaagagcaagctgtggtttgccgagtgaaacaggcatctacatccacgttgggcagtctatgcagattctcatactatgtgttgggggtgaagatagccgtctccaccgctggtctgattttgaaacgggcgaattacacgcacaagaaagctgtcaagcgaaacacggaatacgacgtagagaaaggcatgtactttctcaacgagcttcgttctatgttcagtattcggcttgcgtctatcgatgaagcctcgttccatttgaacagtgcaccgcggtatgcgtgggctcctaagggtcatcgtgctatcatcacaaggcctatggtgcgcggtcagaggttcagtctcctgctgtgtgtcagcccgacaggagttctggggtacacgttggtgccgggcagcgtcaacagtgtcgttttcacccagttcgttcagaccttgccgcgcgatctgaccctgttattggacaatgtcagcacacacaaggccatgaagtcgttgacgaagaaaggtcaccccaccgtcagggagtccgccgattcccgcgatatcgctttgaagtataccgtaccgtacgctccgcatttgaacccggtcgagttttgcttcaacaccgtccgcaatttcataaaccgtcgtcagcccagaaacgaagaggcgctgaggacagtcgtcgctgaggcattggcatcactgagggcgccttcgttggatgcattgtttaggagagtgatctggggtgatccttgagtgcacagtattcagatccgtcaaaaacacaagtgcgtttaaatctcagaatttcgttatacagcaattgtatgtcatgctatgcaccctcaaccatcccgcgaagccacctgcgaggatcaagcagacacctgaagaagtgatcgaggatagatgtctcgccggcgccaggatacttttcggtggaccgatgagattggaggcggtgaacaggaacgagcagaaaaaggttatggatatcacggtcgtcaagaccacctggaacagattctgtagagacgagggccgtgcactggcggtggagtccgtgttgaaagacatgaacaggaccgtctgtgaggcctatcttctggcaaacttgcacgtcattcgaatctgcaaagccaacaaacctctgccggcgatcgaccaatccttcttctacaactgtctgaaaggcgtgagcgtggggaacaggcagaaatctgatatcaaagaccccgacctgaaagacacggcggacttgtatgcttcgctgaggccagccggataccaagcgccgagatctgatcacttggccgccggcttgcatcagaacgccagccaacagatggccatcaatgccaagaactatatcagcatgacgttctacaagaggctcaccaggtatttgaggcacagataccagttggacggccgggaagcatacaaaaagatagacgacatatatgccctacaatacgacggggacgacgccatcgtcaaaaagtacaggaccaagatccctcgcagacctacagtagggaatctggaagggacaccggagctgtacctgccgatgctgtttgagatcctgaagtactgcgaaaaacataatcctttcgagaatggagatgggcaatatgacagcagggtcaagcaagttcgattgtttactcttcttcccaccaagcagggtttcgaatgcagcaacgtcaagatctgtggcactggactcttcaacattctgaagagacaaggcttggaatggacagaggacgaatttgacgatgcaaaggaggagtggtggagagctctcttccgtatcagtgattttgagacaaggaacaggaagttcgcgaacgagatcctgactgacggtgtgagtgtgagcatagtcatgagacgtctgaaacccgaagaccaagtccaaagagaagccgagatagctcggaaacgaaaggaagacagagagaatccggtgaagaagaaacgaggcaggaagaaggatcagcccaccaagaaacgagatcacgaccacgacatagatctggactcgtacgagcaggtcctcggtctggatccgggaaggagcttcatgttcgtaacggccgacggccaggggaagcatatgcaatgctccacaaaagagttctatcacgacgccaagtacacagagggcaacagaaaggtcaggaagtggatagacagggacagcagagtatcggatgccatatgcaatatgccttctcccaaaacagcagaacaggcgaaactacaggcttacatcgaataccttctgcctcgcctggacaacctgttgacattcttccagcagaagaaatttcgctcccagaaattcaaaaggtacatctacagcaaacggaaattgcgggagctggggctgaaattgactgctggtaagaagacgctcgtgggttttggtgactggagtaacaacgatacagctggtgtgatcaagagatgtccggctgggccagtgaagaggtttgagaaggagctcaagaaattctgcagggtgatacccatagacgaatactgcacgagcaagaagtgtaacagatgcagaagtgaacaatataacgagaagaagatcgtgaatggaaaggatggcagaacgtatcaagtcaaagttcacagtgtgctccattgtcacaacaatggctgtaaaggcatgacggtgaacagggacgagaacgcatccaagaacattcgcgacctcttggtgatcgcagctcgcaaagagtcgaggcctgcatgcttctgccgatcggcgagaagcaacgatccaataataacagttcccgtgtgcgcctgagtctcgacgagggtgtaggatgggaagtggttctacttcgccaaacgatgtttggtgcttcgtgaagtaggaaagggcgagcagggtggtaggaagaccgccacgtccttcccatattacaatcgccgtttcgcctcagaatagggttttgccatttacgaagaatggtttcgcccggtgtaacattctgagtcggaagggccgtaaacacgtatggtatagcggttaaaacaagtcgttgccaacgactagacccgagttcgactctcggtacgtgtatgtttgtttttcagcatctcgactccttggtaaaccctcattgacatccctgcttggtgtcgccttttcctctcgacatatttctgtgctctccgcgcaccagatgctcacaggattgtatcgagagcagaaagggaggcagtctcagcggcatgccatgcgcagtcagtgtagcgcaggatgcttcttctcatgtccattgtcagactatggaacactagtatggtgcgtgttcctcgactgaagagctgcatcatcggcttgatttctcggggggacaggagaaagccatttcaaatttgctccctgggattctcgagcaaggcgcggctctgaggtattgctgccaaggctgctcatcagcaacttggaagagagtcatatccgtatgtaatagagttgagacaatttctgacaggacagaagagtgaaggccaggaggcaggaaaacttctgtgtcagaggcactgcagattgtcctgcgcagaggaggcgctcaaacgcagataggctgttgtaggccattttgccataggatccgagactgctctagcatgctctctatgggaaattccagacctccctgaaatagtggtgacaggcatgctcgcaatctgtagccctggggtcctggatcgactttttcaggcgcagtatactgcatggaggaagggtcttgctcgatgcttgtgggccggggagcgccgctggatcttatgctgctctcgcttgtcttgaaaggaaagtcaagagcctcctggagcagcagcatcaggaacaggcatgatacaaagctgctgagccttccttttggattatgcaggcaagaatggcgagatgagggatttgcacaatcaaggcatagggtgcgttaaaatccggcagcactctggcagctctggcttgctttgaaaggtgatctgagagccttgtgattaggaggagaagggtgcgaatggctggtggcaagattacattttcttgactgggggatcatgtaagacgtttctgtgccagtatagggagctggcggaccgctgggtctggctggataggcaaattgggttgttgacctcattgaggcagatcctctgctttagaaaggggaatggaggtatggttgcgtcagggcagaggatgagcttaatggcaagagcatctgagatgctcgagtgccaccagaggaagctggcaatttgctcgagatcaccaatcttgcagaccatgcctcgaggattgcgggaggaccagagaagattgcaagaggccggggctgagcaaagagaccgagagctatgcaaggtgagcatgcaagactcttctgcgaagccgtacaaaggtggcgcaccgcttggggtagccagatctgcagttagggacgctgatattagatctctgtcccttgggaggggggaaaggagagctttcgtgcgccacaccaacggacggcattttggattggatggtcagtcagaggtctttacaatcgcattactgagatcaagctttattgcattcttgaaagttgagctcaaatgggtttcatgccttagggtggggagaggggaatctgcctcagggtcttggactgatgttttgacctaaggatcattcataggtctttatattcctcctacaattctgacgcaccctccaatcagccagatttgcagtctgggatgacaagctcagcagggcttttgcccagagggaaagggagaggggatttgctgcgccaggggtcaggactgagattgtagatctgggatcatctagttgccttaatgatccttcactgatgctggcacagcactgtcacttcctgaattcgcagtctgggaggccgagctcgctggggttcatgccgagggggatggggcttgggggtttctgcgccaggggtcaggactgtgaatcttgagcaggggatcattccaaggtctttgtgatactcctacgatgccggcacatcgcttcgacttgccaattttacagtttgagatgatcagctcactgacagttctgcctggggggagaggaaggagcattttctgtgttgggagtcaggactaaatcttttgaccaggggaacatttagagttccttctgattcctctacagttctggcgcaagccttaaacctgtgggagctgcattcttgaatgtcgagatcggcagccctcctgccttggagggggggaagggacagtttctgcgccacagatctgcactcatgttctgacctgagaaccatccaggagtccttctggtccctcaatggtgttggtgcatccctaagatcagcgtggactgcattcctgagagtcaagatcagcaggccttctgctcccgggggcgggagtttctgcgccagggttgggggccctgaattttggcaagataaccatgtgagacacttccgtgtcaatacaggaagccggcgcatcgcttttacctgaaagatgtgctttccagaaagtccagatcagcagctctcctccctaggagggggggagcagggattctctgcgtcaggagtctgcgctgatatatttgccccagggatcttgtaagcagcctctttgacactgcaggaagctggcgtagcgcttgagatgaccagtcgtgcgggcccaaacctgaagaatcactggagtagaggatctgagggtgcaagcagctggagcctgaaaagaggattggggacagatttcttgacgtggtgagcatgcaagactgttgttggaggacataccgtcctggcgcatcgttagagctcaagcagatctgcagtctgagatgatctgctcactgaggcttctgcctagggatggggggaggggcgttttctgcgctggtgatcagtactgaagttttcgaccaggggagaatttagagatctttgtgatgtttccacggtgttggcgcatcgcctaagtcacccagatttgctgtttgagataatcagcccactggggtatctgccctgggggggcggggggggtgcatttcctgcaccgcaggtcaggactgagatttgagacagggaagcctgtaagacgcttctgtgccattccaggaagctggcgcggcgcttgagatggccgtacttgcagaatgagcctcaagggtcgccggtagacaagggaggaggggtgcaagcaactgacgcttggggcaaagggacttggagctttgcaaggtgagcatccaagactcatgttggaggctatacgagaattacgcaccgctaaaattagcctcgtttgaatccttgaaagttaaattctgcagggtttctgcctgggaagggtgagacgggagtatcgccagagcaactgatatgatcttggactggagaaccggtcagatgtcatcatggctactcagaaggtgctggcgcacaccttaattgaattcttgagagtcgagctcactgggaaagtggattatgggagccagtgggacaaagctgagattgtaatcagaaagagcatttgatgccttccaattcaatttccggtgttggcgcactgttgcaatcagccggatctgcagtcttggataatgccatcgaggtcctttccttaggggagggcggggacgggggaaggatttcttgcgccgcggtttggggctctgacttctgacctggggatcagtcaagaggactaaagcacccaaatcatttcacagtggtggtgcatcgcttgaaagagatgcactgaaacagcctcatttgcattcttgaaagtcgagcccagcagggattctgccatgattgaaagaaggaggattttctgcgccgggggggggggggggggggcaaaaaaacggcactgacttctaggccgctggcaaggttgtcacctgccggtttgggagttttgccttggcatccctgggaagctcggcccacacagctagagcgttcagcggtgatgcatagatggtcaattgttgggtggtgttgtgctgacggtcgaacctttcccgttcacccagccccggctgaacaagccccttttggatcttgtcgatcccgcttgctgggttggtagaacggcgaagcaagatcaggggttttgcatgtctttcagccacatcaagcagatcgagtggacaaaacttgtgcccagtggaacaaacaggacaccaatgttgccatctagctcaggttgaagtccgcaggaatgaagagtgttgtggtgtacctagcggtgggcacatcaaaagccaccggggagaaagaagacaaggtgaactgaagcctacttgggagttgtggcactgtgaatccatatatgctagaaatttgatggcgtgttacctcaatatattgagtcttccacaggtaagcagctaattggcctgaacattctgcaaatacactaccacgtctttggtagtgcaacagaatagctatggctggttgactgtgtggagccccaaagtcaagtcaatcctgcattttactttcaccttcactactgcgcggcttttctgaagtctgtgcatgatgtcccctcgcaactctgcctgttgtgcagtcctgcacgcaacaaagctgttcaagactgcaagggaaaagcacaagacacaccagcaagtctgcttggcgattgtcatgctgacagcttcaatgcctacgttgtctggatcttgcccaatcaaggtctagcttcaatcaattgcaagcgaaaaggtatagaaagcttacctggatctcctcttccagtgaattgcactccatcctcatttcgagggcttgtgaatagagcaactcagtcatcttatcgaggaattcctctttttggcacaagcaatcgatcttgtaggaaagctctggccattcttccatgtagtcattctggcgagtcttcaattctgctacctgcacaacttgaaatcgtcaagaacatattcggatgcgatcatcctgggcaatacacggcaggctgccctaattctcataccttctcctgtacttctctcaggattgcaggtgctctctgggcgacctacagtgagaaagccatcagtaaaaacatacgcatttacgtcgtagaaagagcaacactttctttaatcctgagctcgcgacgtctcggtgtttgagtctcacggaggtcgcagtcgagcggcccttcgtcagtgctgaggcttcgtgctgcttgatactcatacttggtcaaatttacacgtgtcgaggctgcttgctaatctcttttggctcactccactgcagagatgatcatccaataatcatagttttatttgtgactctaaacctctcgggggtttagtcacgtaatccaagtcacttttctttttcaaacggctactcttcgaatgcatggagcctcaatgcaatgcactctcgtcccaatgaacgcagatgcaatgagaagacttcctgaattgttggcatcctgcgtaatgtctctacgaagtccgatgcacggtttgattatccaacttgtggatgagtctgtgacaaaaggtatattacgttgaaggcgaacgaacctccaggcatgtcttcaagctgtttgcctgccagagagggtttgtattttctcgaaggaaagacgtggtacagtcttttcaccaattgtatgttgatgaacaaaggacccgtcccttgtatgatttggaattctgaattcttctgagcaccttacatctccagcaatgagccttcaaatgtaaatgcctcttttcattgagtgcctctggcaagcagactattttcactgccttcatgtggggctgggtgagatgcctgcattttccataggtggaccagatcaaagctatgcttgcctgagagcgcggcaacagcagcaattctccatggttgtgcagcaagaaaagccgagccacctgaagaggttgaagtgaatgcaagagtggccaccgaggctgctggcttcacaccccaccaaagtaaggagaattgcgctcacatttgtaacagctgcaataagttcagatgtgtagctgggcagccagaaggggtgacgctatgcgagaagcattcacccagtgcaaagaggaggagcttcactccttggacagctgcttcgccatgactccaggttggttctgtgcacttatgtaggaggaatctcagtcctttttttcacaccctcatgcacaaaaacgggtgtgaggaattatagggaaatctacaactagaggtccttcaccaggctgtctatcgcaatccatatggagttcttgctgcagatattaaatgctaagcaggccccgattgaaccagaccaggggtctccaggctgcaaacgcgtggatttacttcaaccaaacatgatgcacgcccacacattgttcagaggtaacattggagagctgcgggtcaaggatatcaagagtggccccttggcaatgctggctattgcaggcttccttgcccaagcttgtgccaccggcaaatcgctcctgcaggtcagatttttgcctgctacttgtgaaggagtctgtggagctacagaggagggctgggggatttggcatgcgagcatgcctgcatgctgaagtgtgctcgtctgatccagagatgcaagtgggtggaggtaccatgctgaagctgcatgccatcacaaggcttgtgggtttccaatcaagcaagatagccattccttccaacgcatgaagtccacaattcttacttggcaagtgcgaatgccttcctactccctgcaaagcaaacttgtctagactgtatggtgttggaagcaatccctcaaagtgctttgtctttgcagctggtgggcttgcccaccggaatgatgcaggccaggggccccccaaaaactctccccgtcgtccgcgagctgggagatggatgactctgactcggaggatgatctcacggagctcaagaacagatagatgaagaggctcaagaagggcaatgaggcagaggaccccaatgaggcagaggttccggtccaggtgccgaagaaagggagcgggaggaggaaaaagaagaattctgtttagggcatacagaatacatatatgagatgtgaaagctggtcaaagcttgctgtcaggaatgatgacgatgtgtggttacaaagagaacagcaaagatgaggtctatgataagtgtctcatggctaatgatgtttctgtgatcctttctgatacatgtctgatacatgtttccaatggattctgatgtcatgtgatgcttgtgtaatatcttctgatgtggcattcaaagatgtcttatttcttctgatgcttttacattgtcttctaatgtggcattccaatgaaatcttatatccactgatgcttcttaatgggaacttctgatatattctgattccttcttatctgaccttctgatccccttcttatttgtctaatcaaatcttacagctcctattttacatcttctaatacgagtcttatcccgttctgatgtgtctgatcattgcaccatgcgccactgctatgtccatcagcaactctgatatgaactctcatactttctgagattgcaacaatcctttcttatgggtgagactcacgtctaatgtccattccaatgatcagatccatcagaagctcatcagacaatataattcactattcctgcggaacagcgaaatcccacaagctgttaaagaggaagaccaccaggtctctcactgctcacaggtaaaagagagacaaaccacattgggacggagagctcgtttggcatgcgcgatctctttcgtcaccgtttcaaatgaaagggaaccgagtaagtcatggcagaaaccttgacagcaattttagcgcctttccaatttcctgcaaccgcaacaaatggcaatcgtttcaagcaagatctttataagaatgttataatcattgagtgtacctgcaaatactcttcctgactcgccggagcccagaaagggaccaaatttaaggtcgccaagagtttgttgcggattggatgtaatgtccggattattgtgatgatcgttgctcattctcaagccatttcatctgcttgcatacaagatgtgcacagacactcactggttaatattggagcaatattaatcatcatgcatgatatgataacatctgggaaagtaatcctgcgcgggtcggcaattttcccgcatccgcgcagttccgcacgtatacgcgcagggaaaaatcgcggaaacaagcagatcttttggtcgcgacgatctgctaacgcctgcaacacacagatcatcacctcaatcctagcaaagcagatacaaacagatccgcaacagacagatctgcatttccaattatgctagcgtatctgtacatgtcacttagcagcgcggatctgttgcgtgcagatctgttttgaaccacactaagcaatcaaattacagatctgctttatgggatagtgcacagacctgcagatgtgcgtcatatcacggttctgtttttaagcgcagtgtgaggacctgtagtatgcagacttgagagcatcctgtgtgtagtgttgcaggaatggaaaggtggtgtttgttgccaaagttcagatcgaacttaccaccacaagcttaagtagccacaagtacaaatgggacaacaacattcctacacttctcaggacagtcgacgctgccagacatgccagcggtcctcaagcaaggcaacctaatcttagcaaacctcttgtccgaaccattcaaaccccatgcacgatatcgactggatctcctcccctcggcaccccttcccttggtgcccctcagctatgtcagcagcttcacgaacttggacttgcgtgccggcacatcctccttgagcagcctacgtgccttgtccaccatgggactcctgcctatactgctgtgtaagcagaagctatctccctgcctaccagcacgacaccttgcatttgcatctcaaaagcacatgattacatgtcccccaagaacagcaatgcaaagtcttgcgcattcgctgggaacccgattttgcgtatttcaatcaggtactcccaatcagagtctcaccatgacctccagcacgacgaggattccaaccccaacccggaggtcatccaggttgacatcctcctccaaaccagctgccttggcaatcgctcgcctgtaccgcttgctttggtagggttcagttccgggctccttcttggtgtccttgtgaacccggtagtatgcatctgcattgaatgtcagtcgttcgaaagctcagttatttcttgcaacgtaagcctgctcaggagcaggtacagatccactctgtcaatcagatcgacaattacagtgaaagaacattgcagcgctacaattctaatatgtctccatggtgccaggacagcactgttatgctgccacacgattttccgcccttaggaggaatctggtagccgttcagctcggcaagctagatccccgctcacctgttcacccaggcaagaaatgattcccaaatccatgattgcgcttcatgcaaacaggatctcaaggtaacgttgatgaaatgttacaattgtgttgcaggtgatccgccaaatcccttggctctactctgtgcacgcaatgatcaggtcagatttttggcttgcaaccttctcttccaattagcacgcacatcctgacatgcctgctgaggctgccacgtgagatctactatgttgccaagttcagctgccttctggtggcttgca

SEQ ID NO: 213 - DNA, 22091 bp, unidentified
  variation 16200..16201: note = n is any nucleotide
  variation 17134..17135: note = n is any nucleotide
  source 1..22091: mol_type = other DNA
cagccctagagcactggcaaggaacagcgtatggattggcggctattctggccataacgccatgcctcggatttgctttcaaggtcaacgtgctgaggctatgtctttgatattctgtccatttcttcgacttgtaaagactgcaccaccatctgcagggcttgttagctaaactttctagtccgcaggcaatttctatgaagccagcagagttcagcataggactggctttgttttgcgtcataggactggctttgttttgcgtcatgccaaccacacttgcggcagaaggatgtcggtccgaatgcatgcaagatgtctctcaaccctgtcacaatattcaataattcgcaattgcgaactcttgcatgtgcagatgagagcaactttcactgaactccatccaagatcgtcctcaatatttttcttcttgacagctggtttggccaacattggtggtggatggctgaaggcatattcatcactacgaaaaactcaacatgaatataattcactccacttcagccacaatcctagaggccacagccaaccctatatctttacaggcacacccttgctccagtcttccttacacctacaacctagctgagctgtatcacagtaccacatgtacgacccaaaaacccacagtctctcagaaaataaaattcaactcgatcagaatgattcaaacctcactttgcactgcagcacttttttgcggagctgcagcagcttttctctgtcagttgggagaccacgtccttggtgcactcatatgactctggaacagcagaacttgcgcctgaaagaacgctattcttggcgctgcagcaacttttcttcggcagtggtgtgaccaactcagcggcgcattccgttttacatggagtttcgcgacttgcacacgatgggatgtcatggctcgggcagcatgatcgcttggtgacctctggcgggtcacagcagccctgccgtcctccctgctgtgaacagcaggcggggggatcctcagttccagtcgccgaggagcgcgtgcctgcctgcttgagacaggcggtgtcgctccgcgcaagcctccagccccaaatggaccctgtgtcaatgctccagcgcaggcagcgcataccgttcaggcagacagcacatgccgtccccacgtccaccaacaccgcgccccagagggtgaacaacccaagcgctgccaaaaccaggacggccacctgcgtcagcatctcgattcactattgcctcctatcaccaacaaaatcgcgccccagagggtggacggctcaagcactaccacaatcgcagcctgtgacagtccattctaaggatccacttctcctgccaacaccaccgcgccacacaaatcaaacagcctatcactgccagcagcaggacaggaacctgccttgcgaataccatttgttttttactccttccaccgtaccgtatcgacgcatatcatcagccctaaaacgacttctgccaatttggccggacaaactgcgtcaaaaatccataatatgcccttggcttgcagtgcaactgccattaccttggtgacaatgcagaccgcgatgttgaacatgatgatgctccgcaccgtgcagccgaggcggatgatgggtgcaaggcatctcaggtcgttggtgaacagtgtgatatctccagcttccacagcaattgctgcccctgcattgttttgcgaggacttcaattgtgttgcaggtgatgcagttcaaaatttgttggcagataaaaaaaccactggtgcagttcgctcagacgcgcttgccattcagaactccaaaggaggcgttcccaggggttgttcgagacgttcctcaacaagggttttgtgcaggaggccctctgctgtgctgttctgctggcgtatcattgacaacatgtttctggttcgatgcacacagctcctgctcttctgtgacactacacatcacttgtgtctctccacacatagttatgcgttttggcgtaaatatgccatcagctctatcgcgcatcctttgcgtggcatgaaagtctttttctgcgacacagaaatccagcgtcagcctacctgatgtgcccatggagatgcccacggaggctgcagccaaggctggggcatcgttgactccgtctccagtgtgcaggactttgccttgggtctggagctcctcaatctgcgtgcagagtgcgataatttccttgccagacttcattatgggatttcgatggaaggctggcatttgcaactgtctccttgcttcatatggcaaaatactaaaatcgattgtggttcttgagaggaccatccttcagaagacgatcagattgaagtcccttgatgatatccaaagcacgccaggaagacaacttcttaccgtcattgtgagtacttcttgacccctgtccccaaattcaggggaaaatatcgtggattactggcaaaaggttgtcctcacatgggacttacccgaattgagtagggaatgtgattggttggtaaatttgttgtgctcacagtgtcaacttccggctgcaagcccttaccagattcagcttgccttcagggagcagcgctgcatgcacatcatcgggttccatgccaattgctaccgcaactgcataggctggccctggcgcatctccagtcaccatctttgtcccaattcccagtttctgcatacatgaaaaaaatctctcttgctgcaagccggctattgtcctggttaaatgatctaaatgatccaagtggagagcaggcagcttgaatgcattactggcagagcttgtctcaattttaaatctgcacagcgccaagaggttcttgccacaaggccctcggtgaactacctataccaggggtgagcaataatccacgtgcattactgccaggagaggtcatggcagtgctgttatatttgatcagacgtcaagatctcctatgcagcatgcaagccaacgcctcaacttaacaatgcttgacgactgaaaagagtctccacaccccccacaaaggtcttgcatccaaacagatcactcgcagcctcagcgtcatgcaagcaaacgcttttaatttgccgacgcctgaagcacaaaataaggcctcgcaaggtgcacccaaaaagattcacctgcaatctttgaatcgcttcagctgcctcgggtcgcactgcatctgccagtgcaagagcgccaacaagaaggccatcacgcgcaacaaagcagatggtcgcacctggcagtatcattgttcttttgcacatgttaaatttatacaagaacaataacactgaatgctccagtcagacatcccatacgaagcatctttggggggaagaattgctctacaactgcacagttgtgcatgcttctgggactgctcatacacttattggcttatctagaaaggacatcttgccatttgactgaaaagcctatgttcctgttcttgactgccccgctgagagatttgcgtttagtggagcatcaaataccagctcgacagccccgctgaggttaaattgcttgtagttaagaaatagccaagacaacaagattcatacatgaatgacatattgcatggaatgaaccacatactgctgagagacttgcagcggacgtgcagtgaagttgtaacaggtgggctgagattggaggtcatattttcccgtgccccgtcaatgattcagattcaggaatcagtaatgttgttagtgaacaaacttgcttgggttaggcagcaagggctgaccttcttccccccagctcgcttcaacgctgtcgatcacattgctctccatgattactcccttttgcacaaggagcgctttgctgccaagcaatacttgcatgccctgtatgtaacccatcacacctaaacctgcaaatggcagagaaattgaggggaacaccttcgccatctaaacaatgcagcttcgcaactccaggaacaatcatgatacgcatacgctttgcaggtgtccactcacacacaaatacgtcgctgtggcgagggacgcagcagtctaaagtattaacgccctcaattgaccatctctagaaaagacttcctccctgtcacagtaaaggctcctccacagttgaccggctgcctgggtcaccgtactcaaaaatttcctaggctgttctctaccctgcaagagacccataggggttagggtttagggcagatcatcacaccggccacgcaggggtacccctttcgggtgtcaatttgtttccatcaggctgagagaaagcaccgggcagattctcaaaagctgtgacgtcaaggttgattggggagccagcgacagcagcacaggcgacaatgcaggaggcaattggatgcgttgacaggcgttctaggctgcctgcccatgccagcagatctgcttcagatgtactaattgctttctttgcaatcacctgcaagcaatgtggtgtctctgtgagtcgtgactgactgatgataggaagtgtctgtattaaaaatctgacacgtgatggggcgtgttatgtcatgtcctgtcctgagtgtcaggacacccaaaccaaagactggtgtgtccattgtgtgaaggcatatatgacctatgagacagatcaatgtcaggtgcggcagggcaagacagaaatggagatgcgagatcatggaacatgctcatgggagaagcagaaagagcttgctggcaagcgagtcactatggccagcagggagtgcagaacgttcacaagtcaggatggaaagcccagtgcgcacctggaagcgaccttttgtgagggtcccggtcttgtcaagtgtcactatcttgatcttcgccagcgcttccaagtgcgagccaccctgaaggcatgggaggtgatcatcctttatgtactgctctcatgattggtggcatgtttgatatgcagcatcttgtcaagactcctggcagcaatgacacacattttgtgtcaataattaaaagtatgccaaacagtgagctatgcagtcagtgagaatgatgccatgaagggaaggattgccagacaagacaagccaagccacctttatgagcacgccctggcgggcagatgcagctagtccggcaaccacagtgacgggggtggacaacaccagggcacatgggcaagccgtgaccaggatctggagggagaggtagacccaacgagacttgtccctcgctccagctgcaattggaatcagagctatccccaggcatgcagcaatgatgatgggcgtgaaccaggtggcaaagcgggtgatgatggactccactctggattgctttgatacagcctgcaggaaaacaatgttgtttttgtaaatctaggcctcgtcgtctatcaacttgactcatcttgagtctacttgattcatcaagtatattgcaccaatgatgatcaaaccaaaaactatgacagccaaaacaaaaattccaacaatgattgaaaggctgatcaatattgaaatccagagttcagtttgacacatataattgatttgccgctgatggctaaatgggtgtggatctcctaataacaacttaatattggatcgtgattcctacctgctcaacgagctctgccatgcgggccactgcgctctcaccagcagtggcagtggtctcatatgtcagggcgccagaaccacaattcaaggttccacccagcagctgcgcaccaaattataaagggattgaagggtccgtatcgacagacagcattgagcaagatgaagatcaggcgcgttggtattcgtggcctctagacctgctgaggaagcctgtgaacattgcaattacaagtacagatgtgcaccacttagctataagagatgttcagaagggtgtaatatatgacaccggcattgatgactgaaaggctgctgacctgatcactggcggatctcttgactggtttcgactcgccggtcagaaggctttggtcgacatctgatgatccagtgacaacagttccatcaatggcaatccgttcccctggccggacaagcaacaaagtcgatacagccacagtgtctgcaggcacaagggtacctgcaccacagcaaccagatgtaatgagatagggtgttctcgatagacatcgttggagctacttttcacaatatggtaaaggccaaagataatgatgtcacgacgcaggaccgggattgtcatgtacttgtctcagacttgcagtgtttattccagagaaaacaacaagattacctgcggggagagctgcagcaagattaggatttgctgcaaaaggtgttacctgaattggcgaggacagcaacttccggcttcaaagccagtacggccgcaattgcatttcgggctgatgaagtgcaggaagattccaaccaatcggcaagcgaaaagaggacaaccacagctgctgcttccgtcacatcctgcatgtcatgtcccatttggtccctgaagaaagcctcaatctgggcaaatttcctgtattctccgcaaaactgctccagaagcagaaatgatcactctggtggtcgtcagcaggggcatatacataaacggggaagcctcggcaagacagctcctcacaaagaatatgtggaactttctatatcagctcactacaaatggggcagacctgaagtgccagagcgcctcccactgctacagtcatcagaaagttgatatccaggcgctgcaatgctaacatgtcaggtcaggccaggttgggggaacatttacatgttgtgctaagcaaagaacaggacaatgcagggactaggtgatacttttggaccatcacgtgtctgaatttaaacctgggaacgcaaattgactcacctttctcctcaaagatgccagtgccttcaatagtattctggggatggctatcacgatgctccccattgcaatccactgttacaaacagcccagctggtcacatccaaacccaaatccgcaaaggttatagtttaaagaacttatcagactttggactggccagagtgaaatggaaactgcacaccttcatgtactctagcttctggttgccaattctgctggccaggtagtggaagagggagaccacaagcaagaacgctgcaagaaggactgcacagggagagagctcatcacacctccaagaatacaatctggcccaccttggaaaacttctgagcaacaatccagttaacaagattgcgtgtggactcaagtggtgctgctggcatacctaatgctactgcatcgcttggggagttgaggtctccaatgcaaatatgcgcagtggcatgggtttgcaaggaagagatcttactgttatctcctctgcatgcaagaagctcaccattccagctgggaaggtactgatagcgcaactttccctgctgccttggcgcttcacaagaagcgtccagatgggcatggttcagacaggccgtgagtgtttgtggcaggacagccgctgtgtgcttgatcacagcagacctcgtgaccactgacacatcgacctgcacagtggaaaagcagtcatttgatgtacgacacgagccagaacaggaaaatgggggatttcggagcaacatgagcactgtggcacatcagatgttcaacggagttcaaaacaggagaatgtggcattttctgacctgcagaactcctgggaagttgtccaacaaatcgtgaatgatggtcgcctcgcttgagcaacacatcccctcaatgtacagcttggtagagattacggcaccctcgggtctgccatgctctcccgcgcagtcctcaagggactccgatgtgaggatatcacagaggtcggctgtctggacatcttcccttgtcctcctggcacagattgagcagcaaagtttgcatgggtgaagcagcaatcatccaggcagacactgcttaggcaacagcaattcaagcatgagcatggtggcacaggtgccggaggggtgaatgaatcgtggaaggggaaagatctgctgggcactgaggtcagcaaggacaagctcttaggtgcaaacctgttccgaagcaccgaagcatctccatgatcgaagatgaatcctccctttgtcagaggtatgcactccttgtcgcagcacttctctgagatgtggtacaacttgctgtttacctgtcaccgggcaagctctggtaccaagccatggggcagataagggtccaatgcagagacagtacatgcaaagaaccagcaggtgcaagatctgtggcaacgaaacatgtgttgctcaccaggtagtcccagtggtcaccatgtcggaccagagggtactgtgatatctgagaatcaaacagctccccagcgtaatcctcaagatcaggagttgtgtcgtgagagataaagtatccgttctttacggacacgaagtaccgccccgccaccacgcagcctgcagaaaggcagaatcaggttgttaaatgttttcactgatggcagcagaaggcttgggtccaattcggaggtcggttggggccaccaccttgcaagctggacgcgagcatgatcagttgtttgtaagaagcaaagacagcaacgctgctgctggcgaggctttttacaacccttccgactcagaatgttgcaccatgagatgtcgcctaagctcttgcaactcttttccgttggcaaacatcatcatctaggcttgtgactacactgtctaggctgaactgtatatacagacaaatacagtatacttcagcctttggcgttattcaatacacttcgctctgtatttttccaggtatctgatgcgtactcctcctgaccctaaccctagctgatgcaatgggaccccccacgccgcccttaccctcccacttacccctctattttgacctcgtcactgcatttggcgtcagctccagccaaccagtagcttatacgagacgacagtgtattcaatactttacatgacagtacagtgtattttatagcaaaaagtcttagtatggtcacaaccctacaaacttggcggatccgtggtggtattctccgtcgcaaacccttcggagaacattctcgacattttctggttcgctttgatccatgcggccccaggctcaacgagacctcatgttcagtttgctcgataggggcagaagtaaatccgagattgccgatatccttcaaatttcgcggatgacattgcatcgctggcagaaggcaggacgcggacgaatacccaaaagggggcccagattggggaaaagaagattgaatgtgcttcaagagcaagctgtggtttgccgagtgaaacaggcatctacatccacgttgggcagtctatgcagattctcatactatgtgttgggggtgaagatagccgtctccaccgctggtctgattttgaaacgggcgaattacacgcacaagaaagctgtcaagcgaaacacggaatacgacgtagagaaaggcatgtactttctcaacgagcttcgttctatgttcagtattcggcttgcgtctatcgatgaagcctcgttccatttgaacagtgcaccgcggtatgcgtgggctcctaagggtcatcgtgctatcatcacaaggcctatggtgcgcggtcagaggttcagtctcctgctgtgtgtcagcccgacaggagttctggggtacacgttggtgccgggcagcgtcaacagtgtcgttttcacccagttcgttcagaccttgccgcgcgatctgaccctgttattggacaatgtcagcacacacaaggccatgaagtcgttgacgaagaaaggtcaccccaccgtcagggagtccgccgattcccgcgatatcgctttgaagtataccgtaccgtacgctccgcatttgaacccggtcgagttttgcttcaacaccgtccgcaatttcataaaccgtcgtcagcccagaaacgaagaggcgctgaggacagtcgtcgctgaggcattggcatcactgagggcgccttcgttggatgcattgtttaggagagtgatctggggtgatccttgagtgcacagtattcagatccgtcaaaaacacaagtgcgtttaaatctcagaatttcgttatacagcaattgtatgtcatgctatgcaccctcaaccatcccgcgaagccacctgcgaggatcaagcagacacctgaagaagtgatcgaggatagatgtctcgccggcgccaggatacttttcggtggaccgatgagattggaggcggtgaacaggaacgagcagaaaaaggttatggatatcacggtcgtcaagaccacctggaacagattctgtagagacgagggccgtgcactggcggtggagtccgtgttgaaagacatgaacaggaccgtctgtgaggcctatcttctggcaaacttgcacgtcattcgaatctgcaaagccaacaaacctctgccggcgatcgaccaatccttcttctacaactgtctgaaaggcgtgagcgtggggaacaggcagaaatctgatatcaaagaccccgacctgaaagacacggcggacttgtatgcttcgctgaggccagccggataccaagcgccgagatctgatcacttggccgccggcttgcatcagaacgccagccaacagatggccatcaatgccaagaactatatcagcatgacgttctacaagaggctcaccaggtatttgaggcacagataccagttggacggccgggaagcatacaaaaagatagacgacatatatgccctacaatacgacggggacgacgccatcgtcaaaaagtacaggaccaagatccctcgcagacctacagtagggaatctggaagggacaccggagctgtacctgccgatgctgtttgagatcctgaagtactgcgaaaaacataatcctttcgagaatggagatgggcaatatgacagcagggtcaagcaagttcgattgtttactcttcttcccaccaagcagggtttcgaatgcagcaacgtcaagatctgtggcactggactcttcaacattctgaagagacaaggcttggaatggacagaggacgaatttgacgatgcaaaggaggagtggtggagagctctcttccgtatcagtgattttgagacaaggaacaggaagttcgcgaacgagatcctgactgacggtgtgagtgtgagcatagtcatgagacgtctgaaacccgaagaccaagtccaaagagaagccgagatagctcggaaacgaaaggaagacagagagaatccggtgaagaagaaacgaggcaggaagaaggatcagcccaccaagaaacgagatcacgaccacgacatagatctggactcgtacgagcaggtcctcggtctggatccgggaaggagcttcatgttcgtaacggccgacggccaggggaagcatatgcaatgctccacaaaagagttctatcacgacgccaagtacacagagggcaacagaaaggtcaggaagtggatagacagggacagcagagtatcggatgccatatgcaatatgccttctcccaaaacagcagaacaggcgaaactacaggcttacatcgaataccttctgcctcgcctggacaacctgttgacattcttccagcagaagaaatttcgctcccagaaattcaaaaggtacatctacagcaaacggaaattgcgggagctggggctgaaattgactgctggtaagaagacgctcgtgggttttggtgactggagtaacaacgatacagctggtgtgatcaagagatgtccggctgggccagtgaagaggtttgagaaggagctcaagaaattctgcagggtgatacccatagacgaatactgcacgagcaagaagtgtaacagatgcagaagtgaacaatataacgagaagaagatcgtgaatggaaaggatggcagaacgtatcaagtcaaagttcacagtgtgctccattgtcacaacaatggctgtaaaggcatgacggtgaacagggacgagaacgcatccaagaacattcgcgacctcttggtgatcgcagctcgcaaagagtcgaggcctgcatgcttctgccgatcggcgagaagcaacgatccaataataacagttcccgtgtgcgcctgagtctcgacgagggtgtaggatgggaagtggttctacttcgccaaacgatgtttggtgcttcgtgaagtaggaaagggcgagcagggtggtaggaagaccgccacgtccttcccatattacaatcgccgtttcgcctcagaatagggttttgccatttacgaagaatggtttcgcccggtgtaacattctgagtcggaagggccgtaaacacgtatggtatagcggttaaaacaagtcgttgccaacgactagacccgagttcgactctcggtacgtgtatgtttgtttttcagcatctcgactccttggtaaaccctcattgacatccctgcttggtgtcgccttttcctctcgacatatttctgtgctctccgcgcaccagatgctcacaggattgtatcgagagcagaaagggaggcagtctcagcggcatgccatgcgcagtcagtgtagcgcaggatgcttcttctcatgtccattgtcagactatggaacactagtatggtgcgtgttcctcgactgaagagctgcatcatcggcttgatttctcggggggacaggagaaagccatttcaaatttgctccctgggattctcgagcaaggcgcggctctgaggtattgctgccaaggctgctcatcagcaacttggaagagagtcatatccgtatgtaatagagttgagacaatttctgacaggacagaagagtgaaggccaggaggcaggaaaacttctgtgtcagaggcactgcagattgtcctgcgcagaggaggcgctcaaacgcagataggctgttgtaggccattttgccataggatccgagactgctctagcatgctctctatgggaaattccagacctccctgaaatagtggtgacaggcatgctcgcaatctgtagccctggggtcctggatcgactttttcaggcgcagtatactgcatggaggaagggtcttgctcgatgcttgtgggccggggagcgccgctggatcttatgctgctctcgcttgtcttgaaaggaaagtcaagagcctcctggagcagcagcatcaggaacaggcatgatacaaagctgctgagccttccttttggattatgcaggcaagaatggcgagatgagggatttgcacaatcaaggcatagggtgcgttaaaatccggcagcactctggcagctctggcttgctttgaaaggtgatctgagagccttgtgattaggaggagaagggtgcgaatggctggtggcaagattacattttcttgactgggggatcatgtaagacgtttctgtgccagtatagggagctggcggaccgctgggtctggctggataggcaaattgggttgttgacctcattgaggcagatcctctgctttagaaaggggaatggaggtatggttgcgtcagggcagaggatgagcttaatggcaagagcatctgagatgctcgagtgccaccagaggaagctggcaatttgctcgagatcaccaatcttgcagaccatgcctcgaggattgcgggaggaccagagaagattgcaagaggccggggctgagcaaagagaccgagagctatgcaaggtgagcatgcaagactcttctgcgaagccgtacaaaggtggcgcaccgcttggggtagccagatctgcagttagggacgctgatattagatctctgtcccttgggaggggggaaaggagagctttcgtgcgccacaccaacggacggcattttggattggatggtcagtcagaggtctttacaatcgcattactgagatcaagctttattgcattcttgaaagttgagctcaaatgggtttcatgccttagggtggggagaggggaatctgcctcagggtcttggactgatgttttgacctaaggatcattcataggtctttatattcctcctacaattctgacgcaccctccaatcagccagatttgcagtctgggatgacaagctcagcagggcttttgcccagagggaaagggagaggggatttgctgcgccaggggtcaggactgagattgtagatctgggatcatctagttgccttaatgatccttcactgatgctggcacagcactgtcacttcctgaattcgcagtctgggaggccgagctcgctggggttcatgccgagggggatggggcttgggggtttctgcgccaggggtcaggactgtgaatcttgagcaggggatcattccaaggtctttgtgatactcctacgatgccggcacatcgcttcgacttgccaattttacagtttgagatgatcagctcactgacagttctgcctggggggagaggaaggagcattttctgtgttgggagtcaggactaaatcttttgaccaggggaacatttagagttccttctgattcctctacagttctggcgcaagccttaaacctgtgggagctgcattcttgaatgtcgagatcggcagccctcctgccttggagggggggaagggacagtttctgcgccacagatctgcactcatgttctgacctgagaaccatccaggagtccttctggtccctcaatggtgttggtgcatccctaagatcagcgtggactgcattcctgagagtcaagatcagcaggccttctgctcccgggggcgggagtttctgcgccagggttgggggccctgaattttggcaagataaccatgtgagacacttccgtgtcaatacaggaagccggcgcatcgcttttacctgaaagatgtgctttccagaaagtccagatcagcagctctcctccctaggagggggggagcagggattctctgcgtcaggagtctgcgctgatatatttgccccagggatcttgtaagcagcctctttgacactgcaggaagctggcgtagcgcttgagatgaccagtcgtgcgggcccaaacctgaagaatcactggagtagaggatctgagggtgcaagcagctggagcctgaaaagaggattggggacagatttcttgacgtggtgagcatgcaagactgttgttggaggacataccgtcctggcgcatcgttagagctcaagcagatctgcagtctgagatgatctgctcactgaggcttctgcctagggatggggggaggggcgttttctgcgctggtgatcagtactgaagttttcgaccaggggagaatttagagatctttgtgatgtttccacggtgttggcgcatcgcctaagtcacccagatttgctgtttgagataatcagcccactggggtatctgccctgggggggcggggggggtgcatttcctgcaccgcaggtcaggactgagatttgagacagggaagcctgtaagacgcttctgtgccattccaggaagctggcgcggcgcttgagatggccgtacttgcagaatgagcctcaagggtcgccggtagacaagggaggaggggtgcaagcaactgacgcttggggcaaagggacttggagctttgcaaggtgagcatccaagactcatgttggaggctatacgagaattacgcaccgctaaaattagcctcgtttgaatccttgaaagttaaattctgcagggtttctgcctgggaagggtgagacgggagtatcgccagagcaactgatatgatcttggactggagaaccggtcagatgtcatcatggctactcagaaggtgctggcgcacaccttaattgaattcttgagagtcgagctcactgggaaagtggattatgggagccagtgggacaaagctgagattgtaatcagaaagagcatttgatgccttccaattcaatttccggtgttggcgcactgttgcaatcagccggatctgcagtcttggataatgccatcgaggtcctttccttaggggagggcggggacgggggaaggatttcttgcgccgcggtttggggctctgacttctgacctggggatcagtcaagaggactaaagcacccaaatcatttcacagtggtggtgcatcgcttgaaagagatgcactgaaacagcctcatttgcattcttgaaagtcgagcccagcagggattctgccatgattgaaagaaggaggattttctgcgccgggggggggggggggggggnnggggggggggggggggtggtgcaaagaaattttgataaggaaagcattcagtacgatattgattctacgatgccggcgcagcgatgaagtcagcctcatttgcattgagttgttcttgccatggaggaaggggaaagggattttctgttccagctgcaggacaatggaggaaatgtttgacaggaggactgagtaagaagatgctgtgcagatcccttgcgtatggcttgagatggcaaaaccctcgtgcctcaaggatcgctggaggatgagagaactgaagcggctggccgcagggctgaggggcctcagcgctttgcacggtgagcatccaggccttctttgtgcggccatatgaagatggcgcatcatttttaaacgagcctgagctgccttgtaaagagcggagtttagtatgattcctgcaaaggggaatggggatggggttggctgtgccgcggtgagggacatgttattttgagagttggattggccacagttctttcaatccatttcacggacgcctgaagtagcccgagttgcaaccgatcctggagagttgagctgactaaggtccctgcccaaggggccatgggaggatagttgctgcgtcagggcaaaatcaaatgaatgtcatcagatacgcttcgagatgctggcggaacactcagactcgtcagattcacaatcatggatgaagaggtcactgaggtgcctccattggtagggggaatagtgtaacatccaaaggtctgggggggggggtggtcaaggaaattccaggtacaggaagggtcatgctaaggcagacttaatggtctcacacacacaaggtggcatggagtcaccacccccagtttgagtgccaaaatttgtcagtcgtattgtgccctcaactgaattaggggaggtggagagggggggggggggggnnggggggggggggggggggtccacctgcggcactgacttctaggccgctggcaaggttgtcacctgccggtttgggagttttgccttggcatccctgggaagctcggcccacacagctagagcgttcagcggtgatgcatagatggtcaattgttgggtggtgttgtgctgacggtcgaacctttcccgttcacccagccccggctgaacaagccccttttggatcttgtcgatcccgcttgctgggttggtagaacggcgaagcaagatcaggggttttgcatgtctttcagccacatcaagcagatcgagtggacaaaacttgtgcccagtggaacaaacaggacaccaatgttgccatctagctcaggttgaagtccgcaggaatgaagagtgttgtggtgtacctagcggtgggcacatcaaaagccaccggggagaaagaagacaaggtgaactgaagcctacttgggagttgtggcactgtgaatccatatatgctagaaatttgatggcgtgttacctcaatatattgagtcttccacaggtaagcagctaattggcctgaacattctgcaaatacactaccacgtctttggtagtgcaacagaatagctatggctggttgactgtgtggagccccaaagtcaagtcaatcctgcattttactttcaccttcactactgcgcggcttttctgaagtctgtgcatgatgtcccctcgcaactctgcctgttgtgcagtcctgcacgcaacaaagctgttcaagactgcaagggaaaagcacaagacacaccagcaagtctgcttggcgattgtcatgctgacagcttcaatgcctacgttgtctggatcttgcccaatcaaggtctagcttcaatcaattgcaagcgaaaaggtatagaaagcttacctggatctcctcttccagtgaattgcactccatcctcatttcgagggcttgtgaatagagcaactcagtcatcttatcgaggaattcctctttttggcacaagcaatcgatcttgtaggaaagctctggccattcttccatgtagtcattctggcgagtcttcaattctgctacctgcacaacttgaaatcgtcaagaacatattcggatgcgatcatcctgggcaatacacggcaggctgccctaattctcataccttctcctgtacttctctcaggattgcaggtgctctctgggcgacctacagtgagaaagccatcagtaaaaacatacgcatttacgtcgtagaaagagcaacactttctttaatcctgagctcgcgacgtctcggtgtttgagtctcacggaggtcgcagtcgagcggcccttcgtcagtgctgaggcttcgtgctgcttgatactcatacttggtcaaatttacacgtgtcgaggctgcttgctaatctcttttggctcactccactgcagagatgatcatccaataatcatagttttatttgtgactctaaacctctcgggggtttagtcacgtaatccaagtcacttttctttttcaaacggctactcttcgaatgcatggagcctcaatgcaatgcactctcgtcccaatgaacgcagatgcaatgagaagacttcctgaattgttggcatcctgcgtaatgtctctacgaagtccgatgcacggtttgattatccaacttgtggatgagtctgtgacaaaaggtatattacgttgaaggcgaacgaacctccaggcatgtcttcaagctgtttgcctgccagagagggtttgtattttctcgaaggaaagacgtggtacagtcttttcaccaattgtatgttgatgaacaaaggacccgtcccttgtatgatttggaattctgaattcttctgagcaccttacatctccagcaatgagccttcaaatgtaaatgcctcttttcattgagtgcctctggcaagcagactattttcactgccttcatgtggggctgggtgagatgcctgcattttccataggtggaccagatcaaagctatgcttgcctgagagcgcggcaacagcagcaattctccatggttgtgcagcaagaaaagccgagccacctgaagaggttgaagtgaatgcaagagtggccaccgaggctgctggcttcacaccccaccaaagtaaggagaattgcgctcacatttgtaacagctgcaataagttcagatgtgtagctgggcagccagaaggggtgacgctatgcgagaagcattcacccagtgcaaagaggaggagcttcactccttggacagctgcttcgccatgactccaggttggttctgtgcacttatgtaggaggaatctcagtcctttttttcacaccctcatgcacaaaaacgggtgtgaggaattatagggaaatctacaactagaggtccttcaccaggctgtctatcgcaatccatatggagttcttgctgcagatattaaatgctaagcaggccccgattgaaccagaccaggggtctccaggctgcaaacgcgtggatttacttcaaccaaacatgatgcacgcccacacattgttcagaggtaacattggagagctgcgggtcaaggatatcaagagtggccccttggcaatgctggctattgcaggcttccttgcccaagcttgtgccaccggcaaatcgctcctgcaggtcagatttttgcctgctacttgtgaaggagtctgtggagctacagaggagggctgggggatttggcatgcgagcatgcctgcatgctgaagtgtgctcgtctgatccagagatgcaagtgggtggaggtaccatgctgaagctgcatgccatcacaaggcttgtgggtttccaatcaagcaagatagccattccttccaacgcatgaagtccacaattcttacttggcaagtgcgaatgccttcctactccctgcaaagcaaacttgtctagactgtatggtgttggaagcaatccctcaaagtgctttgtctttgcagctggtgggcttgcccaccggaatgatgcaggccaggggccccccaaaaactctccccgtcgtccgcgagctgggagatggatgactctgactcggaggatgatctcacggagctcaagaacagatagatgaagaggctcaagaagggcaatgaggcagaggaccccaatgaggcagaggttccggtccaggtgccgaagaaagggagcgggaggaggaaaaagaagaattctgtttagggcatacagaatacatatatgagatgtgaaagctggtcaaagcttgctgtcaggaatgatgacgatgtgtggttacaaagagaacagcaaagatgaggtctatgataagtgtctcatggctaatgatgtttctgtgatcctttctgatacatgtctgatacatgtttccaatggattctgatgtcatgtgatgcttgtgtaatatcttctgatgtggcattcaaagatgtcttatttcttctgatgcttttacattgtcttctaatgtggcattccaatgaaatcttatatccactgatgcttcttaatgggaacttctgatatattctgattccttcttatctgaccttctgatccccttcttatttgtctaatcaaatcttacagctcctattttacatcttctaatacgagtcttatcccgttctgatgtgtctgatcattgcaccatgcgccactgctatgtccatcagcaactctgatatgaactctcatactttctgagattgcaacaatcctttcttatgggtgagactcacgtctaatgtccattccaatgatcagatccatcagaagctcatcagacaatataattcactattcctgcggaacagcgaaatcccacaagctgttaaagaggaagaccaccaggtctctcactgctcacaggtaaaagagagacaaaccacattgggacggagagctcgtttggcatgcgcgatctctttcgtcaccgtttcaaatgaaagggaaccgagtaagtcatggcagaaaccttgacagcaattttagcgcctttccaatttcctgcaaccgcaacaaatggcaatcgtttcaagcaagatctttataagaatgttataatcattgagtgtacctgcaaatactcttcctgactcgccggagcccagaaagggaccaaatttaaggtcgccaagagtttgttgcggattggatgtaatgtccggattattgtgatgatcgttgctcattctcaagccatttcatctgcttgcatacaagatgtgcacagacactcactggttaatattggagcaatattaatcatcatgcatgatatgataacatctgggaaagtaatcctgcgcgggtcggcaattttcccgcatccgcgcagttccgcacgtatacgcgcagggaaaaatcgcggaaacaagcagatcttttggtcgcgacgatctgctaacgcctgcaacacacagatcatcacctcaatcctagcaaagcagatacaaacagatccgcaacagacagatctgcatttccaattatgctagcgtatctgtacatgtcacttagcagcgcggatctgttgcgtgcagatctgttttgaaccacactaagcaatcaaattacagatctgctttatgggatagtgcacagacctgcagatgtgcgtcatatcacggttctgtttttaagcgcagtgtgaggacctgtagtatgcagacttgagagcatcctgtgtgtagtgttgcaggaatggaaaggtggtgtttgttgccaaagttcagatcgaacttaccaccacaagcttaagtagccacaagtacaaatgggacaacaacattcctacacttctcaggacagtcgacgctgccagacatgccagcggtcctcaagcaaggcaacctaatcttagcaaacctcttgtccgaaccattcaaaccccatgcacgatatcgactggatctcctcccctcggcaccccttc

SEQ ID NO: 214 - DNA, 20621 bp, unidentified
  misc_feature 1..20621: note = Fanzor polypeptide
  source 1..20621: mol_type = other DNA
cggatgcgcccgttgtcgtggtcgacccgcccatcgatactattacggagggtaccaagcaaacgactccgtacaccgaggctccgactactgagctgccggaagggaccccggcagcgaaggtggactctcctgatgtagaccttctccggcgcaggcgttacgatctcgctgctgccaacgacaaagacgactgcacgccaggctggtaggcatcgaaacgaggggaggttgcaaccccacatgcatatttctctttatactttagccgtccacgtaaaatgaatgtccagccttctcgatttcatatctaaattgcctcgttagctgtcattgagcagaagcagtagccgtgtggtagtctcctcgcaccattggtctcggttgtgccagcttggtggggcttccagcaccgcacgattgtgttggtcgagtgggcacttgttctctcaattccgggcgataagaaatgccaactggccgaagctgcatatgaccagcgttaactcatgataactctcgtagcagacccccaagttgtttcgactggtaggggtgctctagcatgtgaacgtgggggggggggggcacgaaaggatccgtgggagatactcgcgttatgaggcgctagtcgccacatctggaagcggcttttgtgggcttgctctcgttggggcaccccacgctcccgaaaaccagacaaacgaatgcgaacgacgatccccatgtggtcgacgcctgtgtccataccaagccgccgctatacgcacttgcactacgcagactgacggccccaccgtcaaagtcactcttcaattgtcctcctcccacaacaacctccgcctccataatgacaatcacacaaacttcgctcgctctcctggtcattgccgctgccgcttccaatggcctctccgacgccgcaaacctgcgccaggcgcagcgcaacctcgccgccacctacagacagccaagcgactacctccccgccatggtggcccgagtcaacaaggagcgagctgctgtcggtcttcctccggtctgcgcgaacctgaagctgcagtcttcctcccagcgtcactcggacgacatggccgaccacgactacatggcccacggcggaacggacggctccacgatggagaagcgcgtgacggacactggttatgcttgggacagggtcggagagaacgttgctgctggccaggaagacgtcgatgcggtcatggacgcctggatgaggtcgccggagcaccgtgccaacatcttgggcgactacaacatgctcggcgcctcgtacgctttcaacgaacgcggcacgtaccagcactattggacgcaggacttcggcaagagcaaccgcgagtcgtgcagcaatccaggcagcatggccccgaactcgagtcctaacactcctggccgtgtccctccaagcaacagcgtacctcaaaacaacggcgtacctcaaaacaacggtggcgcccccaacaaccagacccccaagcagcaggaccaagagcagggcgaagctgaccccgcagtgcaggagaacattatgcattatcctgaagcccggagcgctctgagtgcgaaggagctggaggccgacctgggcgttgccgtctcgccggtgccaaagactgacgtgcacgttgtgaacgcgaagactccgtgccccgcgggtgagcggtcaatcgaggagccggtcgtccaatccgacgcggagaaggactgcgatcccaagttctaagacgataggaaagaagtgctctgtgttcctcaacgtataatatagctgttgttcaacatactctaccttggcaatagtacttgcacctctaatcactaccatgatggctgtcgtagcctacgaatctaccggtagttcgactcgcaggcaacgcaagtcaaactgcttgccggacgatcgcaatttggctgcaactcaaaaagttatctgacgcacttattaatataataatacatactgtaaaacctctaattgtgcccctggggtactaagttagtaccccacccacgcaaggggggtggggcactatttgagggtagtgcccagctaaatgcccccacaaagaccgaacacgctgctactacataaactacacagtaggcaaatactactttctgtgctatttggtgcagttttggggatagtcaatatatccagagtaaacaaatcagcggctgctatcgcgcagctgcgtaagataaacttaccttcggactggctggtaagataaattcgtttttagaaaaaaaatcagtggcctcctgtcgccagtccaaaaccctccctcctcccccgcaggccgcaagcgatcaggtcctgaccccgtggcatggtgcgtacgcgtgagttagttcatgtattccctgcttaaggctaacctgtacgtatccataccctatgtcaggccccggacgacgacatagctgccgatggagctcgcgatgtgaatccagaagctcctctcgagatggtcactgtgaatgcaacacccagccaagcaagctcagcccaagctcctcccaccaccgatccacccccactcacgccactagaagaagcagaagcagagcggatacggcttcgggcgaagaagcgacagcagcaagaaaacacagtgccgaagtctagacgctcccccacgctgccaaactgacgaggatcggccccgaaacgctgaagcggacccggcagacagtcaatcccgtgccgaccaagctgagcgttgggagtcccgcctggcccgtcatctggcagctgacaacgaggacgaaagtgaaggtgaagcagcgctagcggaagtattggcgcagcttgaggaagaggatgaagatgagtctccggacaacagtggcgattcggactacaacgacgatcgacgaacacctgagggcgatgacgatggagactcctgtgacggtattggacgcgctactgacatcgattccgctgcgaatagtgtgccgacaccgcaccaaacaccgaagaagcaccaaaacccgaaggcgaaccaaaagtctgtccagtgcgaggacgaagaatcggaaagtcaaggtggtgtggaagatgtaccagtcgtcggtgactacttggaaggatttcctatgtactggtcgtcgtggaaagtttctacgaagctttcgacgagctccaagaggctacgtaccagcgcttctcatcccgcacaagtacctcaattaagtccaggaacaagcaaattgctgccgcgcagaaagaggtcaaaaagaaacaaagtaagccgaagacgagaaaggttcgcgcccaccgacagagcacaggtggcacactattgccagagtcatgggagaaatacggcagggacgttcgtgtgcactcatgctattccgtacgagagtcgtggagaaggcttgcggcagcatgacgccgtccgttttgtggcgtgtactgctcgtgtcaacgcacgggtttgtagtcgaccgagtggtgttggatttcatatcgttgtgaatgcaacgggaatgcacagccattctctcaccgaacatcagtggtataactacgctgagaacagacgcgtcttgggtccgtcctacgccgcgatgtggcagtcatgagcaaggcgggggccaagccacgagggatattagcgtatcttcgagccaaaacaggttggtggttttggtgtgtattctgtatattgcacgaaacactaataaaatttggtttggtgttctataaaggcaagcgaacgattctacgagacgtgcacaacatgatccaggacgctaagaagtgctttaatggaggtcgaccggatgcggagcgcgctgtctccgtgctggacgaattctgcgagatgaacactggaaatgtggcggagttcgtcattgacaaggagaccaacgtggtgcaagtgataacgttccagtcagcgcggcagaagcgtctctttgcagccttccccgaggttgttctggtcgactcgactcataacagcaacgcgaaccgttataagctgtttagcttcgcagtccacaacgtcttcggccgggtgggtaaatgctttcaggctctaacaaaaatgtactgaacatttgtataattttctgtgtggtttattttcttagggtcaattcgtgcaacacgcattggtgcggacggaagagaaaccgaacttggctcttgttgtcgcagcattcaaaaggcacaaccctgagtggtccaagatccgtgttgtgatgtcggataaggcactgcatgagaaggaggtgctgttggaaggatggccgaatgcgcgccagctactatgtcgttggcacgtcgaaacgtggttgaagaaacagtgctccagactgggagacgtcgggcctacagaaacgaaggaactcaagtcaattatgaaaggattggtgaatgcggcatctcaggagcactatgacgacctgaagaaggctctgctcgagacagtcgggaataacgacgaaaacctgctctacaaaagttttatgaagcactgggatacgactgctgacgagtgggtgatgttcaagcgtggtgacgtcccacacctgatgaacaacacgaacaaccgtctggaatcggaatgggccgcctcaaataggttattgacggtagtttcactgttgatgagctcctctccatgctgataacaatgcaagattacactgaagaacgctacctggctgatttccatcgtgtcagcagtcgccctcccattgctgaagatccagagttaactgcagtggccatgcatctcagcaactacgccttcgagatggtggcccatcagtacacattggctgtcggacctcaggcctgttacgacatggagacgacaccagatggcaaggcgagagtgacaaacctagcgacaggcaattcgcacgttgtagatgctcgggtgatattttggttcaattttggtggtttggtaaattttcgggtgctgtgactaacgctgggttttgttctaccaacagcttgctgcatgcgactgtatattcaggcagacctgtttgctcccgtgccgccatgtcatgtacgtccgtgccaagtctaactacgagacggtagttccgccaatggttcgtttcgctacccgttggatcgtccaaagtccagctaacaacatcgatgaggggcctgtactgacggggggattaaaccgcatcaactgcccaccccgccgtgccccacgagcactatccagcgacgcgaagtacagccaaggcaaacatattacagagaagatcatcgatgtcctctcgatccagccgtctaccacacacaaactggcaatgcagtggcttacgggtttctacgacgcgctacatactggcaaactggaggagttcactggccaagatctgtgtgcaacaagcggcttcaactcgctgtctctagtctcttcggttgctggtgtgacagcatcgcagctttcttttgctgagatgagcagcgcgcccgaagacgagtcgaagtgcgatgtgacggcagggacggaccttgaagaaaaagcgcccgtcccagtagccgcaccaccggaatcgactaatcaccagacgactatcacaccgtctcagcatgagaatactgtaggtcgaagtccagcggatcctatcaccttagcatcgccaccgaagcgtaagggattgacgcggcgtgcggagaagcacgaagcgtcgaccggagagctgcaagttgcaaacaagattcggttgcgcatctcagaagggagaaaggcgcgtgccgttaagctctcggacatggcgattcttaaaggcccgtacagcagacgcaccaccatgtcgttcatcgaaaggttgagcttgccatccgtggaagtggctgggaagctcgacgttcgtagcttcaacattgggcagcccgtcccagtgattaaggcgattcctcaactggaaaagatcgaggaggccatagaagcaatcgaaaacaagagcaacaaggcgctgcttgctcggtgggaggactatgggtttgccacgtacgggtaattgacgctcatggctcgagtgatcaaggcacgaaacaacttcaagttagtcgaagatacgatgaagtggattgactccttggcgtttcgagttgccagtattgtgtgccgttcaaagacatggaggacgtgactaaggtaagatttccttgcaccgaaagtataccaaaagtatactaaatcaccaaacttactgatgtgctttgtgtttaggtggaccataagcaagcagtagacgagctgaacctggggcggtggtacgttggccgacatgaacaaaatggctgtgaattcctggcttttcgagagaagctctggctgcactcggggtctatcatcggtggtcttttggcactccaatccgagtatttggatgttgccattgtcaaccctcgctttcacgactttgatgatgctgatcagaagatgtgcacagcaaaaggatatggcgctgcgaatgccagggccaagttcgtgtaatgggcctaccttagctcactactacggcttacacgtatgccacgtgtatgaggaagcgtaggtttcttttacttgagtaagtatactcgagatccacgagtatactttaaacaagataaagactccaagtagcgagttttggtaaaagatgagaactgctatttgtgttttatgtttctgacttcctctaaatgtaatattctaaactaggaatctgccaacggctggttggcaggattctgctaacatgcaagtcactcattggctaaaagatgctgctttcagccaataggaatcctaaatgtgtatggaccacccgtcgtggtggttgtaaatgtatgtagtcattggtgtaccttacaccaaggtcgaggaagtgttcaaacctctaacagacatcgcatctgttagagtaacaagtgactgtagccacttgtgcgtgtaaccccgttacagttcgtcatcagcgtgattaacttggggcaccacgggggtgcatttttcgtggagacggagacgaagatctgctacctgtttgaccccatgcagctgactagcaatttgtccgcgctgaaggaagcagttctcactgtggttgagaagatgctggacatgaccgaccaactggactaccacgtcattgcccactaccaacagagggatggtacgtcgtgtggcatttggtgcttggtggtgttggaactactactgtttggtgcaactcctgaaacctggtctgactactggaaggactctctgtacgaagtggtgggctacttgaggttgcgctacctacggaaggtgattagcttgcagcttcagcagccccagcaggtttagtaggcaccctaacttcaatacatatctttggtagatgatttttgtgccagatcaaaacaccaaagtcataccgaaactaagggactttgttagcgtttgtggtagttgaaagtagacgccactccaaatttttgaatattaatgtaccttgtattttccaatactataattaagtgctcctataggtactcatcctcatctgtcacagatgttgctgtgaaagagagcattggctaggatgaatgaccactataacctatgctgatacaacgcacaggaatacgtaaattactggctccccgtaatatattcttgtagacgacaagcctcgcacccattatttgaagctatcatttaataacactttctgtagcagcaacacgatcccacctaaaattgtcgatcaacaactgggtgcatcctgaaatcacattttagatttgtgacgcacatttgtccaggttatgatacatttactacgtgattatactcgacgttgctgcctctacggagaaaaatagtactgaaagtaccattattttgaggctacttgagggtatccaatgggtttttgtataggatggtcacccctcttggcaaccccttttgacaacctcattttattgtgccttttgtttaatttgccgacagcaaaatcggacttcaagtccgattttcatttactaaaacaagggagatagtaattcgttatagtatagcttccccgaatatcggagttcggttttccgtgctttgctccttcggttttgctctcgttttcattcgaggtcccgaatggcggtgatttgttcgccatctgggacttcggctcgaaaagcgctatcgctttccctcgctttcgattggaaagcggagtcggatcaccatccctccgatttttcaaatcgggggtaggtcccctttattttaactcgtaaccctacctcaatagtaaaagtgatagtttttgaggtccgtttagccaaaaagatgaaaggcacaatacgtcacaaatttactccactgcttgttttctttcacttttgatacgagaccaatttgtgatttctggattttttttagctgtaagtgggtgcatccttttaacattccttccaaaatcagttttcatccctgttttacatcctaatcactcattactttaatttaatttaagttacatgtagctgtgcggtatgagtgagagcaacgatggtagctgtaagaatagaaaagtgtggcatcccaacagacaacgcatacatcacccttctcatgttagacaagtatttgaatttgaatttgttgcggtttaatcggctacctactcccggagacgcatctccgcgtacggtgatcgtgtcgctagatctctaggatatgagcccgcggtaggcgcccaatatgttagacaagcaacaagaaacttcacgctgccaataattccaatactaaggttgggaggggtactgtactaaattttcagtggagagtggggtactttaagagggtggggtactattagagggtggagtattacttgtaagtccccacccaaagtaatcaaaaatgagaggtggggtactaattgagggtggggcacaattagaggttttacagtatttagtccaacataccaaaaatggtccaggatggacaaattttcctgtagccatctgttacttttgctcagaccattcgtccaacgccggtgatggaggtagggcgccgccgggattgaactcacaacatacctgtagaacatagctcgttagaccgttacaccatacaggcgccccggtcatcgtctcttcgggctgggacttgacactgtctgattgcatattccaacactccccctcaatcgagagtgtcaggacctcctgattgcgacctatcctgcagcttgttggtccgactccaacgccgttgctgcaatgacctccctgggtttaaggccacccgtgtctccccctggaaacacattccgttcacagacacctcgtgttgtgacacgaaccacacaaccatcactacgatccacattccagcaaccattgaccatctgcgttctacgcgcttgggaaacgtattccttctccatgttgtaggtcggctagccgtgcacgttttgcagagtgtggaagacactccgcttggtcgaaatgtgccgcaggaccatttttctggcatctactgcacccattcgcactcctcgtccagcacaacgttcgttttgcgtacgctgcggttcattaccgtcctcgcgaacccgatttacgccgagtcctctacgatgcgcttagtcaacatttgccacacggccttcttcgttacgaggatcgacgatagcgatctccgctaggatgacgatgacgcacaagtggcgccaagtttgaaagtgcaacttgaagttgcgcctcgtcacagggtcttgatttgtgagtgaccatcactctgtggatcttcgatgtttggtgttatagcgaaacggcgcagtgcaaaatggcgccaagtttgaaagtgcaacttgaagttacgtctcgtcacagggtattgattggtttgagtcgcgggagaccatcactcagaacacgcattagccccggtgctccatgttgcacttcacttaaagcgacaggggaatgggcgataccgcgtttggaggcgtttggtaccgaagccgcctagcacaggtgggtctcattccgcaatttgcaagataccgggtaagcgcaagaagcccccccccccccgccgactcaacccccgtctacacgtatcaaagcgtcaagatgaagttcaatcagctctgcgacctcgacttcctgaccgccgagatccgcacgatggcatcggagctcaagctggtcggcttgctgggatggaagattgctggcaagcacgtcctgcggtgtctacaagagggcgcttccctgccggccctcgactccaacttcttctaccaggatgaaacggagaagaggacgaggaacagcccagagtatccggacctccacccgaccttcgtgagatactgggagctgtgcgaacgacttcccgaatacctccccccaagcagcgtcaattcgggtcccatgaggcgcgcgatggccgatacgatggagacgaacaccatcaacatgctgggtcttcactttcgaaggaggcttcaccagtacatccggttccgctacgcgacgacgggcaagctccaactcggctataaggcgacgcggaagctcgttgctggctgatatcgtgtcaaggaagtcccccacctcgatgtcgacggcgtggacaccggcaacgtggtctatgtatgggacgaaccaagatccactgcggagcgtgagctccacgactggcttggcttcgtgccctgggagtggcgcattcgccaaaacccgacccactttttcgtgaagctatacgacatgctccagtggatggaggcatttgtcgagaagcacccaaagacaaagggcgcgcgtctctactccctgcctccttactccagctcattcatccccgcacacgtgacgctaaacattacgtcgctgcatcaagtgttctgccgacttttcacggaccctgagcgtcaggcagaagtcaagacgtatgtgaaggacgagcttggcgtggaatgcggatctacagagcaagttcgccgccagtttagcgaaaacaaggatgctgtttttcggaagatgtttcggctaaatggacttgagaccagcacacgagagttcgcgtaccaaatcacaacggatggctatgcagcttccgttttgctgcgccgccagacgctttgccgcgaggatgacgacaacgcggaccagcctcgcaagcgccaaaagaataataaaggtgaagtagtcaaggctccggaagcggtcgaggaagacgccctcgaagcggcgatgaagaagttgccgcccggatatgctcctgacgtcatgatcggcatcgaccccggcgtgaggactgtgtgcaccgcggcatgtgaaggtagccttccaactcggcagtcgcgacgccgacggaatcgacaagggaagcgaaagcacaagatccgacgggcgaagcacaagcgcaagaaccgacacaggcagcggaccgtcgccatcaacacccgcgagtactaccacatgtccaaggctggcaagcatcgcttctggaacaacggtctgcgggagaaggaggcttcctacgccaagatccttgacggtatgccgacgttcaagacagcaagatatcaagtctacttggatgaactgcggtattttgtgaagcacgcaaagtacctggtgctgttctcggcacggcacttcttccggaagtggcgctttttactgtactgcatgaaaatgaaggcaatcgacactctggccaagcggcttgtgccgacaccaagtccacaggtgtgcgtcgcattcgggggctggagctgccaagacggactccggggcaaccctcgcgatccggtgaaggcgttcaggaaggcgctggagcggcgcgctactgtgctgccgatggacgagtttcggaacagtaagctgtgctcctgctgccaccagagtcttcgcagagcccgactgctgaccaaggtcaaggacaaagacaccaaggaggacaagatcgttttgaagggcaacagaaacgtcctgcactgtaagaacagtcgctgcagggcccacttctggaaccgagacgtcaacgctgccatcaacattttggagctgctcaagtgcaggctgcttgacctggcgaggctggcagcattccagcggtaatgacgaccaaggtttttgaaatatgtgaggataggctgttgtgtgggcatgcgctctgcgcattgtcagcgcaatggggttccgtacccgagcagacggtgtggaggagggaaactccgatgacacagaagccggtacatttttttagtttaaagaagggatttttttttccttttttggataaataaaaaggaggtggagacatagaaaaaaagcaagcaatggtgtacgacgtaaccgtagacgagtccagcgcgcagcagaacatggctggaatgaagtttagaaaaaggaacttgataaaccggtttatcaacttcgtcggcgcggggtttcaaagtttgaaggcggtatatcggtatttgctgttcaaaccaatactcttgcaaaaccaggaagtgtaacggatcgcaaacggctcagcttcgcttcctggagctcctatttgctcctcgcgcagatataattggcttcggataaagccgcaccctttcagtaaggtcgtggagaaaaggcaaaggcacgtacatgtagtttcctcactcttggcaccttttcccggcagcgtatccaagccgcactatcgttccaacgcaagaaaggcaaatggcgacagctgcgtacgccacctgcagcttctaggacgccgtggcgcgtagcaacctcaccatctttgctggagacgtcacatttcaattgtccctgtttcgagcacccctatcgtctaccacttctcgtcttcaacacttctcccggcccccaagctccacaacttcgttgtccctgaatcacatcaactctttgagagttcgccttcgctcctcgtgcttttatcggtaagtgctaaatgaatgccggaatcagcttttcgctatctagattgctctctctctctactaatatatgtagcgggccgcgccacaacgcgtgactacggcaaacgggcggtcaaataacccacttcactgtcgtcgccagaagcggtcgggttgcaagtgacgatggaccaactctcttccagtcgtgatttcaatgctgaaggaccagcctccactcgaggtgctcgaggtgttgatacagcaccatcgtctcctgtcgagtatgattctgaagattactgtgatgacactactgaagtgacggctacacgaggctacgcaaatggccagcagtcccaagtggaatctgctgttgctggagcaagaggagggcctgcccaaaacgtcactcacaactcagcatttgcgcgacttccgttatcagaacaagcaaggacgtcagcatcccaacagatacccttcacgcaatcagcacccccaataacttcgagtctaccctgcggtgatttccgtcggacgacttcgaactccgtaggacccggtgctggagctacgacaccaacgccgcaccagccacccgacgttactggccgtgacttttgtgagtggcctcccgagccgacggcgctgtatgatgcagacgatattgctcggatcccagcatgaatccgtgaggcggtactccagtttaggccaaattaaacgtgtacgccgatgcctctgccccgaagccatcggtctattacgttcaaatatggagtccgcgtgaagtgctggttccgcgaatcccttgttgtcgggtggttgtgcatggcaagcgatgcgtgccgtcgggatatcacgttcctgcccttccatggagaaaaaccactaatgctacaaagcacttgtgggagacgcaccaaatccagtctgaaaagacgaccctacagaatacgcgtaagcgggaccgcgctgaaggggtcaaccgcattctagcgtccgcgttatgccgtgacgatgcgaagcgtttgtgtttgttgctggagacgattcgaattgtctacaacaacttgccattccggtttggtgagtacgaagagtcagtcattctgaaggaagtcgtcacaaaagatgagttcaagacaacagtgaactcaagaacggtgacaaattcacttgtcgagttgtacgcatccggtcgccaagagctgatagggttcatcagagacaatcgtttgggacttatcaagtgtttgacgatggttgttgacttctggaccccaaagcatggtggcgaaaagtatctcggtttgcgcatctacttcgtcgactcccacttccgactgcgtactgtactcgtcatttcttgcccatgtatggagaacgcgaccaagggattcgcggcccttttgagcggtggatttgcggtattctgtttgactttggcctgtccccgagcgacttcttcggctccaccactgacagcggccccgacgttaaatggacgatgaacgaagggcttcgattgaagtgggaatggtgcatccctcacaaggtgaacgctgccaccaagatggcctgcggcttgacgcgaaaatcgcacaatcccgagatgtcggcgttgctaaacaagctatctcaaacggtgtacgacacctccaccaactcgacgcttggcgatctgcttcccatgctgatgataatgttgggggaaggcaatggtacccaactagtaggctacaagccgcatcgcttcatggggatggcagccacgatggagcgggttctggagaagtggccagctctggaggcatggtacgaggcgcgttcagctcagcatgcacggaaaaagaagcgagcgccaccagggtttcaccttgccggttgtcaacagcatttggtgcagctattatcaatccttacaccgattcttctcgtgacgaagcgatcacaggcgcaggatacgaatcaagtgcaagtcctgctgtccttgtatacgatgtgcatgacttctctcgcacttgacagccccatcaggcgctacgacacggctccgtcgaacgccgtcaatattcacccttttcaactaacatcgctggtggcgaggacaaggatgctgctacagaaggcgttttaccacaacttcttccgccgatatgtagacattgtatccggttcctacatttttgagatgcaactggtgatgtatccttcggttaagcacgtggggagtccgatggacgaagtgattgccgccgttgcacgtactgaagggagaatgcgggatgatcttgttgctggtcatgttgtcgccgtttgagctgcaattatgaagcgcttgaagtcgctaatgcgcttagtagccaacagtcaagacccagcacccgttgatccgattgctgctccagctgtgcaggccaatgttttcgatgacgacattttggcaacctttgcagttcaacccttccgaagcaccgaacgacctgctcaacaacgtaacaagcacgatactctcatcgccggtgagctgaaaaggtggctagaagattcggatgggctgcagatgataacagttcctgatccagccaagacgagcgtccgcagaccggagagtatcctggaattttggcatcggcagcagcagtccaagcgctatgtcttgctacccatggttgctcgcatcctgtttgcagtcccatcttcgtctgctcagattgaaagggacttcggcaacagtgggcaaatggtgactgccctgcgagcttctacaagcacggctaatatcgacatggcttgcttccttcatcaaaaccggtcatttgtcgatgtgtgccagtgcccaaagctgaaagcatccgaagtcgacgaacacattccaagcaatgtcaagattaacctggaacccgaggtagtggagcgaatggaatggaatcagctggcacaagcgtgcttttcgacatcaagcgcaagcgcatttgcttcttacaacgaggaggagacgaaagactcaagctgttagtttaaacgagtaggaggcgaaagactccagctggtagtttaactgcttcatatattcaaatatattcacctagcatattcgaagtggctttagtagtcaattccatgagtttgtcaagtccagcatgggataaacattacgaatactgcagcgcttttaccttcgcttggtgtgatttctccagcgcacttgcacgttcggcagcgcgtaatgctgtttcgagtgtcagttccgcgcggatttggtccagtctcgatagattggccacggcttgcggcttcgaggtttgagctgcggttggtttacgcctcactttacctgctccagctctaagaacgcctttggggtgcaatgctggctgatcgttgctgtaggaagtcttgcgaccttgtcgaccttgtcgacctggggaactagctgcttcatgatccgactttgcctcgtgcagcgatttcattgttgcttcgatcgagttcctgaatgaagtcatcgcttgattcacctctgcctttattcgggaatccataatattctccttgtcttgaagaatactctggttcgagacaacatcttgctgattgtggccctgtgtagccatctccgcacgaagtttcacaaatttacgctcctgcttgcgctgcagcttgtttagttttgcgtcaaaacgcagctccactatcagcaacaagtttttgagatccgctgtctagattctgtctttcagcgcgcaactgggcagaaatcaaatcagccacgctggagtcacgctgttgaagacgttcatcgacataggctttcattaccgctgtcgctttattattcaccgctgtactgcacgactccatcgctatctgaaagaagtgctgcgtccacgacttcgtgtcctccactttgcagtccaggtcactcatatgcgcctgcatctcggttcgtatcctctcttctgaagccccttactacactgtctcgcctgcacagctaattggcgctcgacttctgcaacgtgatgttctcgctctgcacgaaggtgagcttgaatatcgttctgcaggctgcgtgtctgaacttgaagctcttcattaagtcggtgtgatgcttgaataccttctaccatctgctcgttcattcggcgctcactttcttggcgggtctggcgcaccagagtttgttcttccgtcctgcgtctggcctcctgcagctgaagctccatggcttgacgctcgatgcttccgtccaccagcaccagatcttcttgtacggataggtgtttctgctgatccttgatggaaatgcttcggttgcgcctcgcgtgtggcgggtttccgctttgcagagcttgatcatcgtcgtggagctcacttgtgtacgatacaagaggcgcgtatgagtgctgcatactgcctcgactggtgagcaagatgcaatggcgttcacggtgcagggaaagataccgtatttcgcatgtagaaagctgcaccggcatatgagatgcactttgataactaccattcttttttttacttgctcaaaaggatttatctcattttctttttattattattgtttttctttttaggctggtggaacagtgatctttcgctaaggttcctacattttcactttggtcaccgcacgtcgcatgcagagcccgggatgacttcagcggccactggaccgctgaagtgctggtctacgctgcatctattagggtggtgctgctgaaggtgcctccccatgctacgtctatttgccagcctgcagacgtagcatggaatcatccgttcaagacttggctgcgcaggttttggctcgaggacatccagcggcaactgatgcagccgcgcgacgcggaagccaagtttaagctgactccaccaggccgcgccgggatgtgccattggattcgcgctagttgggagagcctgagctccgacaccatcgcgaatggatacaagaaatgcgacttacacctcaacgaggagtgcctcgccgccgcgtcgctggtggcagagctgcagaacctatcgctagtagggccagtggccaaggcggtcgaccaaactcaagacttcgaccgcaatgtcattcttgacgaagctgtggtgtagctttcttctacaatacatattttgatgcacatcgttttttaaaggtatgttttctgttgtgaacatcatgtgcagctttctacatgcgaaatacggtatgtgctctggtaaggccgcgcacttaaccgagaagtgcccgacgtctcacatcaaggctatccagccaatgggagaagctaggcatgaactcgtcgtttcgttctctcgaataagttaaaccttcgttcgcttcctcccgcttaagttttcatgcgtttgaaccttaaaacctcaggaactgcggttcctgaggttaatggattcgtcagttccgtggccagccatgcagcagaagctgctgcgcgacgcgcagtcgacggacgagatggcgcgcctgctcagccaggagatctctctgtttcagcgcaacatgtacaaaaaccacagccagcaccggcgcgccttcttcttccagaacctgcagcaggtcaagcgccgtctgcgcgatttcaaggtggagaccctcaccggctgctttgcggaggctgcgggcgtcttgaagcaactggagctcgacgcaggagcgcaccacatttcctggaagctgctggcctccgacctcaaggtcggcacggacgccgtgctgcgcaagctcgtgacgctcacaagggcggccgccgaggtgatccgagcagctcagaaggcctacaaaggtgcggaactgtagcgtttatactggtgtgctgtgtgtactgagctgatttggtggtggtgtgcttctgtgtgcagctttaatggtgcagttcgccatgacgtacttcatgccgttcgcgctcatgatgaacagcgtcctggcgcggttgacggtgctgttcaagacagtgatcgtgcgggcgatcgagctgcacggaggcatcacgctgctgtatctgaacgaggtgaccaagtcgaacccgctgcgagccaaggtcactgccgtgcagctccgcgggtaccagattcccagtgacattctccagctcgccaatgcgtagattggacaataagcattaggtacaggcagaagcgaggagtaacacacgtcgtaaaatacatgatatagacagcaagccagcatgaatccaacatactacaggtatgcggtcgcctcgtgaggtatcgggaacggggactgcagacaaaatggagcagctttgttgcgcggaagacactggcgactactgcgcagtctctaatcacgagctgttcgggggagtggtgtagccaacgatcgtcttgtggaactccacgacaccctgtgagagcagtcaactcctccaagtcaatagccgattccgtcgagactattttcaataaaaccacgcacctgcacgctgaggtccagtactcgtgtcgtcatgtcctcatccatttccacctgcacaccaatagtacgcatcgtgggcgctgcgcaacacaactccagtcagcagcatacgcacccccaaatcccagtacgctccaattcaaagctcctcaccgctacaggtacacgacttcttggagagaccacagcgattacacttgtagttggatggcacgagtggacacacgtggcccttcttgggctctccacactgcagccagccagccatacgcacagcaaattagctcccagctccaccctaccagcacccgatatcttcctccttcgcaccttgctgcagcggtagtttcctcggttccggttctgctgcgtcttggtgctcaggtccaggtcgaagctggcggcgtccagccccgccatggccttgttgccgtcctgcagctggtccatgaagccgcccgtcgggtccgccatcatgggcatggcccctatgccgtagtccatcatccccactacatgggaccgagcccaaaccgtcagttctgcacccaaatcttacatcaagccacggtcattatagtacgcactgccattcacgtccatgggcatgttcccgttcatcttgcacgcgctcggctgaccgaagcaaatgtgcgtcttgcgtgcgggataaggttgacgagctgagaaaaatttcggccgcgtcacaccacgtttacaccatctacctattcagccacatactacacgccgcatgccgtagcatgggaattgagccatccgccccaagtcagcgactccatccaaagactcgagccatgtccttcagcttcggccagaccagcggcggcggcagctccggcggcttctcgttcggcgccagcagcgccgcggcgccggcctcgacgtccactgcggctccgagtggcggcttcagcttcggctccacggcgtccacgacggcgtccactgccgcagccccgagcggcggcggcttttccttcggcgccgcccccgcgacgtccacggcgccgtcctcgggcttcagcttcggcgccggcgccaaggccacgagcgcggcgcccagcaccagcagcagcggaggattcagcttcggagcgacgtcggcagcccccgcggaggccaagagcagcgcagcgccggctcc

SEQ ID NO: 215 - DNA, 20897 bp, Phytophthora sp.
  source 1..20897: mol_type = other DNA
agtaatcgccacgcggtgcccacgaaagatccgtgacctcagcgcaatggccgttaatcgaaattgctggcaggaaaagtttcgatggcactggctgctgctcccagcgctccaactgtccgccaaagctcagcgacaggagattcagacggccaccacgtgcaggtaacacacctgccgacagcaacccgttgccgcccatttcaccaacacgaagggacggggtccacgagctgcgagtgtctgcagactttgtccacacaatgagcgtattgtccatggacgaggaaagcagcgctgtctcgcaaggatcttcactctcatcatctcgcggtaactgcgtccactgcaccgacgtgacccagtcttcatgaccgactagtagcgcatcaaagctcacggtatacgtcgtgcgggcaccacgcgcaaggaatccgtctttaacttcaccagaggaagctccttcaccttgacctctcgatcgagcagtaactttccatacacgaattcgctgatcctgcgacgctgacgcgagcattgccactacattccctacgtcttccttctcctgttgcttaaacgcgacactgcggatccacccctgatgtccttccagcgccagcaactccgtcaactgatcactcccgtccgctacttcaaacaaatgaaccttggaatccaccccacccgtcgccagcagcacactctcctccacttctccttctcctcccttcaccacaagagcatccattgtctccatgatactcttgacgccaagctccagtcgactcagcagcttcacctcctcctcctcctcgctccctttaccccgaccgaaaaccgccaacgtcccgtccgagaacgcagcaaagtagagtcgacgtctatgcgtctcggcaggcgtcacggcagccaccgtcaccgccggcagcttctgactctcgtgcgtgaccttctggagctgccaaccgctcgttgacaccttggaccagaggaacacgcgcccgtccgagtcccccgcgagcacctgcacgctctccgattgtgcatcgtattgcatcatgacgctcgtgagtctcgaggcgtcggaggtcgcgtcccgatgcttcaacgtctccgcaatggccattggggcggagtttgtgtcatcgtcgacgctgctgcgcagcagacacacgacgttcctggctgcaaacgcgccgcagtagttgcaagacctagatgaagttgaggagctactgggacgcacggacagggcgttcgtggcggcgttgcagcccacggcgacatgagccaacgtcgcctgcaccatcgccatccgatgaattagagctgttcactttagtgtctgaatggactcgaattagtgacaaaaaggctacttaacaacttcaatgttgctcaatttacaaaatcagacgacatggcgctaaatatagtccgatatacacaaatcagaatacgcgacataatgcacgatccgaattctcgcagaagactcgtgggctgcgcaacggaaagcagcaccgtcactggcgtggattgctgtgctgcgccacaagctgccacagacctcgtacaagaaggtgctggtgcagctgccggacggaatcatgccgcacctgaccaaaacccgctgctgctcgccgacttccttataccaggtaagcatcggtgcagtcacgagtctgctggcgctgaacagtctgttcatcctcacaacttcgactcgcccgacttctacaacaagctgtatgcgctgctggacgaccacgttgtactctgccaagcagcgcggccgcttcttcggcctgttgaacctcttcctctcgccgacccacttgccggcgtacacggtggcggctttcgccaagcggctgtcgcgcagtgccctcatggtggagccgggcgctatcctgtttattatcccgatggtgtacaagttgaatctgcgtcacatggagtgcttgtagcttatcgagtttggactcatcaacaccttccgcacgcacaacgtgctggtcgacacgctgctctgcatgctcgtgccgctgctcatccagaagggcgtggcctacgtgcagcagtcgcccaagtccctcttcgccgtgttcaggcacttcctcttcccggagaaggaggagcgccgcgtctcgcgagtcatcgaggtcaagcagcgcttcaaccgctggggcaaggtctgggactacgacccgaagaaccacctggctgcagaaggtcatctcgctctacctggccgacgtgctggacctcaagagcagaaacgcccagtacgagctgctcgaaaagaccaagcggaggagatcaaagaccaccaaggccaccatggtgaaatgaagaatgaaagcaacaaaagaacgagagtgcagaattagagaaatccgagaaagggaggagaacgtatttatcgtttttggccactcatatattccagacttcaactgcggcgccccacccggcttcggctgtggcgacatctcctgcctggctttggctgtggcgacccacaagctggtgcctatggactataaagatgggggtcaggcgcatcgtgggcgatcacgacgacacaatggatcaaggcaccaaagactacgtgcggtcgactcgagcgtctccaacttgtccgctgacgatgtacgcggactccgagacagcaatggggagctggtgcggtgcgctggatgttcggaagctcgtgggcaccaacatgaatggagacgccttgcgttgctctacaatagtccgcgtggccacgatcagatccaccacgggctatttcgcgtcaattcctggcgcagagattcggtcgacgatagcgatctccgccaggatgacgatgacgcacaagtggcgccaagtttgaaagtgcaacttgaagttgcgcctcgtcacagggtcttgatttgtgagtgaccatcactgtaacggggttatatggaatagtgaccctgtcactattccgggatggctacatcggtcactcccctggatagtgacccaagtggcctcagagccaacagatacattttgtatgacacaaactatagggaacttaggatttgtatgcaggccaaatctataccaacctataaatacattcagtcttagatctaccgcttttcaagtcaagtcgtccccttcagaccagggacacgtgaacggctgttcacttggagtttgtatactcctgcttcctctgttaagaagtgctgtgtgccccgtcacacttggtagcacttgtagtcaatcctacgcctacgcgggtagattggactacctgaatcctctgtggtctcatcgagtgagccaagatggatcgtacggagtttccccatctgaacaactcgcagtacgagtccgttcgtaagatggcaggcatctttgggacagatgccctgcgtagcttagcggcggcgacgccggctgagcaggttgagcgtatcaacgcgttcgacacctacgagcgagggctcatcggccacgttcaagggcttcaggccactgcggccgcgccgaagccggtgcaaccgaagcccctgcggctgaaggttcaccccttcgaagggaaggaaggagaaaaccttcacttctgggttcgagaggttgagctcgcgatggacgcggctctcgtctcggacgagcgactccgtgtcgcctttgcgctctccaaccttagtggtcgcgctaagagttgggcgtatacccgcgaagcgacgacgcctggatgcttcgcatcatggtctcagctgtgcgagcagctgcgggccgcgtttcttccggcgaactacgagtaccgccagcgttcgcgcttcctcgcctgcaaacaaggaaggcgcgagctgcatgagtacatccaggagatgcgagtgctcactgcctctttggtggggaaccccctgcctgaacacatcaaggtgaccgtgttcatggacggtctgcgtgtcggtcctgcccgcacgcaactgttccgtgtgcaagcaaacactatggaggaggcgattcagatcgccctccaggaggagtacagccacaagcaggctcgtacccccgccacggtatggcagagcaaccctgcctctggcggtgcgcctaatggtaactccggcaatggagcgatcaacgggccggttcccatggatctgggcatggccgagcagagcgacattcgctgctacggctgtggtaagcttgggcacatgaaacgtgcttgtcccgcgggaggactgaagaacaagttctcttcgaagccctatggctctaggggtcgctggcagaagccgcgccccaggaaccaggggaacgccggacaccagtaggggcggggcgccctactggggaaacactaagtcttcgtgaggggcgtgcgggtggcgcacgccatggggacttagcccctgagagtctctgtactctcgaagcggagaagggcagcggtgggctgcttgtggtgcacgcgagtgtaccgggatacgatcatcccttgagaatcttgatcgactctggggcgtccaagaactttgcgcgccgccagactgtcgcacgcaatcccgacaagtacgccgatgcgctacgaggcagcaaaggcaacgggctggtctcggtaagactggccgacggtacggtggtagaagtacctcgggtccacatggacctcactgtcaagttcgaggacttcgacagcacggagccgttcttggtcctagacatggacaagtacgacttgatccttggcatgccgtggctggagaaacacgagccttggatcgactggcgcggcaaggccatcggggccagccgtcccccacgctctgacagagctttcgtgagtcatgttcccacctctggcagcagctggagcgcccgcgagggccgccagggcgcagcagcgtctaatgagttcttggggtccgtcgagactgacgacgactccgaccgggccggacaaggcctgagagtggaggtgccggacagcacctaccaggtgggtaacgtaggtccacacgcgggtaacgaagtaccgcaggcagcaagggctgctggagaaggtgccgctggcgttggcgtgggtaaccaagttccacgcgaggtcactcagaccgtaactgatgaggaaggcactgcaggcacttctgatgtgggtaacatagttccacaggaggtcgctcagaccatcactgatgcggaagtcgctggaagcgctcctggtgtcggtaaccaagttccacacggcgaggtgggtaacatagttccacccagcaaggcgggtaaccaagttccgctcaagaacaaggcgggtaaccaagttccgctcaaggacaaggcgggtaacgtagttccgcacaagatcgagaagaccggtggtgccgtcaaggcggcgccacgagacgaagacacccgagagtcacgtcgtaagccgggcctagtcgtgtgatcgacgacgccagtcgccagcgactccgagcctccagccaaggctccagccgccgaagagtgttatcacatcttcgacggcgtgaccggtcgtcgggtcaagacaggagctgtcgagcttacagctctgcccgaggtttcagagttgctgaaccttgaggagctctcaatggaggacttcttggccgagctaaaggccggggagatcgcagagttggttctcctccgaccggagtccacgtcggccgtgttgaactcgtcctcggtcatggaccaggcagtcctggaggagttccagagacagcgcgcgtcgcgcatggactctgagattcttaagaacccccgggacccggtgtaccccttggtgaaggagttcgaggacgtggtgtccaaggatccaccgtccaatcgccctccggacaggggaatcaggcacgagatcgatctcgtgccggggacgaagtactgtgtcacgaggcaatggccttttccccgggagcagtgttaagtcattgatgccttctttgccgccaaggcgaaggcgggcatggtgcgggagtcgaagtccccgcactcgacgcctaccttctgtgttcgcaaaccgaatggaaagtggcgtctggttcatgcttataacaagctgaacagcgcgacagtgcctgcgcagacaccgatcccgcgcaaggacgtgttgctcaacaacatggctggctgcacgctgtatagcgcgctggacctggtggacgggtactaccagatcctgatgcgcgagagcgacatcccactcacggctgtgagcacgccgagcggtaagctctgggagtggctggtcatgcctcaggggctttctaacgccccggcaacgttcaatcgcttggccacacaactgttccgacctttgcgtgcgttcacacagacgtactttggcgacatcttcgtccacagccgcgccgtggcaggccagacggccatggaggtgcatctccagcaccttcgacgtgtgttcgaagtcatgcgggcgaacaagctgtacgccaagtgtgtgttcgcagctgaggagatcaaggtcctgggctgcttcgtcagcagcgccggggtctgggcggacccggagaaggtgaaaaccatcgcggcttggccgccacctcggtcgcagaaggacctacgacagtggttgggcctcgccaactacctgcacaagtatagtgcaggctacgccgagctggcacggcccttgtcggatctcctgaagaagaatgtcgactggcgctgggagcgtcgccatcaagatgcttttaacgacatcaaagcgagcttacagcgcgcgccagtcctcgcattgccggacgagacgaagcctttcagcgtagtctgtgatgcgtctgactacgcaattggctgtgcgctattgcaggccgacgatgaaggccgcgaacgggtcatctcgttccagtccaggcagctcaaggcagccgaacggaactatccagtccacgacaaggactacttgccatgaagtacgctcttgtcaagttccgagtgcacctcctgggctcgacgccctttgtcgtttatacagaccacgcgtccttgcggactgccgtcaacacgccgcatctctcacagcggatggcgcgttggctgtcattcttcgcggaatacaacttccgtgtcgagtacaagacgggcaagttgaacgtgcttgtcgacgcgctgtcgcgccgacccgactacgagcttcctcatattagtcgggtcacgacggatctgtatgatcgtatcaggctggggtaccgagacgatgccagtctcgaacctcttgtgcggttcttggccgctggctcggaagccaaggccgagtggctcacgccccgacaacgtgcaaggctgcaccgctatgagtgggctgacggtttgctccactatagggtcgagcccgaggatcctccccgtattgtcgtgcccaacgacgaggatctcaagtacgacatcctgatggaggcgcacgacgctccatccagtggccatctcggccgtgagaagacgtacgcgtctgtctcgctgatgttttggtggcgtcacatgtacaagtgggtcgccacctacgtccgtacgtgcgagacgtgccagcgcgtgaagcctgccggtcacgcctcggcaccattgcagagcctgccggtcccagcggactgctggaagtcgatgagtctcgactttgccttcggacttccggccgatgaccgtggcaacactggtgttgttgccttcgtgtgccgtctgagcaagatggtccactttgctccagttcgtgacaccggcactggcgacgaggtcgctcgcctgttcatggactgtgtcttccgacaccacggtctgcccgagaccattgtctctgatcgagacacgcggttcaccgctacgttctggcagacgctgtttcgccttctcggcacacgactgtcgatgtcgacggcggaccacccgcagacggatggccagacggagcgcgtcaatcgcgtgctcgaagacacgctccgcagtatctgcgcggagatgccccgcttttgggctgatcgcttgcccatggttgagttcgcactcaacaatgcggtacatgcatcgacgggctttacgcccttttacctgaacgggttgcgccaccctcaggtgccgctcacattacgaggcagtaccggggcttcggtcctaagtgggggagaggctcggaaaaccttttcctcccaagtctcggacgtgagtccagccaccttgcggaagcaactgtcctcgtttgccgaagacaggctggacataatcagcagggtgcgagacaccatggcgcaagcccaagataaacagaaggagtactctgaccgaaatggaagaggaaacatgaacgtgtttaaggttggggatttagttctcctagatactagaaacctaccgctgaggccaccgccggccctccttgatcgtaatgggcagatccgctaccacgtggaccgagtcgtccgggagcggcagctccatgacaagcgccagctgctcgtgaagtggagcggttaccctgagtcggataactcgtgggagcccgttgagcagctccaggcagactgcccgaaggctgttgcgatatgggacgagaagcagcggcagcttcgtaagtagtccttggcttcttggccggtacccggggcacggttgcagacgtagtcgcaccacgcccacgctcttcacgagcttcggctctcgcctcttgcttcagctcgtccatcttcgaggcgacctggaagctgaacgcttcttcgccttggcctcggcggccttcgcagcggcagccgctttcgacgcttgggcacgctcacgaccttgtgccagcatcagatgcttggatgccagcacctccttgggcttggagcccgcgtcgctcggcgacttctcggccacgaccccagcgtcggtcacagcgacttcgtcgtgcgactgcttgctgtcgcctgagccggactcggcgtcctccgcctccttctctgacaaggcctttgcgtcggccgaggcgttggtcatgtcgcctgccgccagctccgtgccttcggcagcgtgcgtgctgccctccgagacgttctcgtcgtcgggtgaactctcaccggagtactggaccatcgtgcagtcaaagacggcggcttcccagtcgcgagtcgggcttttatggccccgaggactctcctccttgctttgcgcggcgtcaggagacttgctccgagccccggcctcacggccactctcctgcgtgctgctacgagagcgcaccacattctcggccgccttcgtggcctccatcagcgcggacgactcgtccttggccttggccgccctggttatcggccctacggcccgcggtttcggaggtgctttcgcactgcgctttggaggcatgcttccggtcgacgtggagaccctgcggcttgctcggcgatgcgccagttgctctgtgaggcccgggagccaaggcaccagagctcgcgccgttgtcgatggatttcgactttgcgagtcaaatgtgagtcgccggcgtaacctcgctctgattggtcgataagatcgaatctaagtgggggaggatgtaacggggttacatggaatagtgaccctgtcactattccgggatggctacatcggtcactcccctggatagtgactcaagtggcctcagagccaacagatacattttgtatgacacaaactatagggaacttaggatttgtatgcaggccaaatctataccaacctataaatacattcagtcttagatctaccgcttttcaagtcaagtcgtccccttcagaccagggacacgtgaacggctgttcacttggagtttgtatactcctgcttcctctgttaagaagtgctgtgtgccccgtcacaatcactctgtggatcttcgatgtttggtgtaaaagcgaaacagcgcagtgcaaaatgggtccaagtttgaaagtgcaacttgaagttacgtctcgtcacagggtattgattggcttgagtcgcgggagatcatcactccgaacacgcattagccccggtgctccaggttgcgcttcacttaaagcgacaggggaatgggcgataccgcgtttggatgcgtctggtaccgaagccgcctagcacaggtgggtctcattccgcaatttgcaacatgccgggtaagcgcaagaagccccccgccggctcgaccgactcaacccccgtctacacgtatcaaagcgtcaagatgaagctcaatcagctctgcgacctcgacttcctgaccgacgagatccgcacgatggcatcggagctcaagctggtctgtttgctgcgatggaagattgctggcatgcacgtcctgcggtatctacaagagggcgctgccctgccggccctcgactctaacttcttctaccggtgctgcagcgcctcgctggatgaaacggagaagagaacgaggaacagcccagagtatccggacctccacccgaccttcatgagatactgggagctgtgcgaacgacttcccgaatacctccccccaagcagcgtcaattcgggtcccatgaggcgcgcgatggccgatacgatggagacgaacaccatcaacatgctggctcttcactttcgaaggagacttcaccagtacatccggttccgctacgcgacgacgggcaagctccaactcggctataaggcgacgcggacgctcgttgctggctgctatcgtgtcaaggaagtcccccacctcgacgtcgacggcgtggacaccggcaacgtggcctatgtatgggacgaaccaagatccactgcggagcgtgagctccgcgactggcttggcttcgtgccctgggagtggcgcattcgccaaaacccgacgcactttatcgtgaagctatacgacatgctccagtagatggaggcatttgtcgagaagcacccaaagacaaagggcgcgcgtctctactccctgctcccttactccagctcattgatccccgcaaacgtgacgctaaacattacgtcgctgcatcaagtgttctaccgacttttcacggaccctgagcgtcaggcagaagtcaagacgtacgtgaaggacgagcttggtgtggaatgcggatctacagagcaagttcgccgccagtttagcaaaaacaaggatgctgtttttcggaagatgtttcggctaaatggacttgagaccagcacacgggagttcgcgtaccaaatcacaacggatggctatgcagcttccgttctgctgcgccaccagacgcctcgccgcgaggatgacgacaacccggaccagcctcgcaagcgccaaaagaataataaaggtgaggtagtcatgctccggaagcggtcgaggaagatgccctcgaagcggcgatgaagaagttgccgcccggatatgctcctgacgtcatgatcggcatcgaccccggcgtgaggactctgtgcaccgcggcatgtgaaggtagccttccaactcggcagtcgcgacgccgacgtaatcgacaagggaagcgaaagcacaagaaccgacgggcgaaacacaagcgcatgaaccgacacgggcagcggatcgtcgccatcaacacccgcgagtactaccacatgtccaagattggcaaacatcgcttctggaacaacggtctgcgggagaaggaggcttcgtacgccaagatccttgacggtatgccgacgttcaagacagcaagatatcaagtctacttggatcgactgcggtattttctgaagcacgcagagtacctggtgctgttctcggcacagcactccttccggaagtggcgctttttactgtaccgcatgaaaatgaaggcaatcgacactctggccaagcggcttgtgccgaccccaagtccacatgtgtgcgtcgcattcggggactggagctgccaagatggactccggggcaaccctcgcgctccggtgaaggcgttcaggaaggcgctggagcggcgcgctactgtgctgccgatggacgagtttcggacgagcaagctgtgctcttgctgccaccagagccttcgcagagcccgactgcagaccaaggtcaaggataaggagaacaagatcgttttgaagggcaacagaaacgtcctgtactgtaagaacagtcgctgcagggcccacttctggaaccgagacgtcaacgctgccatcaacatttttttcagagataatgcagcgatgggggcgcagtcaaatcattttcggatacgtgttagctagtcgagctccgtgttgtagctggacgaagccccaaccagtgtaactgggctgacacgtgaccaggcccctcttccatctgttccgcgagtgatcttgttgttgcctcgttcatcctggtgtatcgctcgaacgcgtcggaggaccatcttccgaataatttgattgtgagcctgtcgaccccagccgcgaagagtgccgtgagttccgaaagttgaagggtctgcccccgcggcggcagcggcacacttgattgcttcagccagacgatttgcggcgaggaccttgccggtaccggtagcacagagagcttcattgctgccgaaaatgcgagcattctgtgctagctcccatgttgctagcactgggcacagccatgcagagcccgatctgtgtagtgttctcgtagccccggccccgacttggtctgacttgctgccgcggaacttgatcgagactgcagccaccttgtcgattgagcgagccggggcctcttgcgtggagaggaattgcacgtcgttgactcgaataatgtatgccttcacctttgtaccatccgcgaggtactccgaccgcttcagtagaaagaagaagcccatgaccgcagccccccagagcacgcggtcgtgggctgactggaagttgcatcttctccgtatttcgcgtaggctggccattgtgactggttactttggcgtggaggtggtgacaaccgctgcatcccccgcacggccatgttgtgtcccgcgtgcagcccgaccgagtatcaggggttacggatatgataccaagacacatggctgatcgcggccaacacggtattcgctgagaggggttttcctgaatttgcccagtagtggacggcaaacaacgcaagctggtaggagtgctcctgcatgtcggcgggaagccacttgcagtatccgttcgctgagcaccacgctgaccatcgtttccacgtggcggcgtactttggtcgggactgcgcggccaatgagtagtattgtaattgagcgagaagtccgtgtagatcttgcgtagcgctggtggtactggaatctaagaccacgcagacgataagttagaccaggtgtcactaaatggtgatgtccacgctcgagatccggcatccgccattgtgtttatcgccccaggaagatgcccacacgaaatacgaaagccaaatatcgcctccgccagtccgatcgctcggttaagcacttgcgccagtggattggagctcgatagccggtttgtccatgccacagccgaagtgttatcagaccatgctctgacaaagatcatgggtttagctggggttgacgcccactcaggtccaaatatccacgccgctaaggccacacatagatgctcccggacatttatgttaaatccatccgagcctgatgctgcgtgaatgcgtgcttgttcttcttcatcaaatcgcacttggatgtattgctgcgtggcgggattgaagacggccaggccactgttgctggcgtccatgtaaagatgaacatcgatgggttgttgatccgtaaaccttgctaggggtagctgttgaagccggccatgagttaggatcatggtaaaccactgcagatcacagaccatcgaattctcgacagctattcttccatagcgtggcgctcgaatactcgcggcatgtagtcgttggtagaatggttttgcggcgcggagacacgaacaaacatggcgtagacttcctaggagttgctgcagctgggttcgagtgatgtgttgctgaattgctaatgattgaacccgaacaagggctttagcgattttttcgcgaggcattgacaccgtccgtgcagcgatgtcaaacaccagtcccaacacttgaaggcttgattcccacgagctaaagttgtcttcgttgattgctccgggaccgagaatcgctagcatcgccagtcgtagcgtttcaattgcgagaaatagccggtttccggtgtcaggttcgacgaggacatgatcatcgacccattcgtaggcaaaaatgggtcgtggtcgcgagaggttttgtccatggaggcggggctttcgcgactaactaaccacgtgatggcaccaccaaatgcgccataaaaggcgggagaacttgtccacccgactggagcggacatatccacgatcagtacaccaagttcagggattgtggccgccatccagcgaacatggccgctagccagcattaggtggcggaacgctcctttcacgtcgcccttcatgatcattatagcggctcccttgtatcgagcgtggcatgcttcaattcgtttcgcgatcgcagccacgtgtttatactcgacgtcaggacaatcttctgttcttgatgcatcgtttgtcgagtgaccgcgggggaatgagaggtcatgaattagccttacttcgtcttcaggagaacaatcctttttcggtactgcgccgagggggctgatctgaatattttcccgatgccgaagcactttagcatcgagaacgaggtactgccccgcatcttggcccttgcgaatggccctgatgacagcgttgaaatgtcgagatgccgatcggtggctttttaatcggtttcgtttgagaggggtcgtgctacttccaagttggttgaataccagtgcgggctatctgcaccaagaggtccttgtgtcggtagccatccgagtgaaacgagacggatacattgtcttgttcgggcgaaaatcacctcgctcctggtctcgtaccagttcaacaatgtcttggaggcgcatcttgtgttcacatgccatcgccgtagtaacacgctgcagttccgtgttaagttggcagtgaccgttgctctggcggagagggacgtctcgtgggggatctaccccgagccgcgtgcagaatgcgttgaacgcttgcacttggctagctacacgtgctgtcgcccgctcactcagtatccgttggacgtgacttgccatcgacttcggctcttgtaaggggaccgtgacggagttcagcgtttgtcgcggtagcttcgttgcgtatagacatagttccgggcgcccttcacgttgtagctggggtgctggcgtagcggtgggactagcacgcgcgcgagctactggtacctggcgcattgttccgacgcgcagctgagccgttttgttgctggatgtgattttgcgcgggtcgagcttgctaagtatgggcaactccgcaccgctgttctggtaaccaccatttattctcggggttttgccggcaccactggtacgaacaagatgccgagttggtgactcctgctgagccgtggcaggtaaaccaggctgtgttgcctgacgggggccgtgaaattgagacttcagtggctcgagctgagccgtgccgagcaaactgctacgacctgaagcacgagaccggtgatgtcgggtgcacggaaactcaaactgagtcaagccacgcgagctgcgtggattgcactcctgagaccgggggagtacgcgccgcggggattcgagctggaatatccgggccagcgtggcgttgtaggcgggttgtgagctgatgtgagctagttccgcgtcgtgttcgttggagagggtagcgggatgctctgctcccgacaaggtaactgggggtacgtactgagaagccgagtctattgaggcgtctaatacgtgatggtccacactactctgtccaaggtcgcaaggaccatcgcttcctggacgtcttcatgtggaggtatacttgctattgatgccgccgaatctgtggcggatgtagcctatgagcttctccgtcagcgctgccgggaagaagtgcactctgctggcgtagtcgcacacattcgggtcgcttgatggacagccgcgctttgacaggaacttcaagcagacttccttcccatcctgacgtggaattgggatgtcctcaggtactttcctccctttgttgctaccgtgccgctggggacgtggtggccgtggttgctcatcggagcgagtggtgttgcagggagccgaccgcgtcattgcctccatcttttctcgctgagcggttagtataagcccgtgtagctcgaggttgtctggaataaatcgtgacgaaatcaggtttcttgttgctgtcccatttacaccgtcgaccgccaccgcgttcctgtattgctcgagttgtgagtcgatccacagtactagcgtgagaagcatgtcctggggccacctgtttcgactcttgagagcaccgatgaagttgtagagtgtcgtggcgagttgttgggtcaccacatcacacatcaccgcacagtattgctgaaaaccgatcgcaccggccaggatgtcgtcccacgacgaggggtccgaggctggtagaaacttggcagagacggagaaatcactcatgttcacgaagctttcccgctgacgcttgagccgaaccaaatgatccacaggcgtaaagtgtagaaacgaaagtccacgacttccaaactggaggtcatacgcgcgcattgcgacaccggggtaggcccacaacaggagctcggcgttggacaccattgaatccatacaagaggcgggagacttacctttgtaagcatctgaggtgacgatgtcatgaacttggcgttgctcgggcgttggtgcaaagctgattttactccgtttggctgtccctctgtcttccgctttttccgctgggcgtttagctccagtggcgggcactcggcgagactccatgaggtggggtaggaggtgcggtttgtgcatccgcattagatccagaatttcaacttcggctgaagtctcggtaatcattcgctctgctaccaccggtacagccgagcacggtacgtgcccgctttggccctgttgctccggggcaggccccgcgggtcttggctgagtatgttgcgagcgattgatgggcaccaggcgcccttcatttgcagcaccgttggtgccgttcgatattaaagcttgcgcgagcacggcttcgtctgccgcggtttctgcatcgtcgtccacggcagtcatgtcgaagaatgcggtggtgtcgggagctgcagtagccgttccttcatcgttccgacttcgtgtagacgaacccacgctcgttccaacgggttgggttgggttcaggtcgcagaaagaggaaccaaaggaggattccatgtccaccggagcatttttcccaccgtcgatgtaatatacgtagttgattacatgctgaagcgagactcgggcgcgctttcctgtgcaagggacgatccaggtgtacattcggtcgtatgcgggtgacgcttcgggtagcagcagtccatgcatgagttgggctactggccgtcgtacaagctggatttaacaggcgatccatgatggcaccatgcatttcgtctagttggtcgtaactccagctgtcaagcgggaactcgtgacaccccatgaccattgctaccacgggatacaccgagtcgcagatatcggccttgttggtctccaccggacctgacttcgtgctgatgatgagttccgactcggagggtcccgtgacttgaccgtagcagaagtggccgtcgatcttggcacacacatcttgtcggacccaggcacatagtttctcgccttcggcatccctgctgtcgacttttcttgccagagcagtagctcttggcagcttcaccgtaggtccccactcgtcgccatccgcgtcgagcagcgccgtcaccgccgtgcctctggcgttcgagatcttcgcgtagaccggggaggcgatggacccgttcaggtcttccgggaagacgaggaggtaggaaccgcgagagagcaaggatgcagccatcttcgacgtagattatctgcggacggtttgtgcactgcgaattcgcgttaacggttgctttccttggaagcttgtcagcttctagcgcgttgaaagttggaaaatgactgcatctacactacgccgacgtgccggccttgaacatggagggtgagatggtctattctgcgcgtactcgccttcttatctccgaaaatagccttccctcgaattaactcaggaaaccatccaggagcttctcaagtgcaggctgcttgacctgggggggctggcagtattccagcggtaatgacgaccaaggtttttgaacttgtgagggtaggttgttgtgtgggcatgcgctctgcgcattgtcagcgcaatggggttccgtacccgagcagacggtgtggaggagggaaactccgatgacacacattttttttagtttcaagtttcaagaagggatttttttctcttttggaaaactaaaaagctaatgcacgatcctaagcatagcgtggctctagcggccgtggagaccgccgtttccgctgcgttagccgcggtggtgcacgccaccaatccgcccatcaacgagacctctcctcgctcccccaaacgccgtcggttgtcgctctcaccgctgcaaattgacgacgttctgttccgatcaactttcggcatgaagcgctcgtccttcgactggatctgcgcgttcatcaaccgtcagtggacgcaaatccatcgccccattagcagcagctccagattccagctgcaggaacgcgtggccgtcgcgctttactatttgacgcactgtatcgagctggagcaggcagcggagaagttcgacgtgactccgagcgctgctgagcgctacgtgtggcaggtggtggacgtcctgctgtcggacggcgtgaaggctcagtgcttcacttccccatcgagtgacgagggctggagcagactcagcgacgggttcgaggccatttgtgggtatccgaactgctgcctggccgtggggggaatgctcgtggagattgagcgcccgagacggtgggaaggttggtactgccgcaagcgctttccggcggagaacgtgcagctagtggtggatgctcagtgtcgagtgagagccatggatgtgcgacctggaggggttacggacaaggagacgttgaggtactcgcggtttggccggagcttggcggagattcttcccgagggaaagcatgtcgtcggtcatgcaggatacgcactctcgaagcatgtcgtggtgccttatccggtcgacagcagcatgactgaggctgaagagctgtttaatactctgcagtcgacgactcaacgtgtggtgaagagaacggaggagatgatcaagaaacgattccagattcttcagaagccgctgcgacagaagacgggggagggagatgctgccacgacacaaatggcccaggttatatcgactgcgattgtgttgcataacattttggtggagttgggggatctagtcgaggtagactcatcactggaagacgatacggacgaggaagacttggaagaggactcggactcggaggactccgatcaggacgaatgcatggatgatagcgccgccgatcagcgtgatcgcatcaaagagtatctgtatgtaaaccgacacatcatcagcaaacgtttcggctgacacaaagtggtgttatgtgttggttgttgcgttatgttggagatccatgctgagttcccagcatgtaattctaaaaagagtcggcatcttgggcattacagggtctatatcgagattcccatgtcactaactgtgttcgcttgtctgtcagcaaaatacttggagcttctagttatctcactcgacctaagccgtatgaagcatgtcacaccaacaagtatcgcacctgatgagatttcttcccgtcgcgcagtttcgcggttatggcgggcatttctcggctgggaacttattccgcaaggcgtgtggttgctctggatcagtattgcgagaagacttcgctccttcgggtggttctagttgccgtgttcatgccacttcctgcgctgctcctggaaattgcatcggaacttatcccactgcgtgatccagcagaggggtggaaagccaacactggagcttggattcggctttgtgtactcatcacatcgaccgcggctgggtccctgtttcaagttcgagcaacaacaccagagctttcctactgcagcatattcaacatttccgttgcaactggatgtagctctacactgacgttggtactgctagggtttatcctcttccgttcacgcttttgctaatgtgtatcccagcagcgattttcttcgtgacattctttttgctcgcaatcaaacataggggggcggagtcatcagctcgattggaaagccacttcaacggaaaatctttctcattctcgtccaagctcagctatccttcgtgtacgtatcatttggcgtcatatttgacaaatgcactcatgcgcagcggttcgtgctacttctgctactccccttgatgaagctggctctgaagaattttctggcgaaactcgcgtctgacaacgtggaatccatccctgctgtggtagtcttcactgttgacatctttaatgggttgtgcacttcgatctgaatgcaatcgtctggatcgtggtggacgtcactcgtcatgattgtcctgaatgctgcgcacacaatgctgtcaatgtcggagataagtaatgccaccatgccgctcatgacggcaacccggaaaagaactaccaggcagctcaaggcaaagagagcaagggtagctccgagta

SEQ ID NO: 216 - DNA, 20621 bp, Phytophthora sp.
  source 1..20621: mol_type = other DNA
aaacggatgcgcccgttgtcgtggtcgacccgcccatcgatactattacggagggtaccaagcaaacgactccgtacaccgaggctccgactactgagctgccggaagggaccccggcagcgaaggtggactctcctgatgtagaccttctccggcgcaggcgttacgatctcgctgctgccaacgacaaagacgactgcacgccaggctggtaggcatcgaaacgaggggaggttgcaaccccacatgcatatttctctttatactttagccgtccacgtaaaatgaatgtccagccttctcgatttcatatctaaattgcctcgttagctgtcattgagcagaagcagtagccgtgtggtagtctcctcgcaccattggtctcggttgtgccagcttggtggggcttccagcaccgcacgattgtgttggtcgagtgggcacttgttctctcaattccgggcgataagaaatgccaactggccgaagctgcatatgaccagcgttaactcatgataactctcgtagcagacccccaagttgtttcgactggtaggggtgctctagcatgtgaacgtgggggggggggggcacgaaaggatccgtgggagatactcgcgttatgaggcgctagtcgccacatctggaagcggcttttgtgggcttgctctcgttggggcaccccacgctcccgaaaaccagacaaacgaatgcgaacgacgatccccatgtggtcgacgcctgtgtccataccaagccgccgctatacgcacttgcactacgcagactgacggccccaccgtcaaagtcactcttcaattgtcctcctcccacaacaacctccgcctccataatgacaatcacacaaacttcgctcgctctcctggtcattgccgctgccgcttccaatggcctctccgacgccgcaaacctgcgccaggcgcagcgcaacctcgccgccacctacagacagccaagcgactacctccccgccatggtggcccgagtcaacaaggagcgagctgctgtcggtcttcctccggtctgcgcgaacctgaagctgcagtcttcctcccagcgtcactcggacgacatggccgaccacgactacatggcccacggcggaacggacggctccacgatggagaagcgcgtgacggacactggttatgcttgggacagggtcggagagaacgttgctgctggccaggaagacgtcgatgcggtcatggacgcctggatgaggtcgccggagcaccgtgccaacatcttgggcgactacaacatgctcggcgcctcgtacgctttcaacgaacgcggcacgtaccagcactattggacgcaggacttcggcaagagcaaccgcgagtcgtgcagcaatccaggcagcatggccccgaactcgagtcctaacactcctggccgtgtccctccaagcaacagcgtacctcaaaacaacggcgtacctcaaaacaacggtggcgcccccaacaaccagacccccaagcagcaggaccaagagcagggcgaagctgaccccgcagtgcaggagaacattatgcattatcctgaagcccggagcgctctgagtgcgaaggagctggaggccgacctgggcgttgccgtctcgccggtgccaaagactgacgtgcacgttgtgaacgcgaagactccgtgccccgcgggtgagcggtcaatcgaggagccggtcgtccaatccgacgcggagaaggactgcgatcccaagttctaagacgataggaaagaagtgctctgtgttcctcaacgtataatatagctgttgttcaacatactctaccttggcaatagtacttgcacctctaatcactaccatgatggctgtcgtagcctacgaatctaccggtagttcgactcgcaggcaacgcaagtcaaactgcttgccggacgatcgcaatttggctgcaactcaaaaagttatctgacgcacttattaatataataatacatactgtaaaacctctaattgtgcccctggggtactaagttagtaccccacccacgcaaggggggtggggcactatttgagggtagtgcccagctaaatgcccccacaaagaccgaacacgctgctactacataaactacacagtaggcaaatactactttctgtgctatttggtgcagttttggggatagtcaatatatccagagtaaacaaatcagcggctgctatcgcgcagctgcgtaagataaacttaccttcggactggctggtaagataaattcgtttttagaaaaaaaatcagtggcctcctgtcgccagtccaaaaccctccctcctcccccgcaggccgcaagcgatcaggtcctgaccccgtggcatggtgcgtacgcgtgagttagttcatgtattccctgcttaaggctaacctgtacgtatccataccctatgtcaggccccggacgacgacatagctgccgatggagctcgcgatgtgaatccagaagctcctctcgagatggtcactgtgaatgcaacacccagccaagcaagctcagcccaagctcctcccaccaccgatccacccccactcacgccactagaagaagcagaagcagagcggatacggcttcgggcgaagaagcgacagcagcaagaaaacacagtgccgaagtctagacgctcccccacgctgccaaactgacgaggatcggccccgaaacgctgaagcggacccggcagacagtcaatcccgtgccgaccaagctgagcgttgggagtcccgcctggcccgtcatctggcagctgacaacgaggacgaaagtgaaggtgaagcagcgctagcggaagtattggcgcagcttgaggaagaggatgaagatgagtctccggacaacagtggcgattcggactacaacgacgatcgacgaacacctgagggcgatgacgatggagactcctgtgacggtattggacgcgctactgacatcgattccgctgcgaatagtgtgccgacaccgcaccaaacaccgaagaagcaccaaaacccgaaggcgaaccaaaagtctgtccagtgcgaggacgaagaatcggaaagtcaaggtggtgtggaagatgtaccagtcgtcggtgactacttggaaggatttcctatgtactggtcgtcgtggaaagtttctacgaagctttcgacgagctccaagaggctacgtaccagcgcttctcatcccgcacaagtacctcaattaagtccaggaacaagcaaattgctgccgcgcagaaagaggtcaaaaagaaacaaagtaagccgaagacgagaaaggttcgcgcccaccgacagagcacaggtggcacactattgccagagtcatgggagaaatacggcagggacgttcgtgtgcactcatgctattccgtacgagagtcgtggagaaggcttgcggcagcatgacgccgtccgttttgtggcgtgtactgctcgtgtcaacgcacgggtttgtagtcgaccgagtggtgttggatttcatatcgttgtgaatgcaacgggaatgcacagccattctctcaccgaacatcagtggtataactacgctgagaacagacgcgtcttgggtccgtcctacgccgcgatgtggcagtcatgagcaaggcgggggccaagccacgagggatattagcgtatcttcgagccaaaacaggttggtggttttggtgtgtattctgtatattgcacgaaacactaataaaatttggtttggtgttctataaaggcaagcgaacgattctacgagacgtgcacaacatgatccaggacgctaagaagtgctttaatggaggtcgaccggatgcggagcgcgctgtctccgtgctggacgaattctgcgagatgaacactggaaatgtggcggagttcgtcattgacaaggagaccaacgtggtgcaagtgataacgttccagtcagcgcggcagaagcgtctctttgcagccttccccgaggttgttctggtcgactcgactcataacagcaacgcgaaccgttataagctgtttagcttcgcagtccacaacgtcttcggccgggtgggtaaatgctttcaggctctaacaaaaatgtactgaacatttgtataattttctgtgtggtttattttcttagggtcaattcgtgcaacacgcattggtgcggacggaagagaaaccgaacttggctcttgttgtcgcagcattcaaaaggcacaaccctgagtggtccaagatccgtgttgtgatgtcggataaggcactgcatgagaaggaggtgctgttggaaggatggccgaatgcgcgccagctactatgtcgttggcacgtcgaaacgtggttgaagaaacagtgctccagactgggagacgtcgggcctacagaaacgaaggaactcaagtcaattatgaaaggattggtgaatgcggcatctcaggagcactatgacgacctgaagaaggctctgctcgagacagtcgggaataacgacgaaaacctgctctacaaaagttttatgaagcactgggatacgactgctgacgagtgggtgatgttcaagcgtggtgacgtcccacacctgatgaacaacacgaacaaccgtctggaatcggaatgggccgcctcaaataggttattgacggtagtttcactgttgatgagctcctctccatgctgataacaatgcaagattacactgaagaacgctacctggctgatttccatcgtgtcagcagtcgccctcccattgctgaagatccagagttaactgcagtggccatgcatctcagcaactacgccttcgagatggtggcccatcagtacacattggctgtcggacctcaggcctgttacgacatggagacgacaccagatggcaaggcgagagtgacaaacctagcgacaggcaattcgcacgttgtagatgctcgggtgatattttggttcaattttggtggtttggtaaattttcgggtgctgtgactaacgctgggttttgttctaccaacagcttgctgcatgcgactgtatattcaggcagacctgtttgctcccgtgccgccatgtcatgtacgtccgtgccaagtctaactacgagacggtagttccgccaatggttcgtttcgctacccgttggatcgtccaaagtccagctaacaacatcgatgaggggcctgtactgacggggggattaaaccgcatcaactgcccaccccgccgtgccccacgagcactatccagcgacgcgaagtacagccaaggcaaacatattacagagaagatcatcgatgtcctctcgatccagccgtctaccacacacaaactggcaatgcagtggcttacgggtttctacgacgcgctacatactggcaaactggaggagttcactggccaagatctgtgtgcaacaagcggcttcaactcgctgtctctagtctcttcggttgctggtgtgacagcatcgcagctttcttttgctgagatgagcagcgcgcccgaagacgagtcgaagtgcgatgtgacggcagggacggaccttgaagaaaaagcgcccgtcccagtagccgcaccaccggaatcgactaatcaccagacgactatcacaccgtctcagcatgagaatactgtaggtcgaagtccagcggatcctatcaccttagcatcgccaccgaagcgtaagggattgacgcggcgtgcggagaagcacgaagcgtcgaccggagagctgcaagttgcaaacaagattcggttgcgcatctcagaagggagaaaggcgcgtgccgttaagctctcggacatggcgattcttaaaggcccgtacagcagacgcaccaccatgtcgttcatcgaaaggttgagcttgccatccgtggaagtggctgggaagctcgacgttcgtagcttcaacattgggcagcccgtcccagtgattaaggcgattcctcaactggaaaagatcgaggaggccatagaagcaatcgaaaacaagagcaacaaggcgctgcttgctcggtgggaggactatgggtttgccacgtacgggtaattgacgctcatggctcgagtgatcaaggcacgaaacaacttcaagttagtcgaagatacgatgaagtggattgactccttggcgtttcgagttgccagtattgtgtgccgttcaaagacatggaggacgtgactaaggtaagatttccttgcaccgaaagtataccaaaagtatactaaatcaccaaacttactgatgtgctttgtgtttaggtggaccataagcaagcagtagacgagctgaacctggggcggtggtacgttggccgacatgaacaaaatggctgtgaattcctggcttttcgagagaagctctggctgcactcggggtctatcatcggtggtcttttggcactccaatccgagtatttggatgttgccattgtcaaccctcgctttcacgactttgatgatgctgatcagaagatgtgcacagcaaaaggatatggcgctgcgaatgccagggccaagttcgtgtaatgggcctaccttagctcactactacggcttacacgtatgccacgtgtatgaggaagcgtaggtttcttttacttgagtaagtatactcgagatccacgagtatactttaaacaagataaagactccaagtagcgagttttggtaaaagatgagaactgctatttgtgttttatgtttctgacttcctctaaatgtaatattctaaactaggaatctgccaacggctggttggcaggattctgctaacatgcaagtcactcattggctaaaagatgctgctttcagccaataggaatcctaaatgtgtatggaccacccgtcgtggtggttgtaaatgtatgtagtcattggtgtaccttacaccaaggtcgaggaagtgttcaaacctctaacagacatcgcatctgttagagtaacaagtgactgtagccacttgtgcgtgtaaccccgttacagttcgtcatcagcgtgattaacttggggcaccacgggggtgcatttttcgtggagacggagacgaagatctgctacctgtttgaccccatgcagctgactagcaatttgtccgcgctgaaggaagcagttctcactgtggttgagaagatgctggacatgaccgaccaactggactaccacgtcattgcccactaccaacagagggatggtacgtcgtgtggcatttggtgcttggtggtgttggaactactactgtttggtgcaactcctgaaacctggtctgactactggaaggactctctgtacgaagtggtgggctacttgaggttgcgctacctacggaaggtgattagcttgcagcttcagcagccccagcaggtttagtaggcaccctaacttcaatacatatctttggtagatgatttttgtgccagatcaaaacaccaaagtcataccgaaactaagggactttgttagcgtttgtggtagttgaaagtagacgccactccaaatttttgaatattaatgtaccttgtattttccaatactataattaagtgctcctataggtactcatcctcatctgtcacagatgttgctgtgaaagagagcattggctaggatgaatgaccactataacctatgctgatacaacgcacaggaatacgtaaattactggctccccgtaatatattcttgtagacgacaagcctcgcacccattatttgaagctatcatttaataacactttctgtagcagcaacacgatcccacctaaaattgtcgatcaacaactgggtgcatcctgaaatcacattttagatttgtgacgcacatttgtccaggttatgatacatttactacgtgattatactcgacgttgctgcctctacggagaaaaatagtactgaaagtaccattattttgaggctacttgagggtatccaatgggtttttgtataggatggtcacccctcttggcaaccccttttgacaacctcattttattgtgccttttgtttaatttgccgacagcaaaatcggacttcaagtccgattttcatttactaaaacaagggagatagtaattcgttatagtatagcttccccgaatatcggagttcggttttccgtgctttgctccttcggttttgctctcgttttcattcgaggtcccgaatggcggtgatttgttcgccatctgggacttcggctcgaaaagcgctatcgctttccctcgctttcgattggaaagcggagtcggatcaccatccctccgatttttcaaatcgggggtaggtcccctttattttaactcgtaaccctacctcaatagtaaaagtgatagtttttgaggtccgtttagccaaaaagatgaaaggcacaatacgtcacaaatttactccactgcttgttttctttcacttttgatacgagaccaatttgtgatttctggattttttttagctgtaagtgggtgcatccttttaacattccttccaaaatcagttttcatccctgttttacatcctaatcactcattactttaatttaatttaagttacatgtagctgtgcggtatgagtgagagcaacgatggtagctgtaagaatagaaaagtgtggcatcccaacagacaacgcatacatcacccttctcatgttagacaagtatttgaatttgaatttgttgcggtttaatcggctacctactcccggagacgcatctccgcgtacggtgatcgtgtcgctagatctctaggatatgagcccgcggtaggcgcccaatatgttagacaagcaacaagaaacttcacgctgccaataattccaatactaaggttgggaggggtactgtactaaattttcagtggagagtggggtactttaagagggtggggtactattagagggtggagtattacttgtaagtccccacccaaagtaatcaaaaatgagaggtggggtactaattgagggtggggcacaattagaggttttacagtatttagtccaacataccaaaaatggtccaggatggacaaattttcctgtagccatctgttacttttgctcagaccattcgtccaacgccggtgatggaggtagggcgccgccgggattgaactcacaacatacctgtagaacatagctcgttagaccgttacaccatacaggcgccccggtcatcgtctcttcgggctgggacttgacactgtctgattgcatattccaacactccccctcaatcgagagtgtcaggacctcctgattgcgacctatcctgcagcttgttggtccgactccaacgccgttgctgcaatgacctccctgggtttaaggccacccgtgtctccccctggaaacacattccgttcacagacacctcgtgttgtgacacgaaccacacaaccatcactacgatccacattccagcaaccattgaccatctgcgttctacgcgcttgggaaacgtattccttctccatgttgtaggtcggctagccgtgcacgttttgcagagtgtggaagacactccgcttggtcgaaatgtgccgcaggaccatttttctggcatctactgcacccattcgcactcctcgtccagcacaacgttcgttttgcgtacgctgcggttcattaccgtcctcgcgaacccgatttacgccgagtcctctacgatgcgcttagtcaacatttgccacacggccttcttcgttacgaggatcgacgatagcgatctccgctaggatgacgatgacgcacaagtggcgccaagtttgaaagtgcaacttgaagttgcgcctcgtcacagggtcttgatttgtgagtgaccatcactctgtggatcttcgatgtttggtgttatagcgaaacggcgcagtgcaaaatggcgccaagtttgaaagtgcaacttgaagttacgtctcgtcacagggtattgattggtttgagtcgcgggagaccatcactcagaacacgcattagccccggtgctccatgttgcacttcacttaaagcgacaggggaatgggcgataccgcgtttggaggcgtttggtaccgaagccgcctagcacaggtgggtctcattccgcaatttgcaagataccgggtaagcgcaagaagcccccccccccccgccgactcaacccccgtctacacgtatcaaagcgtcaagatgaagttcaatcagctctgcgacctcgacttcctgaccgccgagatccgcacgatggcatcggagctcaagctggtcggcttgctgggatggaagattgctggcaagcacgtcctgcggtgtctacaagagggcgcttccctgccggccctcgactccaacttcttctaccaggatgaaacggagaagaggacgaggaacagcccagagtatccggacctccacccgaccttcgtgagatactgggagctgtgcgaacgacttcccgaatacctccccccaagcagcgtcaattcgggtcccatgaggcgcgcgatggccgatacgatggagacgaacaccatcaacatgctgggtcttcactttcgaaggaggcttcaccagtacatccggttccgctacgcgacgacgggcaagctccaactcggctataaggcgacgcggaagctcgttgctggctgatatcgtgtcaaggaagtcccccacctcgatgtcgacggcgtggacaccggcaacgtggtctatgtatgggacgaaccaagatccactgcggagcgtgagctccacgactggcttggcttcgtgccctgggagtggcgcattcgccaaaacccgacccactttttcgtgaagctatacgacatgctccagtggatggaggcatttgtcgagaagcacccaaagacaaagggcgcgcgtctctactccctgcctccttactccagctcattcatccccgcacacgtgacgctaaacattacgtcgctgcatcaagtgttctgccgacttttcacggaccctgagcgtcaggcagaagtcaagacgtatgtgaaggacgagcttggcgtggaatgcggatctacagagcaagttcgccgccagtttagcgaaaacaaggatgctgtttttcggaagatgtttcggctaaatggacttgagaccagcacacgagagttcgcgtaccaaatcacaacggatggctatgcagcttccgttttgctgcgccgccagacgctttgccgcgaggatgacgacaacgcggaccagcctcgcaagcgccaaaagaataataaaggtgaagtagtcaaggctccggaagcggtcgaggaagacgccctcgaagcggcgatgaagaagttgccgcccggatatgctcctgacgtcatgatcggcatcgaccccggcgtgaggactgtgtgcaccgcggcatgtgaaggtagccttccaactcggcagtcgcgacgccgacggaatcgacaagggaagcgaaagcacaagatccgacgggcgaagcacaagcgcaagaaccgacacaggcagcggaccgtcgccatcaacacccgcgagtactaccacatgtccaaggctggcaagcatcgcttctggaacaacggtctgcgggagaaggaggcttcctacgccaagatccttgacggtatgccgacgttcaagacagcaagatatcaagtctacttggatgaactgcggtattttgtgaagcacgcaaagtacctggtgctgttctcggcacggcacttcttccggaagtggcgctttttactgtactgcatgaaaatgaaggcaatcgacactctggccaagcggcttgtgccgacaccaagtccacaggtgtgcgtcgcattcgggggctggagctgccaagacggactccggggcaaccctcgcgatccggtgaaggcgttcaggaaggcgctggagcggcgcgctactgtgctgccgatggacgagtttcggaacagtaagctgtgctcctgctgccaccagagtcttcgcagagcccgactgctgaccaaggtcaaggacaaagacaccaaggaggacaagatcgttttgaagggcaacagaaacgtcctgcactgtaagaacagtcgctgcagggcccacttctggaaccgagacgtcaacgctgccatcaacattttggagctgctcaagtgcaggctgcttgacctggcgaggctggcagcattccagcggtaatgacgaccaaggtttttgaaatatgtgaggataggctgttgtgtgggcatgcgctctgcgcattgtcagcgcaatggggttccgtacccgagcagacggtgtggaggagggaaactccgatgacacagaagccggtacatttttttagtttaaagaagggatttttttttccttttttggataaataaaaaggaggtggagacatagaaaaaaagcaagcaatggtgtacgacgtaaccgtagacgagtccagcgcgcagcagaacatggctggaatgaagtttagaaaaaggaacttgataaaccggtttatcaacttcgtcggcgcggggtttcaaagtttgaaggcggtatatcggtatttgctgttcaaaccaatactcttgcaaaaccaggaagtgtaacggatcgcaaacggctcagcttcgcttcctggagctcctatttgctcctcgcgcagatataattggcttcggataaagccgcaccctttcagtaaggtcgtggagaaaaggcaaaggcacgtacatgtagtttcctcactcttggcaccttttcccggcagcgtatccaagccgcactatcgttccaacgcaagaaaggcaaatggcgacagctgcgtacgccacctgcagcttctaggacgccgtggcgcgtagcaacctcaccatctttgctggagacgtcacatttcaattgtccctgtttcgagcacccctatcgtctaccacttctcgtcttcaacacttctcccggcccccaagctccacaacttcgttgtccctgaatcacatcaactctttgagagttcgccttcgctcctcgtgcttttatcggtaagtgctaaatgaatgccggaatcagcttttcgctatctagattgctctctctctctactaatatatgtagcgggccgcgccacaacgcgtgactacggcaaacgggcggtcaaataacccacttcactgtcgtcgccagaagcggtcgggttgcaagtgacgatggaccaactctcttccagtcgtgatttcaatgctgaaggaccagcctccactcgaggtgctcgaggtgttgatacagcaccatcgtctcctgtcgagtatgattctgaagattactgtgatgacactactgaagtgacggctacacgaggctacgcaaatggccagcagtcccaagtggaatctgctgttgctggagcaagaggagggcctgcccaaaacgtcactcacaactcagcatttgcgcgacttccgttatcagaacaagcaaggacgtcagcatcccaacagatacccttcacgcaatcagcacccccaataacttcgagtctaccctgcggtgatttccgtcggacgacttcgaactccgtaggacccggtgctggagctacgacaccaacgccgcaccagccacccgacgttactggccgtgacttttgtgagtggcctcccgagccgacggcgctgtatgatgcagacgatattgctcggatcccagcatgaatccgtgaggcggtactccagtttaggccaaattaaacgtgtacgccgatgcctctgccccgaagccatcggtctattacgttcaaatatggagtccgcgtgaagtgctggttccgcgaatcccttgttgtcgggtggttgtgcatggcaagcgatgcgtgccgtcgggatatcacgttcctgcccttccatggagaaaaaccactaatgctacaaagcacttgtgggagacgcaccaaatccagtctgaaaagacgaccctacagaatacgcgtaagcgggaccgcgctgaaggggtcaaccgcattctagcgtccgcgttatgccgtgacgatgcgaagcgtttgtgtttgttgctggagacgattcgaattgtctacaacaacttgccattccggtttggtgagtacgaagagtcagtcattctgaaggaagtcgtcacaaaagatgagttcaagacaacagtgaactcaagaacggtgacaaattcacttgtcgagttgtacgcatccggtcgccaagagctgatagggttcatcagagacaatcgtttgggacttatcaagtgtttgacgatggttgttgacttctggaccccaaagcatggtggcgaaaagtatctcggtttgcgcatctacttcgtcgactcccacttccgactgcgtactgtactcgtcatttcttgcccatgtatggagaacgcgaccaagggattcgcggcccttttgagcggtggatttgcggtattctgtttgactttggcctgtccccgagcgacttcttcggctccaccactgacagcggccccgacgttaaatggacgatgaacgaagggcttcgattgaagtgggaatggtgcatccctcacaaggtgaacgctgccaccaagatggcctgcggcttgacgcgaaaatcgcacaatcccgagatgtcggcgttgctaaacaagctatctcaaacggtgtacgacacctccaccaactcgacgcttggcgatctgcttcccatgctgatgataatgttgggggaaggcaatggtacccaactagtaggctacaagccgcatcgcttcatggggatggcagccacgatggagcgggttctggagaagtggccagctctggaggcatggtacgaggcgcgttcagctcagcatgcacggaaaaagaagcgagcgccaccagggtttcaccttgccggttgtcaacagcatttggtgcagctattatcaatccttacaccgattcttctcgtgacgaagcgatcacaggcgcaggatacgaatcaagtgcaagtcctgctgtccttgtatacgatgtgcatgacttctctcgcacttgacagccccatcaggcgctacgacacggctccgtcgaacgccgtcaatattcacccttttcaactaacatcgctggtggcgaggacaaggatgctgctacagaaggcgttttaccacaacttcttccgccgatatgtagacattgtatccggttcctacatttttgagatgcaactggtgatgtatccttcggttaagcacgtggggagtccgatggacgaagtgattgccgccgttgcacgtactgaagggagaatgcgggatgatcttgttgctggtcatgttgtcgccgtttgagctgcaattatgaagcgcttgaagtcgctaatgcgcttagtagccaacagtcaagacccagcacccgttgatccgattgctgctccagctgtgcaggccaatgttttcgatgacgacattttggcaacctttgcagttcaacccttccgaagcaccgaacgacctgctcaacaacgtaacaagcacgatactctcatcgccggtgagctgaaaaggtggctagaagattcggatgggctgcagatgataacagttcctgatccagccaagacgagcgtccgcagaccggagagtatcctggaattttggcatcggcagcagcagtccaagcgctatgtcttgctacccatggttgctcgcatcctgtttgcagtcccatcttcgtctgctcagattgaaagggacttcggcaacagtgggcaaatggtgactgccctgcgagcttctacaagcacggctaatatcgacatggcttgcttccttcatcaaaaccggtcatttgtcgatgtgtgccagtgcccaaagctgaaagcatccgaagtcgacgaacacattccaagcaatgtcaagattaacctggaacccgaggtagtggagcgaatggaatggaatcagctggcacaagcgtgcttttcgacatcaagcgcaagcgcatttgcttcttacaacgaggaggagacgaaagactcaagctgttagtttaaacgagtaggaggcgaaagactccagctggtagtttaactgcttcatatattcaaatatattcacctagcatattcgaagtggctttagtagtcaattccatgagtttgtcaagtccagcatgggataaacattacgaatactgcagcgcttttaccttcgcttggtgtgatttctccagcgcacttgcacgttcggcagcgcgtaatgctgtttcgagtgtcagttccgcgcggatttggtccagtctcgatagattggccacggcttgcggcttcgaggtttgagctgcggttggtttacgcctcactttacctgctccagctctaagaacgcctttggggtgcaatgctggctgatcgttgctgtaggaagtcttgcgaccttgtcgaccttgtcgacctggggaactagctgcttcatgatccgactttgcctcgtgcagcgatttcattgttgcttcgatcgagttcctgaatgaagtcatcgcttgattcacctctgcctttattcgggaatccataatattctccttgtcttgaagaatactctggttcgagacaacatcttgctgattgtggccctgtgtagccatctccgcacgaagtttcacaaatttacgctcctgcttgcgctgcagcttgtttagttttgcgtcaaaacgcagctccactatcagcaacaagtttttgagatccgctgtctagattctgtctttcagcgcgcaactgggcagaaatcaaatcagccacgctggagtcacgctgttgaagacgttcatcgacataggctttcattaccgctgtcgctttattattcaccgctgtactgcacgactccatcgctatctgaaagaagtgctgcgtccacgacttcgtgtcctccactttgcagtccaggtcactcatatgcgcctgcatctcggttcgtatcctctcttctgaagccccttactacactgtctcgcctgcacagctaattggcgctcgacttctgcaacgtgatgttctcgctctgcacgaaggtgagcttgaatatcgttctgcaggctgcgtgtctgaacttgaagctcttcattaagtcggtgtgatgcttgaataccttctaccatctgctcgttcattcggcgctcactttcttggcgggtctggcgcaccagagtttgttcttccgtcctgcgtctggcctcctgcagctgaagctccatggcttgacgctcgatgcttccgtccaccagcaccagatcttcttgtacggataggtgtttctgctgatccttgatggaaatgcttcggttgcgcctcgcgtgtggcgggtttccgctttgcagagcttgatcatcgtcgtggagctcacttgtgtacgatacaagaggcgcgtatgagtgctgcatactgcctcgactggtgagcaagatgcaatggcgttcacggtgcagggaaagataccgtatttcgcatgtagaaagctgcaccggcatatgagatgcactttgataactaccattcttttttttacttgctcaaaaggatttatctcattttctttttattattattgtttttctttttaggctggtggaacagtgatctttcgctaaggttcctacattttcactttggtcaccgcacgtcgcatgcagagcccgggatgacttcagcggccactggaccgctgaagtgctggtctacgctgcatctattagggtggtgctgctgaaggtgcctccccatgctacgtctatttgccagcctgcagacgtagcatggaatcatccgttcaagacttggctgcgcaggttttggctcgaggacatccagcggcaactgatgcagccgcgcgacgcggaagccaagtttaagctgactccaccaggccgcgccgggatgtgccattggattcgcgctagttgggagagcctgagctccgacaccatcgcgaatggatacaagaaatgcgacttacacctcaacgaggagtgcctcgccgccgcgtcgctggtggcagagctgcagaacctatcgctagtagggccagtggccaaggcggtcgaccaaactcaagacttcgaccgcaatgtcattcttgacgaagctgtggtgtagctttcttctacaatacatattttgatgcacatcgttttttaaaggtatgttttctgttgtgaacatcatgtgcagctttctacatgcgaaatacggtatgtgctctggtaaggccgcgcacttaaccgagaagtgcccgacgtctcacatcaaggctatccagccaatgggagaagctaggcatgaactcgtcgtttcgttctctcgaataagttaaaccttcgttcgcttcctcccgcttaagttttcatgcgtttgaaccttaaaacctcaggaactgcggttcctgaggttaatggattcgtcagttccgtggccagccatgcagcagaagctgctgcgcgacgcgcagtcgacggacgagatggcgcgcctgctcagccaggagatctctctgtttcagcgcaacatgtacaaaaaccacagccagcaccggcgcgccttcttcttccagaacctgcagcaggtcaagcgccgtctgcgcgatttcaaggtggagaccctcaccggctgctttgcggaggctgcgggcgtcttgaagcaactggagctcgacgcaggagcgcaccacatttcctggaagctgctggcctccgacctcaaggtcggcacggacgccgtgctgcgcaagctcgtgacgctcacaagggcggccgccgaggtgatccgagcagctcagaaggcctacaaaggtgcggaactgtagcgtttatactggtgtgctgtgtgtactgagctgatttggtggtggtgtgcttctgtgtgcagctttaatggtgcagttcgccatgacgtacttcatgccgttcgcgctcatgatgaacagcgtcctggcgcggttgacggtgctgttcaagacagtgatcgtgcgggcgatcgagctgcacggaggcatcacgctgctgtatctgaacgaggtgaccaagtcgaacccgctgcgagccaaggtcactgccgtgcagctccgcgggtaccagattcccagtgacattctccagctcgccaatgcgtagattggacaataagcattaggtacaggcagaagcgaggagtaacacacgtcgtaaaatacatgatatagacagcaagccagcatgaatccaacatactacaggtatgcggtcgcctcgtgaggtatcgggaacggggactgcagacaaaatggagcagctttgttgcgcggaagacactggcgactactgcgcagtctctaatcacgagctgttcgggggagtggtgtagccaacgatcgtcttgtggaactccacgacaccctgtgagagcagtcaactcctccaagtcaatagccgattccgtcgagactattttcaataaaaccacgcacctgcacgctgaggtccagtactcgtgtcgtcatgtcctcatccatttccacctgcacaccaatagtacgcatcgtgggcgctgcgcaacacaactccagtcagcagcatacgcacccccaaatcccagtacgctccaattcaaagctcctcaccgctacaggtacacgacttcttggagagaccacagcgattacacttgtagttggatggcacgagtggacacacgtggcccttcttgggctctccacactgcagccagccagccatacgcacagcaaattagctcccagctccaccctaccagcacccgatatcttcctccttcgcaccttgctgcagcggtagtttcctcggttccggttctgctgcgtcttggtgctcaggtccaggtcgaagctggcggcgtccagccccgccatggccttgttgccgtcctgcagctggtccatgaagccgcccgtcgggtccgccatcatgggcatggcccctatgccgtagtccatcatccccactacatgggaccgagcccaaaccgtcagttctgcacccaaatcttacatcaagccacggtcattatagtacgcactgccattcacgtccatgggcatgttcccgttcatcttgcacgcgctcggctgaccgaagcaaatgtgcgtcttgcgtgcgggataaggttgacgagctgagaaaaatttcggccgcgtcacaccacgtttacaccatctacctattcagccacatactacacgccgcatgccgtagcatgggaattgagccatccgccccaagtcagcgactccatccaaagactcgagccatgtccttcagcttcggccagaccagcggcggcggcagctccggcggcttctcgttcggcgccagcagcgccgcggcgccggcctcgacgtccactgcggctccgagtggcggcttcagcttcggctccacggcgtccacgacggcgtccactgccgcagccccgagcggcggcggcttttccttcggcgccgcccccgcgacgtccacggcgccgtcctcgggcttcagcttcggcgccggcgccaaggccacgagcgcggcgcccagcaccagcagcagcggaggattcagcttcggagcgacgtcggcagcccccgcggaggccaagagcagcgcagcgccggc

SEQ ID NO: 217 - DNA, 21011 bp, unidentified
  source 1..21011: mol_type = other DNA
gttttccatttttcatctactgaatccattacaataatgggtaattcagttactttgatatccataatatttaaatccattttaaaaaaaaagttttttttttctctctgttgaaggataaagaacatgagccttcatttttttttttttttttttttttttaaaaaaataatacctttacaagtcaaagagaagggggaaaaaaaagagacacgtttgaatttttttatataaaaaaaataataaaaaaaaaaaaacggttgataacttattttctttaggtctgtctcttgctttttttttttatatatttttttgttttttgtttttgttttgtgtgaagaaaaagaaagtgaaaaatgagaggagaaatttagaaataaagggtttttttattgcatcacatgtatttatacccgaatttgacatcaaagtggaaggaatgacaagtgtaacatgttaataaaagagtgaaattcattcagatgacggatgtcctatcctttgagagaatacaagacttggccatgttcggttacactcttttgcgtcatgattatcaaaaggaataggtttaggagcaatttaaaatgatcaagtagttgggtatttcagacaaagacctcttttccccttacagaaaaatattgtattttgaacatcagtccatgaacctcttctttatttttgggataaagactctccccttaaagcttatgaccaacacattgagtaatcggacgagcgagtgttttattattattttttttaatgaccgagcttcatgtccttttcatcatagggtaacatagatacctgtaccttgccatcatttcgtgtacacattcactttctcctacttgtcccttgttttctaattgttcacaccacttgtttatttctcaacaagtcaattttttttttttttataaaaccattttgttttcacgcggcgatgtgttgacaaaaaagaaaaagttgcttttctttttttttttttcaaacagaatggataaccctgtgctgcaagtggatcatctttcttcaaggggagccattctttttttctaattatcctaaattgacattggtttaaacgcgagaattttgactcaatgatagcattgtcacaagatagtgccacttgatgctgcttatttgctcagcatcatcaaatcattgtcttgctttggcttcactcctacttttaatgatagatagcatctttcatcgcttttttttttctttcccgaaattctaccccagtggccactgaatatgatttaaaaaaaatttaaaggttttatgacaagtatgctttgatagcaagtgaagtttctaattcaactttatattttaaagcctgtgaaaaaaagatattttctcttaaaatatgaatttagacaacttgacacaggctactgctccttgctaacaagcattttttttaaggggaaggagagatgaagatgcccgcgttttccttatttactgctttcttccctcgtttgtatgcaaaaagcacgatgacctatagattttatattgaacaattgactgttgccaagctatgcaaattctcaaagacatgccactgtgaaaactagaacgaatttatacgcacgtatgcatttctcaaaacatcattcaacctcttttttttttttcaaaaacctagtcgtcttctttaacctttatctctcttgatgtgtaggattcctttctttttattaaacgtgcaagtcatccgtgagtcattgttcattacctcggagtgacgcacagcagtgtgtaatcgtgtacaggacaaaagcaatcctattctttttttatttgtttatttgttacttggctttatacatttattaaatacctgtgataaaagcatacacatttatttatatccatcacatgaaacaaacctaattgaacaagttggtattcaatttgaaaacctttcacttgttcatgtacaggctttgtatgacccacagtttcttacatcaaacaacccggttttttccatctttacatctttactgaattcttacctgcgtcaccctacctgtctttctcacaaagggcaattcaaatacacgtaggatgacagtgacagtgtcggagtattctaatcatagatttacttaaaatggtaatcttcgtcagcattaaaaaatagaattcaatttatctttattattgggcaaaaatatacaatttagttcttgaggaggttatagaccgtaagagaagaagtaccgatgagagtaaggaagccaagataaccgaccacgccgcgtctacgcttgtcaggactgccggtagagtaaccgctggcataaagagcacgtcccaaaaggtaaacaatacctgcaccagccgagatctctgggtacttgaggccaccgatcaataaaaaggtggtatagacaggaaacatctcgagtgtgttttgatgagcacgttgaacacagttgaagacgtgcttgagagggtccttttcggcttcagccttttcagcgtaaactaaagttcatcttaacatcctcctctctgtgtcaacccacttaccataaggataaggaacctcagcagccttacgggccttaccgaccttcatacccaagctgaccaggtggaaagcaccaagaccagcaacaccgagaacctttttgttatgaataggttattcgccagaagaaatgaattgaataaaaaacttacgtaaccatattcagaagggacaatgagagcaaccatcagatatttcttaattttaataaagattttttttttaaaaaagaaaaaaagaaagaaagaaacagattgttatttaaatccttttctttcaaccaacacagtcccacaaggttaatttacagcgtttccgaatgaatcaaaatttcgagaaaataggagacagtatttttacgtggttttcggaccttttcaataaaatttcagacattttttttcgaatgatttccattttacggcggagaagcatcggtaaatcaaaacttgcatgctgatgaaaataaaaatgaacacgtagcccaaagtcaagatgctgacagttgctaatatgtttgttatgtctagtttcgctatacggtgaagtgataacagaaaccaattaataaaagactgtaagagactatgaatgtacaataacaacaagattaataataacactcgttcttgacttcaattgcttgaacgtgcaaaaagaatttactcggcacccaaaattaattttagcgggaagaaaagcctatgtttattacttgacaacaatagatactttggaataacatattaatataaaggtaattggggaaaatatacaattgtaaagaggatgatggtgattttgataaataaagtaaatgatgtatcaattgagtattcgtcttcatgttgatttttatggtgttcttttctgtttaatatgctggcacattgggtatcctgtgagggtagaaaataacaggaaagaaaaataatgttgccaattatgacatgtgttcattcaattctcgatgcggtgaagctgattattttcctttccctttattttcctttacattttcttcaataacgtctgttagagttatccaaccacaccgaaaatcataccattcgaatcgccatgaaaaggagcatcttttaaatacaaaataagctttaaaaatcaaaaaggaatcaaaggcgactatcgaccaaaatccgactttgtcagtgcccaaatgaatttttgtgatccttctagccccaaaactccaattactatgaatacattcgaaatcaatacgttttctggaaactttatgaatggaggtggatcaacaagcataacatacaacaaaaacgtaacgagcctcaacttgtatttcttgcctgttgtttatttttaatttatttgttttaaacaagcgtctgaatgaaaccacaaactctgtgcacctaccttgtcaaacggtttgtggttcccttatcttattgcattcatagtgctcatactctcttacatatgatgtgattgtgaccgaaggtcaaaagaagtatcacataatgacattcaattataaatcagatgaactacaccggccaaaactttgaaaaagtcaactaaatgtgtttgaggatttagtatactttggaacgtcctctgcgtcaagcaataccgtcgcatcggacaagtataaagcttacgaacaggaccaattaaaaaacaaatcgctttgccaacataatttactagaacccatctgcagccttttaaaaaataataatacagaattttttgttcaacaagtatggacttctggacgggctggcagataaagctgttgctttaatggaagttctacgatataccttgacctcgttccacctcgcattcaaaaatagttctctctttgtacaaaatcatgagagaacacccttcatagaaaatagtgtaccatctctccttgccttatcaaagatcgcaggctttgtcgagttcaagtggtaaaacaaaaaagaaaaaaaaaatttactaaaaaatattctaggtgtgaaacacagtttacttcatgtacttggatttaaataaatctgactacagcaacagtacgatgaagtacaatgacactcttggttacttcaaaatgtttaacaacatggaaatcataatggttgaagcttcgaggtaataatcacagagacaactttcaaaatcctaattccttttttgaatagtgggaaactccgagagaacacagtacatacgatcaaagattgtctccagttgctggcgtgtggcatttcctctctgaggaaagaggcaatcttgaataaaaattcttcaatagctacgtttaaaaagcttaaggtttttggcgtgcaaaccattaaaaatcaagtaacgttgtccgagctatctatgaatacaagctggaactttatagaaaaacaaacagcaacactgccatcttcctgggatgaccgcatcttacttattcaataccttgaactgatagccactatcttcgtacgtttagatcccaccctactctaaaccatttcattctctgattttgatttttttttttacatgtaggatgatatttgcgatacccatcacttgttgaagctactgatggaagaaaacttggggctagcttcgaatgaggatcccacattaagaactatatttgagaagtaaacatatgttaaaggaaattgcaggatatgtagtttatgatgtaagatcatgttcaataaaaaagctgttttaccgctattcaacctgactgtacaggttagaatgtaatctttagtagctgtctgaatccaagtgaatgtatgagctcaatacttataaagaagtctggaatcttgtcatcagtttcactgattcgaagctgcatactgtctgtggttaagagtaaggtacaaagagaaaaactgttgaaggagggagattgatgagaatagttgatacttataccagcgcctatcttggaggaggatctttgaggattttacagttattctaacgcaaaatgacaagtagggttgaataaagaacctctccaagatgacacagttattcaatctttattttttacttgtgcagtttgggatattttctttgtgcaatctttttcgcccagtgcgcaatctacttccaggaatggtgtaaatctgaatacagtcaacgcaacgccaaagggcgggtaataaattttttcagaggacggatttttaaatcccaaggggtgggagtttttttttctcaaagcgcggttttcattttttcaaaagtcgtttttttttttttttttttttttaaagctcgttttttttttataaaagatgactactcgtttttattatgaagacggtcgatggaatggttgatgagcaaggagatgatgctatggactgacttgagaaagccatcccctttccatttaaaaactttaactcgtataagagagtactgtgaaaagcaagaagatgaatagttatcgtctcaagagggcctaataaatcttgatatggaggatgttataaccacagttaaaaagcagacaaagagttatcatagatactctaatgaacaaaagcttctatttgtgtattataacaaaatcaagctattcaaagcagctaaatccgagcgcttagcaggcggtataagcgaacgaacagcacaaacatgggccaaacaactcaaggaggataaagattgggatattttcgagaagcagaccaatttggttaatagaccaagaccatcattagatgataggcacaagcttcaccttctcgacttctgcgaccactgaccacaagcacgcataattgatgcagtggacttcctcacacaaaacttctctgatcctggtgtgaaaaaaagtgttgtccataacatttttgaaaactgagtgcaatctttccttcaaaaagctgacaactcaaccagctgctagaaatagtccaaccaaaattcaagattgtaaggattgggttattaagtggaatgcaacggactatttgaaaaattgtgtttttattgatgagtccgggtttaatatcaacatgaggccacctagtgaatgggcattgaaaggaaagccagctgttgcagagactcctaccggcagagctgtttctcacactgtattaggtgctatcacggcaaagtttgttgtttctaaaaagaatgacggagattgtgttccctgccatatatgaacgtacaaaaataataacaaacaatcagaaggaaaagtttgatgcgtcacataaactaattacgatccctgaaaatagctatgtaatggtaaaagtaaatattaaaaccaacacgttagatcctaactatgaaggaccttataaagtaaaaagaatgactcaagatggatcgtatgtactatagaggtgactggtcacaagcactgcacagctgcaagtaaattctcttgacaactttatctgaacctttttcgacggaaccaacatccttagggaaataagaaaatctaatacccgatagcagcgaaatgtttaatagtggttactaagactttctctacatgtcagatttaacttataaagcgactttcaaaacaacaagtacttgactacttttgtgataatcctgcttcagactggacatttaaaagatataaaaaaatattttagtgacaaagatcctgaaaaaatcaagaaagtttttgcggaaagcttacaaacggttaaagatgactcgaaaaacatttcgtccatcagcacatcaataaactgatggtgtcttttaatcctgcttcaagcaaatctactttggctaccaactctgcttcgagcatacctagctcttcggctgttaacaatatcacagtatgtagatccttgtttatagtatcatgtttactgatttgtatattctatctttaggtgaagggaaattattacaacgtaaggacttgaattttaattatttgaactattcactcacataagttataggctggtagagatataacgataaacgagacggccaagagagatagcaagaaacaaaaggtaaactaatactaaacgacattctttgcccgttacaaacttattactttttattagaccaaccataacgacaagaaagagattgaagaggttgatttcaagcaaaaatggattgagtttttggctgatgccgaacaaaacaaaaacttccatcggtataggtaaaatgaaacaatgatttgcttgaaagactgttattgatcttgattatagtccagagaagaatggtgagacgcgtttgggtgcgaaactatcgccacaccctcatgctaacaaagacacttacagaaaaatgaagatgcagttaaaacaacatgaagcaagtggtacttggatagatgtaaaaagttacattcgtagtctggttgctgcagtaagtatttttgatattcaaatttttgagttgaacttcaatcagctaatatgttgttatttattattcttagtctgacattgatgagttcgaacagaatattgagaacaaagaacttgtagaaggccaagaaaagacacgcagatgcatcaaggatatctgtaaagtcatgtatgtacaatatcatcagagtcatttcaatgatgaactaattttttgttggatttagggccaaggttttttttgaaaagaccatcaataacacgatcagaggctatatacaacaccaatatgatatttccttgtttcgaagctgtccttgctatgatgaagaagaatgggcatgctccttattttattcctggagaagatgagcttgaagcaatgactgcccagctgaaaaaaatgggacaaaagacagacaagcgaaagatatataaggctgatggcatcattcgtttggaaagatatatgaatttagaagttcttattttggaaacagcaggcgcttttggtcatgaagactatacaaagacagcttttgacaactcaaaaggcatgtttgctttgctttcgatgctaaagacaatagctgatcgatataaacatgcatcagttgaggagtttagcaagctcaagctgtattttgttcagccaagcggtaagtggtattaaaagcaacatttttttgtttgtgctaatgatattgtttgcctccaactaggctaccatatccgactgtggtcgatgcaatatgccaaaaatgggctctatgattttgttcgggaggaaaaaatcttgcgaagtgaagactttagtaccagagaagagcagctggtatctctggtcaattttttcttgagcctgaaggtatagttctaatcctaaacaatcgagaagaggagcaataataacaagcttaatttaattgtttagagccgtcttgaagagatagtaaatacaattacagctttgaaaggccaacacgaagagaacgagaagtactacgacagcgggaattatagccagataatctctctttctgacataatatgtccctggatttttaaattgagtttcaacactcatggacaacatttttcaaaggagcacctaatgagttcacctgaaagtgatttttaaattttctttttggttttttcttttaactacggctattcttaaaaaaacttttgataacccctaaatatataaaaaatttgcccccccccttatggaccatgttatgacactatttttctaactggcagcaaatgaaaattttgcgttgaacaactttgtgacaaaagagttctttgttgaagtttttctgagtcttgttctctcaaagggtggaaatagcacaagactgaaggatacgaccaaaaactataggcgattgctatcgaaatataaaaaagcttactttgaagacgctggttaaactccccaaagcttaccataagctcagcaaatagccttgtacgagtgtacgaagatccaaacggcctactataatagcatcaaagctcattttggaaacaggctgcgtggtttgataaacaagttatttaaaaagaaggaaaaggcagagagtctcagaggagaaatgcaagcaaacaagtctagtagtaaagcgataaaagaagctacccgaaagaagatttatggaccttgcaatcaggtgaagcttgccatcgcaaaaaaagagatgcctgaagttggtcttttagatgaccaatcaagaacgcaattaaatgattttctctcaagctactcagaggactacacctttcaaaagaactcaatttactatgacgttatggctagtccaaaaaaccatttcaaagccttcttcagacttgctgaactgtctgaagctgaacagacgaaacagtttgcttgtttcccgctacgtaccacctttatttcttgccacatgacgttggatagcaaaataatccattaccatgttctcaagagcaaaaagaatccaaaaacaggaagcaagtttgagacatagggtgctatcatagacctaaataaaagatgtccgcgcaccaaggatttcaaaagcctttgaggttccaaggaattctcgaaacagatggagtcggtgtctccataataaagcaaaacactgatacaagcagaaagtcgcctaagcccaacgctgaaaagaaagtggacggtaatcaaacagagcatattgaaggactagatcaagccgacttaaagagcgctgaaggcaagtgcgtcttgatagacactggaagacgggacttgatgtactgcatgaaagaaaccagcactgttgaagaaaaacaaacacttatatttaccaagaacaaccgctcaaaatgctcaaggcacttcagatatttaagaaggcgtgctcaaccttttgtggtccagaaagccgaagcaatcttttctagatctaaatccaactctgtagacttgaaaaagtttgtacagtacattaaaacaagagcatcagtaaaaaccattttgtacgaatacagtgctcacggcttcaaattgcgtccaaaaaaaaattcattgcgcatctttaattttcaaacagcgcatctttatttggtcaaattgcgcacttgtgatttctcaaactgcgctaataaaaaagtcaaactgcatattttacaactcaaattgcattatttttattcgtacctaagctattatctctttaaaagcaaatatcagatcgataacatgtactcaataaaaggaaaaattatttttgaagatggtcaaggaaatgtttttgatgagagcgggaatgaagcaatggactgggatgaggaagttgatactcataatttggagaacctaaccaacctaacacgctatttgaataagcaagtacagccggaaatggacttagacagtctggattttgttgaaaaaatgaaaacaatagagaagaaccttgaagagaaaaaaacgaaaagcaataataaaaaaaatctatattctgatgaccaaaaaaacgttatttatatatcttcacaagataaaattgttaaacgcagctgaatcggctcggagagcgggagtgaaagtacgtacagggcaagcgtggtctgcaagaatgaaggaagatcctaactggaatatatacgaaaagcaaacgaatcagaacaaaattggtacaggtcagctacaggagaagcataaagcttttcttcttgattattttgatgagtatccttcagctcgagttaaagatgcaattgatggccttacggaaaacttcgaaaacttctccttgaaagaaactgttgtgggaaagtacattagagaggattgtaatttaacaataaaaaaaagttacccgccatccacatgcaagaaacactgacaatactcgtaaagaaagacacgactgggtgaaaacttggtcgaaaacagatatggatttcaatagtaattgtgtctttattgacgaaagcgctttcgacattaatatgaggccaccaacagctagatctgctcgaggtacaccagtcataattactacgccaacaacaagggctataagccatacgattcttggtgcaatatgtcctatgggagtcgtcaacatggagatcagagttcctttaaaatcaaaaagaataaaagttgcaggaagccgcaaaagaaaaagtccagcagcgaaaaaaccagcaacaggtggcaccaattcaggtcattacgatagatttatgaacttaacgttggatgagatggacaagtatccggaaatgaaaggattttatttggttatggacaactcgcctattcatgacaaaaagagtggagagattgacaagatgattgaagattgaggctataagtgtgtttatctcccgaagtactcaccagaacttaaccctattgaacagttttgggcaagcgtcaaacacaaagtaagaagaagccaatttggtaatacagaggacctcaagacaagaataagcgaggcttgcgatgctgttcctgcacagcatatgaaaaactttattcaacactctgttaacgtgtttgagaaatgcttaaatgatataccgatttaaaagataaatcttttatataattcataatatgtagtatatgaaataaactgatgcatttttcttcctgacaacccactaacaatatgatgtaaaattaataaacctttttcaatttctctatatgggcctagatattcaattgatccgtatataacatttaaaaaataaaatactggtatataacctaattgttccaacaatacatctttaataaatcttataaattttacatcttttaattctgatctatgatccagttcgtatttagaaataggcattcatttgctatcagtttatttacttctttatttaaaatatctttgtataaactttcctcttcactttctgtcattatatattgatattcaattttttaaaaaacatcagcttttttatgacaatatatgattcgctacgctacgctacgatacgatacgctacgatacgcgaataaataaaagagttttattggtcaatttaagtataaatcgggatttttttcaacaaagggtatttatggatactgcaaccttttttaacgcttgtatgaatgtttctgttagaaatgagcggtaagttagatttacattgaaattgtgaatattttctctataacatgcaagaagaaattttagacgaaaatgacaaagagttttataattttgttgtcccaactgaatatcatcctggaattgatttgatcagcaaggtcattttaactgatgtacgagtccttaacgtcataactacagctattgctaaagcatcaaaacgttcatatgttattgaacctctagagatcccacataaacagtttggtgctgtcctatacattccccatggtcttcaaaatagtttacctttgatagtcatcaatactattacgacctttgaagaaacgaagtttaatcaaattatttaacaaagcaccaatatttttgaacggtataacacccttcctatttgtgtgatcatcgttgctcagcaacttgatgaaaaaattattgaacaaagctcccagcaccaagagctcccattccttcgagaaataccatgtgcattttgggcaaagcagtgtatattagtgtcatcaaaggatagtaggctcaacaagggtaaattaaaacaccatccattattggatattataattgctatcacaagcaatgaaaaagtcatgttatgtaatgatgaactataataaaattgtttatttaaattttctattatagacttcgtagactctcactagtattgaattgcttaattgactcaatattttcaagatgtcctgttttgaagcattctttccaattgattctcgttgtttttttgaaacgttggacgaaatcatataattctgcattatccacttcattctcaagttctacagtgcttagttgtcttcttttgttgagataaaccaaaggaggagtctcttcaattggcgttgtttcgattgcttcacagtattttcttttctgtcgtttcaagaattccaaagtagcttccacatagcttaatgactttttttttgacgcttcatctcctttttctaggcattttttttatctcgcgcagttggatttcactaatactacaaattttgtttatagcctccaatctttcagcttcttctccaactaactggtcaagattatcatgcgcaattgagtatagtaattttactaaagaatcattccttccatagtctaaagtactaatcaacaaagactgagagcaaaggaaatagccaaccgcttgcaaaggatgtaatattttttcttgttgtttcatctgtaaagtcgaagatgtcagtagcaaacaatgtttagcccatccagtgcttagtatctgtctcgcaaaggggaggtcactatctataggcttgctcagaaaaggtgctgtactacttccaattccaaatatcacaatgataggaagcctgttgtagcgttcgtatgtgagtgtgcagtattgaatggcacgtgccaagaatttgtcgtcggcttgattttgtacttcaactagtacagatggaaatgaactcaagggatcgcggggagcatagagaacatcactttttttttgttataaattctgtaggcgccgaaacatagttatcttctgccgcttctggcacgagagcttttaatagcatgtttatcacttgtttgtcggttaataccagtttgctgatcaaatcagttcctggcctgtgattataagggaggatgcgatcagtgtcatctaaacgattttatgtaagaaattatttgtatttttatagcatgtttacttacctttgtcaatactgaaatagtcagatgttatttttgaaaagtaaaagtgaagaaagaaaaagcgtaacgtatccgtattgtatccataataaaaaaaatctacccctcgtctggtttccaagttaagccgagatattcataatcgtatcatcaagctaaatcagcttatctggcctcatatattgaatcaaaataaaccattgggtgaagtagatgattcagcattcatcgatgccttctgttcgcagccccagtggattaattacaaacctaaaccatttcggttgtctctcatacagcgatctctaccatcatcggcaatgtcaccaacaccaacttccaaatggtcacttttttggaaactgcctatttcgcctgaaagccgatctttatggtatcgtctattccaccgtaaactctatagtcaatcacttctttcaagatttgataatggtttgacctcttcacactgtaaattttgctctgctaatactgaagacttacaacacctcttcgtgcgctgtcctacgaaatggagagtatggatagatgctttcaatttctttagtccacatctcactttcactcaagacaatgtatgctcaatcctttggtcttttcagcagtttacttttgttgacaacagtgatatctagactctcagctgctgtgtgctttccgttatccggcgtgcccattgaagatttactattgacgactttccttttattgataaacagctggtcactcatgctttgtcgcaatttgccaccctcaaaaggggcagactcgatcttgactagcatgttcaatcgcctacactctgttccgtttggttcataccgctctcagacgtgtggctcctattataatttataaaaataaactatttatttacaaaaaaaaaaaaaaaaatatctctccatttgcttacttttgctcgctttttaaattagccaatcataaatttttattcctttcccctcacttgtctatcgggctgaattggttgtaattttgacaacatacctgtcgtattactgttttctgaatagatgtacatacaggaactagcgtcacttgacagctgtccttagatgtaaagtcaaaaataaaatgcagcattttataagtattgattttttatgtcaatagaacctgcttttcatcatcaagtattgttttcttttattagagcaattccatgtttccaatcgcgtcttttgtgtttactttagggtgaaagagtaactgcaatgggatcctatattattatgaaacttatatttcaaaccaacagttaaaaagcgttttcctgggaagaaatctttttaaagcctatatatatagtttataaggaaaacatacaaagaatttttatctgcattatactaaatgtttgattgacacacacttattgaaacctgggtacaccggcagcaccagcctggtcaataaaacatgtgctcaacaacctaaaaattcacaaagtatataatgaatccaactctaaccaattattttcatgagatgtgtaatgtactgcttattttactacagttttttccttatctacaagaaatcatattttattacatgctatatgggttcaaggtttgaaaggacctctgctttttcgatacgcgctaatgtttattctgttcatttgtacaaaaagtacaacattttcaatcaatataaatatcatttgggataaatcccatattcacacagacacgttgattttaaaacgcacggtgcttttatcacagtataagaatgagaaatgaaaacatgaataaatgcatggtttatggattcaaattaaatttaattttattaaaattcaattactagtttgccaaattgattaccacgactacataaaaataaaatgttagtattttttttgttttccacgaaataaagtacgaacctcatagttaggatggcttgttcaaatgtgtttttatttaaacctttccaaacatgtgaaacaataggcctaatcttgtgtttttcgacaaattcaaccatctttctaaattctactcttgatcccatggtaactcctctgtaatcgatatttttgatgaagtaagatatcgggatattcagtccggtcgttacagtagctgtttgaccataacctacaacgatgccacctggtcgcatcagtttaggatattcagcataaagaggaccaccggcaccatcgatgactgcagacagcacgttattgcccaagagttcctttagttcctccatgcagttttctaatcatataatgtcaatattgaactacaagaatcctgaatttctaccatctttataattcactccgcctatagcacccagctcaatactcttttgaatcttttctggagaagaagatgtgacgtaaacatgggcacctgcagctacagcaaactgaagagcaaaaagtgcaacccctcctccaataccagtgattaggatatgttggcctttttgaactaagccctttgtaaacaaggatctataaagcacgttacgatcaaaattaagcttttttttacaaaagactttttggtacctgtaggcagtcaatccagccaatggcaaagcagcggcttctgtcattgaaagaaattcaggacaaggcacaatgtcctccttttcgacaatgacttcttcttttgtaaatgtgccaatcactggcaagagacccaatatgtgaaagtcacgttcaggacctctttcatccgaatcccatccatatccgggattaatcaagacacgttgtcctctttggccattcttcgtaatgtaaccaacgccatcagagcccaacacagaatctaatacagtaccatcatattgatccataaggatccaaacatccctttttaaaaaaaattaaaaaaagtcaagaaggagcctggttttgtttttaccgatggttgaaagcagcagcttgtatttggacagctacttgatgatccgcaaggttctcggaggatttgtgttccttgaattcaacgccgtacttgaattttgaatcaaaaggttgagtttcagtgagaatagcagagaccattttgtttcaaaaggcagtaatgatgtggtaaaggtagtgaaatggttgtatttatagtcattaaaaaaagcggaggggttagattaataagcagtaaacagctgctgtcacaaataccatttttcaaatgaattaataagcgcgctgaactctattagttttaaagcatcgttgatgaatcatatattcagatataatttattagcatcgtttattcaatcaacacgcaagattaaatgaatttgttcgtatccaaaaccaacttgctaatcttttaggacgtattttttattataaatttttcattttgttaactgtagtacaaaagctgagaattgtaaacgttctgatagattttattaataagccttctattatctgcaaaaccaaccaagatttgatgaaaaaaagaaaagaaaagcatattattcgttttcataaagaaaaattgtgtagtctttaattatagtttattgagatcaagctatacagtagcagaactaaggacacgcttaacaaaagctgtcatcgatatccactttttttttaaacctcaacttgttacttgaatatcatgtacttgcgtgaaataaaagggtatttttcataaacatttgaatgtatttatattgctttgtgctttgaaataacagcttgctgttgtaacatttagttattttatgctttttttatatagaaagttctttgataagtagcatgttttagataatgttatattagtttattacaatttgcattaagtaaagtaattgaaatttatagatgaatttaggaaaagagaggaaaaagaagaatgaaggttgaatgaaatataaacattttcgtctaatcctctaagcatccgagtagtctcgcatgtttttggtggaggcctttttggcaattcgtccacctaaactctttagtcctaaactgtgtcctgggttaccgacttgaaggtttttgagaccatcctcaaatggaaggccagtgacagtggcatcctcggttcctgcctttttagcatatcgcttaatgttggtttttgataaattaatacggaatgcagtgtctagtaaattgttgggttcaaggtattcatgtggaatatgtaaaaggaaggcaagaagttctgaattggttggacatgagtgtaagagatgatctaaatattatttaaaagaaatgtacattggtaaatattccatatccttttctcacctttgcataaatctagaatggctaggcttactcgataaaacactttaatgcctaagaagaaggaatgtatgtaagctgaggatctgaatatgtgtccttttcgtgttttttttagtttaccctcaaaataaaacgcgtcccaaacacgtagcactgattcccaaggaagtgtcatggtaaatgcagttaggaaccattgggctatatacatgattggaagtacatcattgttttctaaatgctgagccaactttgggttatgatcctttaataattgcccaatgatgtatgcatcaattcttaactgggaaagtgtaggtgtgaagtatccattcatataccgatcaatagtagccaccaataaccaaaacgagtcctttttttaatacaaaaatagttaatccatcaactctagatttctatttcttttcttttttttctattacttcgacagtcatctgcataagcattagtcctgctaaacggcccatgccttggcaatattctaaatcagaattgtattgggcatatgcttttaatatatttcgcaaattctgttgtcccaagccatccttttccataaattgtgtgtgatcaggataacatcgttcaatatctctttcaatcacgtcgtaaatagggatcctaggcttggacaacaggttttgaaattgatttgatctcttgtagtcatcactaccagccaagaattgccacactttggctctcacagatgctggtattcctccacgaaccaattttttcatctttacatcctttttaaccgttccagcatcgagtttgttgattatatttaaccattttaattcattttctctgtattctttcatagctttggtagacatatttgctctgcatgtaaataaactattagcttcctgggaagataaaatggggtttcagggggtgaggaacaatgaagaagacatgtacctgaatgaaggacgaccgcgtttgataatgaatccatattcatcaacattttcattttgaataaaagttgaattgttattattctttgttggtgtagtctggcttttcctttgtacaccggtgttttgtatattagtagctactgggcgtgcaggagatcttggtggtggtatagggccgtacagttctgtgttctcttcatccgagtaatcaatgttgagtgcagatgtatcaaatggatcatgattattgttgttattatctaatcatatattacacgtataagattaattttatgattattgataagctgcttttttttttctgtacctagattttctccagaataattgtaggaatcgtatgatattcgagactcttttatattatgacttgaagaagtcgaaactgagcctatactttcaaaactcggcttactgacccagtgtctcgatgagggtacgggtgaagcatatcgatcagaattggaagaaaatgaatgaatagagcctcttaattggttgaattgttcttgtctatttttcatcatttctatatcaaattctgttccatggctacttgtagagtttctatattgcgaatggtcggtaaaatcaagatcagcatcaagcgattctaatacacgaggatctaattctacaaaatgcacggtttctgcattaaaatttccaataacgccttcacagtatccctaaaagatctcttatattggtaaatctttatataaaatacagcattgtgctgtgtttatttaccatgtaaatatcattctctatatgttttaatatagtaatcctttctcctgtaaacaaatttagccttattttatatctaaaatgcctgtgtacacaaaccttgcaaatacatcagttcttcaggagtgttggccaaaatatccacttttgatacacaagcgcctaaaccacctatatattttttaacttggtcgatgtcacaatcctgtattgttgtaggaaacatacctttctcagcaaaggctttcaactcggctaaactcatcgaatcgacatctattgaagcattatccaaagcttctgctggatctttcaatagtcgtgcaatcttttcattaagctcttcgagattagcagaggtatgtcgtgtaatttttggttccatatatcaagtcaaaaaagagaaaaataaaataaggaagttccctccttttatatgaaagaaggaagaaaaaaaaaggtgaagaggatggtttactcccaaataaggaagacatgtgcgattaaacaccgctatgagttacgtggagaagaacctttttttattgtttatttaaaaagtaacaaaatggcccccattttaaatgtctaaatcatcatctggatcttcgtcatcaaagtcatcagcagcgtcaggatcgt

SEQ ID NO: 218 - DNA, 21011 bp, unidentified
  misc_feature 1..21011: note = Fanzor polypeptide
  source 1..21011: mol_type = other DNA
aatagccacagtaataacaggcattagaacaacagcagaactttaatttatataagctttttttttgtaaggaagacatggctcaagtttattaaagtgacaattaatcaagtcataatattgtgacactaatcaattgatcaggcttaaaaacattttatatcgtgttaaatgagaaatcaatctcagcctaaatgtaactactcaaattcaatggtagaacggaggaattgcaccgaaataaagtgctgtttataagaaaactctattggccttattttttagctacaatacagactctaagtatatgaacatttataaaaggcacactttttttgttttatatcttcatcttttcaaaagaaaaatgttatttttgaaatacatattagcaacatgtaatatttcaagtcaatttatgatttaacacactctaatcgatttctattaatcattctagggttgctgcttgcgactgttactaatgcacaatcagatcaaagttctatgataagctacaatgtcattgctcttttaaaccaaactaccttcaagtcaatggctgtcatagtagatagtattagctatcctttagaggccaacaagacattccctgtccttttctctggaaaggctccttctgctaaatcaggctatcattatgcaaaggtgtatatcagtgataacagtacacttgcagaaccatttgaacgtcagtctgtcaaccaaagcacacctcacgaattcttcaaccgtacctggaacacacatgataatgcccaattaccacaggtctattctcctttgagttctattcatcgcatcaaatctaatttgcacagagataacgagatccccactattcacatcatcggaaatcagacagaattagaccagatgaagggcaacaccactgcggatgtatctgttaagactactgtttcctacctctcacttcatgatgctttccagtttgaaaaagcagaaatctctttatccggtaacagtgctaaaatgatggccaagttatcgtataacctcaagctacacaagaaggatgaattgtatggctatagaaaacttaaacttcgctctttaggttttgatccttcctatattcgtgaacaattgggttacgatatccttaaatcagccggcttaatctcatccgagttttcctttgttcgtgttttcatgaacgatcaagaacttggtttattcggtatcgttgaagccttcaacgatccttggctttctaatgtgtttgcagatggagactcatcctataaacatggatatctttatcaagccaagttatctggtgctaataaccacagttctgatctttcttactatgaaaatattacggcatatgctgatggacaatacaagatcaaggaagaagcaactggtggcgaaaaagacaattataagcctttgatggacttgaccaaattcattgctgaagcacctactaatagttcagatgctgtcaacgaatggaacaaaaagttcaatatggattctgttgttcgatcgtaagtgacagtagttgttttatagccaaatgtgcttataaacgtttctttagaatggcaattgaaatcttgggaggctatgctgatggctatatagcagcctcaaacaacttttatctttatcaaaaccttagcagtgatcaatatacatatatcgccgctgatctcgatctctgtcttggtaatactgttaagaatatttcaaatatgttgagtggtgactacagcaaatttcctggatggggtactaagccattggttaatcaaatgatgcgcgtgcctgaattcaatcaaaagtttaagcaaacacttcaagaccttaacaccaaattgtttaatagcaatgcaacaaatcctcgtatcgatgatcttgttatcatgctcaaagaggacgtcgaatgggaccaaaaattaaccagagatctttacaaaaagtttttggaaagcatgggaataagtcagccatcagacatctttacattacctcaagttgcacctcttttgaaagatcctgaacaatttgatatggctaaacgattgattgaaggtgttccatttgatactacaataaatggtccaacaggacatataaccttatctggcattaaggaatggtttagggtcattcatcaaaatacagcaaatttttttcttcaaaagtaagaaaagagttataaataaattttaataaacatgcatttttaaagtttaagtaaaaggaagataacgtaatatgatcaggtgactgactactgtataaaaatatctagagtattaaaaaaaactttatgaactagcacacacacctagattgagtgagcgtgaaaagcttaagccggagaaaagatcatcttcccactttgaagagaacacaacagattagatgatgtgtaagaagttatacatgtccatgttttgtcgctaaaccccatgcttgtcccagtctaaaaatgaatatgagctgttagtttgaaaaatgaagcggataatttatatcaatggcgttgctcttttttttttattctcagaaacgcgtagttttgtacctttttttaattttttgaagtacgcgttgttcttttttatattcaatggatgaactgattgagaatgataaatttttagaaggagcaaaggaatttattgatcgacctattgtgagtataattttatatggtgtttctaagcttaaattgacgtttataacagaatccttttgcaaacgattccaagtatatttcgccacttgtattgaaacaaaacgttaaagattggaaagcaaaagctatatatatagataaacttcatttacaagagcaattatgcatttaagaaaatgcatttaagaaaagccatatatgcttttattttaacattatacctatctagtcttttgcattattatataattgatctaaccagtgtcaagaaaaatgatggaactcatgctgtctttggtttaaaatttgaagctgaaaaagaaaaatacaaaacaaattataaccccaaaaaaaatattgcgaagttgacaaggtgacagttgctaatatgtatgttatgtctagtttcgctatacggtgaagtgataacagaaactaattaatagaagactgtaagagactattaatgtacaataacaacaagattaacaataaaactagtccttgacttcaattgcttgaacgtgcaaaaagaatttactcagcacccaaaattaattttagcgggaagaaaagcctatgtttattacttgacaacaatagatactttggaataacatattaatataaggtaattggggaaaatatacaattgtaaagaggatgatggtaattttgataaataaagtaaatgatgtatcaattgagtattcgtcttcatgttgatttttatggtgttcttttctgtttaatatgctgacacattgggtatcctgtgagggtagaaaataataggtaaaaaaaataatgttgccaattatgacgtgtgttcattcaattcttgatgcggtgaagctgattattttcctttcctgttattttcttttacattttcttcaataacgtctgttagagttatccaaccacaccgaaaatcataccattcgaatcgccatgaaaaggagcatcttttgaatacaaaataagctttaaaaatcaaaaaggaatcaaaggcgactatcgaccaaaatccgactttgtcagtgcccaaatgaatttttgtgatccttctagccccaaaactccaattactatgaatacattcgaaatcaatacgttttctggaaactttatgaatggaggtggatcaacaagcataacatacaacaaaaacgtaacgagcctcaacttgtatttcttgcctgttgtttatttttaatttatttgttttaaacaagcgtctgaatgaaaccacaaactctgtgcacctaccttgtcaaacggtttgtggttcccttatcttattgcattcatagtgctcatactctcttacatatgatgtgattgtgaccgaaggtcaaaagaagtatcacataatgacattcaattataaatcagatgaactacaccggccaaaactttgaaaaagtcaactaaatgtgtttgaggatttagtatactttggaacgtcctctgcgtcaagcaataccgtcgcatcggacaagtataaagcttacgaacaggaccaattaaaaaacaaatcgctttgccaacataatttactagaacccatctgcagccttttaaaaaataataatacagaattttttgttcaacaagtatggacttctggacgggctggcagataaagctgttgctttaatggaagttctacgatataccttgacctcgttccacctcgcattcaaaaatagttctctctttgtacaaaatcatgagagaacacccttcatagaaaatagtgtaccatctctccttgccttatcaaagatcgcaggctttgtcgagttcaagtggtaaaacaaaaaagaaaaaaaaaatttactaaaaaatattctaggtgtgaaacacagtttacttcatgtacttggatttaaataaatctgactacagcaacagtacgatgaagtacaatgacactcttggttacttcaaaatgtttaacaacatggaaatcataatggttgaagcttcgaggtaataatcacagagacaactttcaaaatcctaattccttttttgaatagtgggaaactccgagagaacacagtacatacgatcaaagattgtctccagttgctggcgtgtggcatttcctctctgaggaaagaggcaatcttgaataaaaattcttcaatagctacgtttaaaaagcttaaggtttttggcgtgcaaaccattaaaaatcaagtaacgttgtccgagctatctatgaatacaagctggaactttatagaaaaacaaacagcaacactgccatcttcctgggatgaccgcatcttacttattcaataccttgaactgatagccactatcttcgtacgtttagatcccaccctactctaaaccatttcattctctgattttgatttttttttttacatgtaggatgatatttgcgatacccatcacttgttgaagctactgatggaagaaaacttggggctagcttcgaatgaggatcccacattaagaactatatttgagaagtaaacatatgttaaaggaaattgcaggatatgtagtttatgatgtaagatcatgttcaataaaaaagctgttttaccgctattcaacctgactgtacaggttagaatgtaatctttagtagctgtctgaatccaagtgaatgtatgagctcaatacttataaagaagtctggaatcttgtcatcagtttcactgattcgaagctgcatactgtctgtggttaagagtaaggtacaaagagaaaaactgttgaaggagggagattgatgagaatagttgatacttataccagcgcctatcttggaggaggatctttgaggattttacagttattctaacgcaaaatgacaagtagggttgaataaagaacctctccaagatgacacagttattcaatctttattttttacttgtgcagtttgggatattttctttgtgcaatctttttcgcccagtgcgcaatctacttccaggaatggtgtaaatctgaatacagtcaacgcaacgccaaagggcgggtaataaattttttcagaggacggatttttaaatcccaaggggtgggagtttttttttctcaaagcgcggttttcattttttcaaaagtcgttttttttttttttttctttcttaaagctcgttttttttttataaaagatgactactcgtttttattatgaagacggtcgatggaatggttgatgagcaaggagatgatgctatggactgacttgagaaagccatcccctttccatttaaaaactttaactcgtataagagagtactgtgaaaagcaagaagatgaatagttatcgtctcaagagggcctaataaatcttgatatggaggatgttataaccacagttaaaaagcagacaaagagttatcatagatactctaatgaacaaaagcttctatttgtgtattataacaaaatcaagctattcaaagcagctaaatccgagcgcttagcaggcggtataagcgaacgaacagcacaaacatgggccaaacaactcaaggaggataaagattgggatattttcgagaagcagaccaatttggttaatagaccaagaccatcattagatgataggcacaagcttcaccttctcgacttctgcgaccactgaccacaagcacgcataattgatgcagtggacttcctcacacaaaacttctctgatcctggtgtgaaaaaaagtgttgtccataacatttttgaaaactgagtgcaatctttccttcaaaaagctgacaactcaaccagctgctagaaatagtccaaccaaaattcaagattgtaaggattgggttattaagtggaatgcaacggactatttgaaaaattgtgtttttattgatgagtccgggtttaatatcaacatgaggccacctagtgaatgggcattgaaaggaaagccagctgttgcagagactcctaccggcagagctgtttctcacactgtattaggtgctatcacggcaaagtttgttgtttctaaaaagaatgacggagattgtgttccctgccatatatgaacgtacaaaaataataacaaacaatcagaaggaaaagtttgatgcgtcacataaactaattacgatccctgaaaatagctatgtaatggtaaaagtaaatattaaaaccaacacgttagatcctaactatgaaggaccttataaagtaaaaagaatgactcaagatggatcgtatgtactatagaggtgactggtcacaagcactgcacagctgcaagtaaattctcttgacaactttatctgaacctttttcgacggaaccaacatccttagggaaataagaaaatctaatacccgatagcagcgaaatgtttaatagtggttactaagactttctctacatgtcagatttaacttataaagcgactttcaaaacaacaagtacttgactacttttgtgataatcctgcttcagactggacatttaaaagatataaaaaaatattttagtgacaaagatcctgaaaaaatcaagaaagtttttgcggaaagcttacaaacggttaaagatgactcgaaaaacatttcgtccatcagcacatcaataaactgatggtgtcttttaatcctgcttcaagcaaatctactttggctaccaactctgcttcgagcatacctagctcttcggctgttaacaatatcacagtatgtagatccttgtttatagtatcatgtttactgatttgtatattctatctttaggtgaagggaaattattacaacgtaaggacttgaattttaattatttgaactattcactcacataagttataggctggtagagatataacgataaacgagacggccaagagagatagcaagaaacaaaaggtaaactaatactaaacgacattctttgcccgttacaaacttattactttttattagaccaaccataacgacaagaaagagattgaagaggttgatttcaagcaaaaatggattgagtttttggctgatgccgaacaaaacaaaaacttccatcggtataggtaaaatgaaacaatgatttgcttgaaagactgttattgatcttgattatagtccagagaagaatggtgagacgcgtttgggtgcgaaactatcgccacaccctcatgctaacaaagacacttacagaaaaatgaagatgcagttaaaacaacatgaagcaagtggtacttggatagatgtaaaaagttacattcgtagtctggttgctgcagtaagtatttttgatattcaaatttttgagttgaacttcaatcagctaatatgttgttatttattattcttagtctgacattgatgagttcgaacagaatattgagaacaaagaacttgtagaaggccaagaaaagacacgcagatgcatcaaggatatctgtaaagtcatgtatgtacaatatcatcagagtcatttcaatgatgaactaattttttgttggatttagggccaaggttttttttgaaaagaccatcaataacacgatcagaggctatatacaacaccaatatgatatttccttgtttcgaagctgtccttgctatgatgaagaagaatgggcatgctccttattttattcctggagaagatgagcttgaagcaatgactgcccagctgaaaaaaatgggacaaaagacagacaagcgaaagatatataaggctgatggcatcattcgtttggaaagatatatgaatttagaagttcttattttggaaacagcaggcgcttttggtcatgaagactatacaaagacagcttttgacaactcaaaaggcatgtttgctttgctttcgatgctaaagacaatagctgatcgatataaacatgcatcagttgaggagtttagcaagctcaagctgtattttgttcagccaagcggtaagtggtattaaaagcaacatttttttgtttgtgctaatgatattgtttgcctccaactaggctaccatatccgactgtggtcgatgcaatatgccaaaaatgggctctatgattttgttcgggaggaaaaaatcttgcgaagtgaagactttagtaccagagaagagcagctggtatctctggtcaattttttcttgagcctgaaggtatagttctaatcctaaacaatcgagaagaggagcaataataacaagcttaatttaattgtttagagccgtcttgaagagatagtaaatacaattacagctttgaaaggccaacacgaagagaacgagaagtactacgacagcgggaattatagccagataatctctctttctgacataatatgtccctggatttttaaattgagtttcaacactcatggacaacatttttcaaaggagcacctaatgagttcacctgaaagtgatttttaaattttctttttggttttttcttttaactacggctattcttaaaaaaacttttgataacccctaaatatataaaaaatttgcccccccccttatggaccatgttatgacactatttttctaactggcagcaaatgaaaattttgcgttgaacaactttgtgacaaaagagttctttgttgaagtttttctgagtcttgttctctcaaagggtggaaatagcacaagactgaaggatacgaccaaaaactataggcgattgctatcgaaatataaaaaagcttactttgaagacgctggttaaactccccaaagcttaccataagctcagcaaatagccttgtacgagtgtacgaagatccaaacggcctactataatagcatcaaagctcattttggaaacaggctgcgtggtttgataaacaagttatttaaaaagaaggaaaaggcagagagtctcagaggagaaatgcaagcaaacaagtctagtagtaaagcgataaaagaagctacccgaaagaagatttatggaccttgcaatcaggtgaagcttgccatcgcaaaaaaagagatgcctgaagttggtcttttagatgaccaatcaagaacgcaattaaatgattttctctcaagctactcagaggactacacctttcaaaagaactcaatttactatgacgttatggctagtccaaaaaaccatttcaaagccttcttcagacttgctgaactgtctgaagctgaacagacgaaacagtttgcttgtttcccgctacgtaccacctttatttcttgccacatgacgttggatagcaaaataatccattaccatgttctcaagagcaaaaagaatccaaaaacaggaagcaagtttgagacatagggtgctatcatagacctaaataaaagatgtccgcgcaccaaggatttcaaaagcctttgaggttccaaggaattctcgaaacagatggagtcggtgtctccataataaagcaaaacactgatacaagcagaaagtcgcctaagcccaacgctgaaaagaaagtggacggtaatcaaacagagcatattgaaggactagatcaagccgacttaaagagcgctgaaggcaagtgcgtcttgatagacactggaagacgggacttgatgtactgcatgaaagaaaccagcactgttgaagaaaaacaaacacttatatttaccaagaacaaccgctcaaaatgctcaaggcacttcagatatttaagaaggcgtgctcaaccttttgtggtccagaaagccgaagcaatcttttctagatctaaatccaactctgtagacttgaaaaagtttgtacagtacattaaaacaagagcatcagtaaaaaccattttgtacgaatacagtgctcacggcttcaaattgcgtccaaaaaaaaattcattgcgcatctttaattttcaaacagcgcatctttatttggtcaaattgcgcacttgtgatttctcaaactgcgctaataaaaaagtcaaactgcatattttacaactcaaattgcattatttttattcgtacctaagctattatctctttaaaagcaaatatcagatcgataacatgtactcaataaaaggaaaaattatttttgaagatggtcaaggaaatgtttttgatgagagcgggaatgaagcaatggactgggatgaggaagttgatactcataatttggagaacctaaccaacctaacacgctatttgaataagcaagtacagccggaaatggacttagacagtctggattttgttgaaaaaatgaaaacaatagagaagaaccttgaagagaaaaaaacgaaaagcaataataaaaaaaatctatattctgatgaccaaaaaaacgttatttatatatcttcacaagataaaattgttaaacgcagctgaatcggctcggagagcgggagtgaaagtacgtacagggcaagcgtggtctgcaagaatgaaggaagatcctaactggaatatatacgaaaagcaaacgaatcagaacaaaattggtacaggtcagctacaggagaagcataaagcttttcttcttgattattttgatgagtatccttcagctcgagttaaagatgcaattgatggccttacggaaaacttcgaaaacttctccttgaaagaaactgttgtgggaaagtacattagagaggattgtaatttaacaataaaaaaaagttacccgccatccacatgcaagaaacactgacaatactcgtaaagaaagacacgactgggtgaaaacttggtcgaaaacagatatggatttcaatagtaattgtgtctttattgacgaaagcgctttcgacattaatatgaggccaccaacagctagatctgctcgaggtacaccagtcataattactacgccaacaacaagggctataagccatacgattcttggtgcaatatgtcctatgggagtcgtcaacatggagatcagagttcctttaaaatcaaaaagaataaaagttgcaggaagccgcaaaagaaaaagtccagcagcgaaaaaaccagcaacaggtggcaccaattcaggtcattacgatagatttatgaacttaacgttggatgagatggacaagtatccggaaatgaaaggattttatttggttatggacaactcgcctattcatgacaaaaagagtggagagattgacaagatgattgaagattgaggctataagtgtgtttatctcccgaagtactcaccagaacttaaccctattgaacagttttgggcaagcgtcaaacacaaagtaagaagaagccaatttggtaatacagaggacctcaagacaagaataagcgaggcttgcgatgctgttcctgcacagcatatgaaaaactttattcaacactctgttaacgtgtttgagaaatgcttaaatgatataccgatttaaaagataaatcttttatataattcataatatgtagtatatgaaataaactgatgcatttttcttcctgacaacccactaacaatatgatgtaaaattaataaacctttttcaatttctctatatgggcctagatattcaattgatccgtatataacatttaaaaaataaaatactggtatataacctaattgttccaacaatacatctttaataaatcttataaattttacatcttttaattctgatctatgatccagttcgtatttagaaataggcattcatttgctatcagtttatttacttctttatttaaaatatctttgtataaactttcctcttcactttctgtcattatatattgatattcaattttttaaaaaacatcagcttttttatgacaatatatgattcgctacgctacgctacgatacgatacgctacgatacgcgaataaataaaagagttttattggtcaatttaagtataaatcgggatttttttcaacaaagggtatttatggatactgcaaccttttttaacgcttgtatgaatgtttctgttagaaatgagcggtaagttagatttacattgaaattgtgaatattttctctataacatgcaagaagaaattttagacgaaaatgacaaagagttttataattttgttgtcccaactgaatatcatcctggaattgatttgatcagcaaggtcattttaactgatgtacgagtccttaacgtcataactacagctattgctaaagcatcaaaacgttcatatgttattgaacctctagagatcccacataaacagtttggtgctgtcctatacattccccatggtcttcaaaatagtttacctttgatagtcatcaatactattacgacctttgaagaaacgaagtttaatcaaattatttaacaaagcaccaatatttttgaacggtataacacccttcctatttgtgtgatcatcgttgctcagcaacttgatgaaaaaattattgaacaaagctcccagcaccaagagctcccattccttcgagaaataccatgtgcattttgggcaaagcagtgtatattagtgtcatcaaaggatagtaggctcaacaagggtaaattaaaacaccatccattattggatattataattgctatcacaagcaatgaaaaagtcatgttatgtaatgatgaactataataaaattgtttatttaaattttctattatagacttcgtagactctcactagtattgaattgcttaattgactcaatattttcaagatgtcctgttttgaagcattctttccaattgattctcgttgtttttttgaaacgttggacgaaatcatataattctgcattatccacttcattctcaagttctacagtgcttagttgtcttcttttgttgagataaaccaaaggaggagtctcttcaattggcgttgtttcgattgcttcacagtattttcttttctgtcgtttcaagaattccaaagtagcttccacatagcttaatgactttttttttgacgcttcatctcctttttctaggcattttttttatctcgcgcagttggatttcactaatactacaaattttgtttatagcctccaatctttcagcttcttctccaactaactggtcaagattatcatgcgcaattgagtatagtaattttactaaagaatcattccttccatagtctaaagtactaatcaacaaagactgagagcaaaggaaatagccaaccgcttgcaaaggatgtaatattttttcttgttgtttcatctgtaaagtcgaagatgtcagtagcaaacaatgtttagcccatccagtgcttagtatctgtctcgcaaaggggaggtcactatctataggcttgctcagaaaaggtgctgtactacttccaattccaaatatcacaatgataggaagcctgttgtagcgttcgtatgtgagtgtgcagtattgaatggcacgtgccaagaatttgtcgtcggcttgattttgtacttcaactagtacagatggaaatgaactcaagggatcgcggggagcatagagaacatcactttttttttgttataaattctgtaggcgccgaaacatagttatcttctgccgcttctggcacgagagcttttaatagcatgtttatcacttgtttgtcggttaataccagtttgctgatcaaatcagttcctggcctgtgattataagggaggatgcgatcagtgtcatctaaacgattttatgtaagaaattatttgtatttttatagcatgtttacttacctttgtcaatactgaaatagtcagatgttatttttgaaaagtaaaagtgaagaaagaaaaagcgtaacgtatccgtattgtatccataataaaaaaaatctacccctcgtctggtttccaagttaagccgagatattcataatcgtatcatcaagctaaatcagcttatctggcctcatatattgaatcaaaataaaccattgggtgaagtagatgattcagcattcatcgatgccttctgttcgcagccccagtggattaattacaaacctaaaccatttcggttgtctctcatacagcgatctctaccatcatcggcaatgtcaccaacaccaacttccaaatggtcacttttttggaaactgcctatttcgcctgaaagccgatctttatggtatcgtctattccaccgtaaactctatagtcaatcacttctttcaagatttgataatggtttgacctcttcacactgtaaattttgctctgctaatactgaagacttacaacacctcttcgtgcgctgtcctacgaaatggagagtatggatagatgctttcaatttctttagtccacatctcactttcactcaagacaatgtatgctcaatcctttggtcttttcagcagtttacttttgttgacaacagtgatatctagactctcagctgctgtgtgctttccgttatccggcgtgcccattgaagatttactattgacgactttccttttattgataaacagctggtcactcatgctttgtcgcaatttgccaccctcaaaaggggcagactcgatcttgactagcatgttcaatcgcctacactctgttccgtttggttcataccgctctcagacgtgtggctcctattataatttataaaaataaactatttatttacaaaaaaaaaaaaaaaaatatctctccatttgcttacttttgctcgctttttaaattagccaatcataaatttttattcctttcccctcacttgtctatcgggctgaattggttgtaattttgacaacatacctgtcgtattactgttttctgaatagatgtacatacaggaactagcgtcacttgacagctgtccttagatgtaaagtcaaaaataaaatgcagcattttataagtattgattttttatgtcaatagaacctgcttttcatcatcaagtattgttttcttttattagagcaattccatgtttccaatcgcgtcttttgtgtttactttagggtgaaagagtaactgcaatgggatcctatattattatgaaacttatatttcaaaccaacagttaaaaagcgttttcctgggaagaaatctttttaaagcctatatatatagtttataaggaaaacatacaaagaatttttatctgcattatactaaatgtttgattgacacacacttattgaaacctgggtacaccggcagcaccagcctggtcaataaaacatgtgctcaacaacctaaaaattcacaaagtatataatgaatccaactctaaccaattattttcatgagatgtgtaatgtactgcttattttactacagttttttccttatctacaagaaatcatattttattacatgctatatgggttcaaggtttgaaaggacctctgctttttcgatacgcgctaatgtttattctgttcatttgtacaaaaagtacaacattttcaatcaatataaatatcatttgggataaatcccatattcacacagacacgttgattttaaaacgcacggtgcttttatcacagtataagaatgagaaatgaaaacatgaataaatgcatggtttatggattcaaattaaatttaattttattaaaattcaattactagtttgccaaattgattaccacgactacataaaaataaaatgttagtattttttttgttttccacgaaataaagtacgaacctcatagttaggatggcttgttcaaatgtgtttttatttaaacctttccaaacatgtgaaacaataggcctaatcttgtgtttttcgacaaattcaaccatctttctaaattctactcttgatcccatggtaactcctctgtaatcgatatttttgatgaagtaagatatcgggatattcagtccggtcgttacagtagctgtttgaccataacctacaacgatgccacctggtcgcatcagtttaggatattcagcataaagaggaccaccggcaccatcgatgactgcagacagcacgttattgcccaagagttcctttagttcctccatgcagttttctaatcatataatgtcaatattgaactacaagaatcctgaatttctaccatctttataattcactccgcctatagcacccagctcaatactcttttgaatcttttctggagaagaagatgtgacgtaaacatgggcacctgcagctacagcaaactgaagagcaaaaagtgcaacccctcctccaataccagtgattaggatatgttggcctttttgaactaagccctttgtaaacaaggatctataaagcacgttacgatcaaaattaagcttttttttacaaaagactttttggtacctgtaggcagtcaatccagccaatggcaaagcagcggcttctgtcattgaaagaaattcaggacaaggcacaatgtcctccttttcgacaatgacttcttcttttgtaaatgtgccaatcactggcaagagacccaatatgtgaaagtcacgttcaggacctctttcatccgaatcccatccatatccgggattaatcaagacacgttgtcctctttggccattcttcgtaatgtaaccaacgccatcagagcccaacacagaatctaatacagtaccatcatattgatccataaggatccaaacatccctttttaaaaaaaattaaaaaaagtcaagaaggagcctggttttgtttttaccgatggttgaaagcagcagcttgtatttggacagctacttgatgatccgcaaggttctcggaggatttgtgttccttgaattcaacgccgtacttgaattttgaatcaaaaggttgagtttcagtgagaatagcagagaccattttgtttcaaaaggcagtaatgatgtggtaaaggtagtgaaatggttgtatttatagtcattaaaaaaagcggaggggttagattaataagcagtaaacagctgctgtcacaaataccatttttcaaatgaattaataagcgcgctgaactctattagttttaaagcatcgttgatgaatcatatattcagatataatttattagcatcgtttattcaatcaacacgcaagattaaatgaatttgttcgtatccaaaaccaacttgctaatcttttaggacgtattttttattataaatttttcattttgttaactgtagtacaaaagctgagaattgtaaacgttctgatagattttattaataagccttctattatctgcaaaaccaaccaagatttgatgaaaaaaagaaaagaaaagcatattattcgttttcataaagaaaaattgtgtagtctttaattatagtttattgagatcaagctatacagtagcagaactaaggacacgcttaacaaaagctgtcatcgatatccactttttttttaaacctcaacttgttacttgaatatcatgtacttgcgtgaaataaaagggtatttttcataaacatttgaatgtatttatattgctttgtgctttgaaataacagcttgctgttgtaacatttagttattttatgctttttttatatagaaagttctttgataagtagcatgttttagataatgttatattagtttattacaatttgcattaagtaaagtaattgaaatttatagatgaatttaggaaaagagaggaaaaagaagaatgaaggttgaatgaaatataaacattttcgtctaatcctctaagcatccgagtagtctcgcatgtttttggtggaggcctttttggcaattcgtccacctaaactctttagtcctaaactgtgtcctgggttaccgacttgaaggtttttgagaccatcctcaaatggaaggccagtgacagtggcatcctcggttcctgcctttttagcatatcgcttaatgttggtttttgataaattaatacggaatgcagtgtctagtaaattgttgggttcaaggtattcatgtggaatatgtaaaaggaaggcaagaagttctgaattggttggacatgagtgtaagagatgatctaaatattatttaaaagaaatgtacattggtaaatattccatatccttttctcacctttgcataaatctagaatggctaggcttactcgataaaacactttaatgcctaagaagaaggaatgtatgtaagctgaggatctgaatatgtgtccttttcgtgttttttttagtttaccctcaaaataaaacgcgtcccaaacacgtagcactgattcccaaggaagtgtcatggtaaatgcagttaggaaccattgggctatatacatgattggaagtacatcattgttttctaaatgctgagccaactttgggttatgatcctttaataattgcccaatgatgtatgcatcaattcttaactgggaaagtgtaggtgtgaagtatccattcatataccgatcaatagtagccaccaataaccaaaacgagtcctttttttaatacaaaaatagttaatccatcaactctagatttctatttcttttcttttttttctattacttcgacagtcatctgcataagcattagtcctgctaaacggcccatgccttggcaatattctaaatcagaattgtattgggcatatgcttttaatatatttcgcaaattctgttgtcccaagccatccttttccataaattgtgtgtgatcaggataacatcgttcaatatctctttcaatcacgtcgtaaatagggatcctaggcttggacaacaggttttgaaattgatttgatctcttgtagtcatcactaccagccaagaattgccacactttggctctcacagatgctggtattcctccacgaaccaattttttcatctttacatcctttttaaccgttccagcatcgagtttgttgattatatttaaccattttaattcattttctctgtattctttcatagctttggtagacatatttgctctgcatgtaaataaactattagcttcctgggaagataaaatggggtttcagggggtgaggaacaatgaagaagacatgtacctgaatgaaggacgaccgcgtttgataatgaatccatattcatcaacattttcattttgaataaaagttgaattgttattattctttgttggtgtagtctggcttttcctttgtacaccggtgttttgtatattagtagctactgggcgtgcaggagatcttggtggtggtatagggccgtacagttctgtgttctcttcatccgagtaatcaatgttgagtgcagatgtatcaaatggatcatgattattgttgttattatctaatcatatattacacgtataagattaattttatgattattgataagctgcttttttttttctgtacctagattttctccagaataattgtaggaatcgtatgatattcgagactcttttatattatgacttgaagaagtcgaaactgagcctatactttcaaaactcggcttactgacccagtgtctcgatgagggtacgggtgaagcatatcgatcagaattggaagaaaatgaatgaatagagcctcttaattggttgaattgttcttgtctatttttcatcatttctatatcaaattctgttccatggctacttgtagagtttctatattgcgaatggtcggtaaaatcaagatcagcatcaagcgattctaatacacgaggatctaattctacaaaatgcacggtttctgcattaaaatttccaataacgccttcacagtatccctaaaagatctcttatattggtaaatctttatataaaatacagcattgtgctgtgtttatttaccatgtaaatatcattctctatatgttttaatatagtaatcctttctcctgtaaacaaatttagccttattttatatctaaaatgcctgtgtacacaaaccttgcaaatacatcagttcttcaggagtgttggccaaaatatccacttttgatacacaagcgcctaaaccacctatatattttttaacttggtcgatgtcacaatcctgtattgttgtaggaaacatacctttctcagcaaaggctttcaactcggctaaactcatcgaatcgacatctattgaagcattatccaaagcttctgctggatctttcaatagtcgtgcaatcttttcattaagctcttcgagattagcagaggtatgtcgtgtaatttttggttccatatatcaagtcaaaaaagagaaaaataaaataaggaagttccctccttttatatgaaagaaggaagaaaaaaaaaggtgaagaggatggtttactcccaaataaggaagacatgtgcgattaaacaccgctatgagttacgtggagaagaacctttttttattgtttatttaaaaagtaacaaaatggcccccattttaaatgtctaaatcatcatctggatcttcgtcatcaaagtcatcagcagcgtcaggatcgt

SEQ ID NO: 219 - DNA, 11463 bp, unidentified
  source 1..11463: mol_type = other DNA
agtctcagaggagaaatgcaagcaaacaagtctagtagtaaagcgataaaagaagctacccgaaagaagatttatggaccttgcaatcaggtgaagcttgccatcgcaaaaaaagagatgcctgaagttggtcttttagatgaccaatcaagaacgcaattaaatgattttctctcaagctactcagaggactacacctttcaaaagaactcaatttactatgacgttatggctagtccaaaaaaccatttcaaagccttcttcagacttgctgaactgtctgaagctgaacagacgaaacagtttgcttgtttcccgctacgtaccacctttatttcttgccacatgacgttggatagcaaaataatccattaccatgttctcaagagcaaaaagaatccaaaaacaggaagcaagtttgagacatagggtgctatcatagacctaaataaaagatgttcgcgcaccaaggatttcaaaagcctttgaggttccaaggaattctcgaaacagatggagtcggtgtctccataataaagcaaaacactgatacaagcagaaagtcgcctaagcccaacgctgaaaagaaagtggacggtaatcaaacagagcatattgaaggactagatcaagccgacttaaagagcgctgaaggcaagtgcgtcttgatagacactggaagacgggacttgatgtactgcatgaaagaaaccagcactgttgaagaaaaacaaacacttatatttaccaagaacaaccgctcaaaatgctcaaggcacttcagatatttaagaaggcgtgctcaaccttttgtggtccagaaagccgaagcaatcttttctagatctaaatccaactctgtagacttgaaaaagtttgtacagtacattaaaacaagagcatcagtaaaaaccattttgtacgaatacagtgctcacggcttcaaattgcgtccaaaaaaaaattcattgcgcatctttaattttcaaacagcgcatctttatttggtcaaattgcgcacttgtgatttctcaaactgcgctaataaaaaagtcaaactgcatattttacaactcaaattgcattatttttattcgtacctaagctattatctctttaaaagcaaatatcagatcgataacatgtactcaataaaaggaaaaattatttttgaagatggtcaaggaaatgtttttgatgagagcgggaatgaagcaatggactgggatgaggaagttgatactcataatttggagaacctaaccaacctaacacgctatttgaataagcaagtacagccggaaatggacttagacagtctggattttgttgaaaaaatgaaaacaatagagaagaaccttgaagagaaaaaaacgaaaagcaataataaaaaaaatctatattctgatgaccaaaaaaacgttatttatatatcttcacaagataaaattgttaaacgcagctgaatcggctcggagagcgggagtgaaagtacgtacagggcaagcgtggtctgcaagaatgaaggaagatcctaactggaatatatacgaaaagcaaacgaatcagaacaaaattggtacaggtcagctacaggagaagcataaagcttttcttcttgattattttgatgagtatccttcagctcgagttaaagatgcaattgatggccttacggaaaacttcgaaaacttctccttgaaagaaactgttgtgggaaagtacattagagaggattgtaatttaacaataaaaaaaagttacccgccatccacatgcaagaaacactgacaatactcgtaaagaaagacacgactgggtgaaaacttggtcgaaaacagatatggatttcaatagtaattgtgtctttattgacgaaagcgctttcgacattaatatgaggccaccaacagctagatctgctcgaggtacaccagtcataattactacgccaacaacaagggctataagccatacgattcttggtgcaatatgtcctatgggagtcgtcaacatggagatcagagttcctttaaaatcaaaaagaataaaagttgcaggaagccgcaaaagaaaaagtccagcagcgaaaaaaccagcaacaggtggcaccaattcaggtcattacgatagatttatgaacttaacgttggatgagatggacaagtatccggaaatgaaaggattttatttggttatggacaactcgcctattcatgacaaaaagagtggagagattgacaagatgattgaagattgaggctataagtgtgtttatctcccgaagtactcaccagaacttaaccctattgaacagttttgggcaagcgtcaaacacaaagtaagaagaagccaatttggtaatacagaggacctcaagacaagaataagcgaggcttgcgatgctgttcctgcacagcatatgaaaaactttattcaacactctgttaacgtgtttgagaaatgcttaaatgatataccgatttaaaagataaatcttttatataattcataatatgtagtatatgaaataaactgatgcatttttcttcctgacaacccactaacaatatgatgtaaaattaataaacctttttcaatttctctatatgggcctagatattcaattgatccgtatataacatttaaaaaataaaatactggtatataacctaattgttccaacaatacatctttaataaatcttataaattttacatcttttaattctgatctatgatccagttcgtatttagaaataggcattcatttgctatcagtttatttacttctttatttaaaatatctttgtataaactttcctcttcactttctgtcattatatattgatattcaattttttaaaaaacatcagcttttttatgacaatatatgattcgctacgctacgctacgatacgatacgctacgatacgcgaataaataaaagagttttattggtcaatttaagtataaatcgggatttttttcaacaaagggtatttatggatactgcaaccttttttaacgcttgtatgaatgtttctgttagaaatgagcggtaagttagatttacattgaaattgtgaatattttctctataacatgcaagaagaaattttagacgaaaatgacaaagagttttataattttgttgtcccaactgaatatcatcctggaattgatttaatcagcaaggtcattttaactgatgtacgagtccttaacgtcataactacagctattgctaaagcatcaaaacgttcatatgttattgaacctctagagatcccacataaacagtttggtgctgtcctatacattccccatggtcttcaaaatagtttacctttgatagtcatcaatactattacgacctttgaagaaacgaagtttaatcaaattatttaacaaagcaccaatatttttgaacggtataacacccttcctatttgtgtgatcatcgttgctcagcaacttgatgaaaaaattattgaacaaagctcccagcaccaagagctcccattccttcgagaaataccatgtgcattttgggcaaagcagtgtatattagtgtcatcaaaggatagtaggctcaacaagggtaaattaaaacaccatccattattggatattataattgctatcacaagcaatgaaaaagtcatgttatgtaatgatgaactataataaaattgtttatttaaattttctattatagacttcgtagactctcactagtattgaattgcttaattgactcaatattttcaagatgtcctgttttgaagcattctttccaattgattctcgttgtttttttgaaacgttggacgaaatcatataattctgcattatccacttcattctcaagttctacagtgcttagttgtcttcttttgttgagataaaccaaaggaggagtctcttcaattggcgttgtttcgattgcttcacagtattttcttttctgtcgtttcaagaattccaaagtagcttccacatagcttaatgactttttttttgacgcttcatctcctttttctaggcattttttttatctcgcgcagttggatttcactaatactacaaattttgtttatagcctccaatctttcagcttcttctccaactaactggtcaagattatcatgcgcaattgagtatagtaattttactaaagaatcattccttccatagtctaaagtactaatcaacaaagactgagagcaaaggaaatagccaaccgcttgcaaaggatgtaatattttttcttgttgtttcatctgtaaagtcgaagatgtcagtagcaaacaatgtttagcccatccagtgcttagtatctgtctcgcaaaggggaggtcactatctataggcttgctcagaaaaggtgctgtactacttccaattccaaatatcacaatgataggaagcctgttgtagcgttcgtatgtgagtgtgcagtattgaatggcacgtgccaagaatttgtcgtcggcttgattttgtacttcaactagtacagatggaaatgaactcaagggatcgcggggagcatagagaacatcactttttttttgttataaattctgtaggcgccgaaacatagttatcttctgccgcttctggcacgagagcttttaatagcatgtttatcacttgtttgtcggttaataccagtttgctgatcaaatcagttcctggcctgtgattataagggaggatgcgatcagtgtcatctaaacgattttatgtaagaaattatttgtatttttatagcatgtttacttacctttgtcaatactgaaatagtcagatgttatttttgaaaagtaaaagtgaagaaagaaaaagcgtaacgtatccgtattgtatccataataaaaaaaatctacccctcgtctggtttccaagttaagccgagatattcataatcgtatcatcaagctaaatcagcttatctggcctcatatattgaatcaaaataaaccattgggtgaagtagatgattcagcattcatcgatgccttctgttcgcagccccagtggattaattacaaacctaaaccatttcggttgtctctcatacagcgatctctaccatcatcggcaatgtcaccaacaccaacttccaaatggtcacttttttggaaactgcctatttcgcctgaaagccgatctttatggtatcgtctattccaccgtaaactctatagtcaatcacttctttcaagatttgataatggtttgacctcttcacactgtaaattttgctctgctaatactgaagacttacaacacctcttcgtgcgctgtcctacgaaatggagagtatggatagatgctttcaatttctttagtccacatctcactttcactcaagacaatgtatgctcaatcctttggtcttttcagcagtttacttttgttgacaacagtgatatctagactctcagctgctgtgtgctttccgttatccggcgtgcccattgaagatttactattgacgactttccttttattgataaacagctggtcactcatgctttgtcgcaatttgccaccctcaaaaggggcagactcgatcttgactagcatgttcaatcgcctacactctgttccgtttggttcataccgctctcagacgtgtggctcctattataatttataaaaataaactatttatttacaaaaaaaaaaaaaaaatatctctccatttgcttacttttgctcgctttttaaattagccaatcataaatttttattcctttcccctcacttgtctatcgggctgaattggttgtaattttgacaacatacctgtcgtattactgttttctgaatagatgtacatacaggaactagcgtcacttgacagctgtccttagatgtaaagtcaaaaataaaatgcagcattttataagtattgattttttatgtcaatagaacctgcttttcatcatcaagtattgttttcttttattagagcaattccatgtttccaatcgcgtcttttgtgtttactttagggtgaaagagtaactgcaatgggatcctatattattatgaaacttatatttcaaaccaacagttaaaaagcgttttcctgggaagaaatctttttaaagcctatatatatagtttataaggaaaacatacaaagaatttttatctgcattatactaaatgtttgattgacacacacttattgaaacctgggtacaccggcagcaccagcctggtcaataaaacatgtgctcaacaacctaaaaattcacaaagtatataatgaatccaactctaaccaattattttcatgagatgtgtaatgtactgcttattttactacagttttttccttatctacaagaaatcatattttattacatgctatatgggttcaaggtttgaaaggacctctgctttttcgatacgcgctaatgtttattctgttcatttgtacaaaaagtacaacattttcaatcaatataaatatcatttgggataaatcccatattcacacagacacgttgattttaaaacgcacggtgcttttatcacagtataagaatgagaaatgaaaacatgaataaatgcatggtttatggattcaaattaaatttaattttattaaaattcaattactagtttgccaaattgattaccacgactacataaaaataaaatgttagtattttttttgttttccacgaaataaagtacgaacctcatagttaggatggcttgttcaaatgtgtttttatttaaacctttccaaacatgtgaaacaataggcctaatcttgtgtttttcgacaaattcaaccatctttctaaattctactcttgatcccatggtaactcctctgtaatcgatatttttgatgaagtaagatatcgggatattcagtccggtcgttacagtagctgtttgaccataacctacaacgatgccacctggtcgcatcagtttaggatattcagcataaagaggaccaccggcaccatcgatgactgcagacagcacgttattgcccaagagttcctttagttcctccatgcagttttctaatcatataatgtcaatattgaactacaagaatcctgaatttctaccatctttataattcactccgcctatagcacccagctcaatactcttttgaatcttttctggagaagaagatgtgacgtaaacatgggcacctgcagctacagcaaactgaagagcaaaaagtgcaacccctcctccaataccagtgattaggatatgttggcctttttgaactaagccctttgtaaacaaggatctataaagtacgttacgatcaaaattaagcttttttttacaaaagactttttggtacctgtaggcagtcaatccagccaatggcaaagcagcggcttctgtcattgaaagaaattcaggacaaggcacaatgtcctccttttcgacaatgacttcttcttttgtaaatgtgccaatcactggcaagagacccaatatgtgaaagtcacgttcaggacctctttcatccgaatcccatccatatccgggattaatcaagacacgttgtcctctttggccattcttcgtaatgtaaccaacgccatcagagcccaacacagaatctaatacagtaccatcatattgatccataaggatccaaacatccctttttaaaaaaaattaaaaaaagtcaagaaggagcctggttttgtttttaccgatggttgaaagcagcagcttgtatttggacagctacttgatgatccgcaaggttctcggaggatttgtgttccttgaattcaacgccgtacttgaattttgaatcaaaaggttgagtttcagtgagaatagcagagaccattttgtttcaaaaggcagtaatgatgtggtaaaggtagtgaaatggttgtatttatagtcattaaaaaaagcggaggggttagattaataagcagtaaacagctgctgtcacaaataccatttttcaaatgaattaataagcgcgctgaactctattagttttaaagcatcgttgatgaatcatatattcagatataatttattagcatcgtttattcaatcaacacgcaagattaaatgaatttgttcgtatccaaaaccaacttgctaatcttttaggacgtattttttattataaatttttcattttgttaactgtagtacaaaagctgagaattgtaaacgttctgatagattttattaataagccttctattatctgcaaaaccaaccaagatttgatgaaaaaaagaaaagaaaagcatattattcgttttcataaagaaaaattgtgtagtctttaattatagtttattgagatcaagctatacagtagcagaactaaggacacgcttaacaaaagctgtcatcgatatccactttttttttaaacctcaacttgttacttgaatatcatgtacttgcgtgaaataaaagggtatttttcataaacatttgaatgtatttatattgctttgtgctttgaaataacagcttgctgttgtaacatttagttattttatgctttttttatatagaaagttctttgataagtagcatgttttagataatgttatattagtttattacaatttgcattaagtaaagtaattgaaatttatagatgaatttaggaaaagagaggaaaaagaagaatgaaggttgaatgaaatataaacattttcgtctaatcctctaagcatccgagtagtctcgcatgtttttggtggaggcctttttggcaattcgtccacctaaactctttagtcctaaactgtgtcctgggttaccgacttgaaggtttttgagaccatcctcaaatggaaggccagtgacagtggcatcctcggttcctgcctttttagcatatcgcttaatgttggtttttgataaattaatacggaatgcagtgtctagtaaattgttgggttcaaggtattcatgtggaatatgtaaaaggaaggcaagaagttctgaattggttggacatgagtgtaagagatgatctaaatattatttaaaagaaatgtacattggtaaatattccatatccttttctcacctttgcataaatctagaatggctaggcttactcgataaaacactttaatgcctaagaagaaggaatgtatgtaagctgaggatctgaatatgtgtccttttcgtgttttttttagtttaccctcaaaataaaacgcgtcccaaacacgtagcactgattcccaaggaagtgtcatggtaaatgcagttaggaaccattgggctatatacatgattggaagtacatcattgttttctaaatgctgagccaactttgggttatgatcctttaataattgcccaatgatgtatgcatcaattcttaactgggaaagtgtaggtgtgaagtatccattcatataccgatcaatagtagccaccaataaccaaaacgagtcctttttttaatacaaaaatagttaatccatcaactctagatttctatttcttttcttttttttctattacttcgacagtcatctgcataagcattagtcctgctaaacggcccatgccttggcaatattctaaatcagaattgtattgggcatatgcttttaatatatttcgcaaattctgttgtcccaagccatccttttccataaattgtgtgtgatcaggataacatcgttcaatatctctttcaatcacgtcgtaaatagggatcctaggcttggacaacaggttttgaaattgatttgatctcttgtagtcatcactaccagccaagaattgccacactttggctctcacagatgctggtattcctccacgaaccaattttttcatctttacatcctttttaaccgttccagcatcgagtttgttgattatatttaaccattttaattcattttctctgtattctttcatagctttggtagacatatttgctctgcatgtaaataaactattagcttcctgggaagataaaatggggtttcagggggtgaggaacaatgaagaagacatgtacctgaatgaaggacgaccgcgtttgataatgaatccatattcatcaacattttcattttgaataaaagttgaattgttattattctttgttggtgtagtctggcttttcctttgtacaccggtgttttgtatattagtagctactgggcgtgcaggagatcttggtggtggtatagggccgtacagttctgtgttctcttcatccgagtaatcaatgttgagtgcagatgtatcaaatggatcatgattattgttgttattatctaatcatatattacacgtataagattaattttatgattattgataagctgcttttttttttctgtacctagattttctccagaataattgtaggaatcgtatgatattcgagactcttttatattatgacttgaagaagtcgaaactgagcctatactttcaaaactcggcttactgacccagtgtctcgatgagggtacgggtgaagcatatcgatcagaattggaagaaaatgaatgaatagagcctcttaattggttgaattgttcttgtctatttttcatcatttctatatcaaattctgttccatggctacttgtagagtttctatattgcgaatggtcggtaaaatcaagatcagcgtcaagcgattctaatacacgaggatctaattctacaaaatgcacggtttctgcattaaaatttccaataacgccttcacagtatccctaaaagatctcttatattggtaaatctttatataaaatacagcattgtgctgtgtttatttaccatgtaaatatcattctctatatgttttaatatagtaatcctttctcctgtaaacaaatttagccttattttatatctaaaatgcctgtgtacacaaaccttgcaaatacatcagttcttcaggagtgttggccaaaatatccacttttgatacacaagcgcctaaaccacctatatattttttaacttggtcgatgtcacaatcctgtattgttgtaggaaacatacctttctcagcaaaggctttcaactcggctaaactcatcgaatcgacatctattgaagcattatccaaagcttctgctggatctttcaatagtcgtgcaatcttttcattaagctcttcgagattagcagaggtatgtcgtgtaatttttggttccatatatcaagtcaaaaaagagaaaaataaaataaggaagttccctccttttatatgaaagaaggaagaaaaaaaaggtgaagaggatggtttactcccaaataaggaagacatgtgcgattaaacaccgctatgagttacgtggagaagaacctttttttattgtttatttaaaaagtaacaaaatggcccccattttaaatgtctaaatcatcatctggatcttcgtcatcaaagtcatcagcagcgtcaggatcgtaa

SEQ ID NO: 220 - DNA, 11463 bp, unidentified; identical to SEQ ID NO: 219
  source 1..11463: mol_type = other DNA

SEQ ID NO: 221 - DNA, 11463 bp, unidentified; identical to SEQ ID NO: 219
  source 1..11463: mol_type = other DNA

SEQ ID NO: 222 - DNA, 11480 bp, unidentified
  source 1..11480: mol_type = other DNA
agaaggaaaaggcagagagtctcagaggagaaatgcaagcaaacaagtctagtagtaaagcgataaaagaagctacccgaaagaagatttatggaccttgcaatcaggtgaagcttgccatcgcaaaaaaagagatgcctgaagttggtcttttagatgaccaatcaagaacgcaattaaatgattttctctcaagctactcagaggactacacctttcaaaagaactcaatttactatgacgttatggctagtccaaaaaaccatttcaaagccttcttcagacttgctgaactgtctgaagctgaacagacgaaacagtttgcttgtttcccgctacgtaccacctttatttcttgccacatgacgttggatagcaaaataatccattaccatgttctcaagagcaaaaagaatccaaaaacaggaagcaagtttgagacatagggtgctatcatagacctaaataaaagatgttcgcgcaccaaggatttcaaaagcctttgaggttccaaggaattctcgaaacagatggagtcggtgtctccataataaagcaaaacactgatacaagcagaaagtcgcctaagcccaacgctgaaaagaaagtggacggtaatcaaacagagcatattgaaggactagatcaagccgacttaaagagcgctgaaggcaagtgcgtcttgatagacactggaagacgggacttgatgtactgcatgaaagaaaccagcactgttgaagaaaaacaaacacttatatttaccaagaacaaccgctcaaaatgctcaaggcacttcagatatttaagaaggcgtgctcaaccttttgtggtccagaaagccgaagcaatcttttctagatctaaatccaactctgtagacttgaaaaagtttgtacagtacattaaaacaagagcatcagtaaaaaccattttgtacgaatacagtgctcacggcttcaaattgcgtccaaaaaaaaattcattgcgcatctttaattttcaaacagcgcatctttatttggtcaaattgcgcacttgtgatttctcaaactgcgctaataaaaaagtcaaactgcatattttacaactcaaattgcattatttttattcgtacctaagctattatctctttaaaagcaaatatcagatcgataacatgtactcaataaaaggaaaaattatttttgaagatggtcaaggaaatgtttttgatgagagcgggaatgaagcaatggactgggatgaggaagttgatactcataatttggagaacctaaccaacctaacacgctatttgaataagcaagtacagccggaaatggacttagacagtctggattttgttgaaaaaatgaaaacaatagagaagaaccttgaagagaaaaaaacgaaaagcaataataaaaaaaatctatattctgatgaccaaaaaaacgttatttatatatcttcacaagataaaattgttaaacgcagctgaatcggctcggagagcgggagtgaaagtacgtacagggcaagcgtggtctgcaagaatgaaggaagatcctaactggaatatatacgaaaagcaaacgaatcagaacaaaattggtacaggtcagctacaggagaagcataaagcttttcttcttgattattttgatgagtatccttcagctcgagttaaagatgcaattgatggccttacggaaaacttcgaaaacttctccttgaaagaaactgttgtgggaaagtacattagagaggattgtaatttaacaataaaaaaaagttacccgccatccacatgcaagaaacactgacaatactcgtaaagaaagacacgactgggtgaaaacttggtcgaaaacagatatggatttcaatagtaattgtgtctttattgacgaaagcgctttcgacattaatatgaggccaccaacagctagatctgctcgaggtacaccagtcataattactacgccaacaacaagggctataagccatacgattcttggtgcaatatgtcctatgggagtcgtcaacatggagatcagagttcctttaaaatcaaaaagaataaaagttgcaggaagccgcaaaagaaaaagtccagcagcgaaaaaaccagcaacaggtggcaccaattcaggtcattacgatagatttatgaacttaacgttggatgagatggacaagtatccggaaatgaaaggattttatttggttatggacaactcgcctattcatgacaaaaagagtggagagattgacaagatgattgaagattgaggctataagtgtgtttatctcccgaagtactcaccagaacttaaccctattgaacagttttgggcaagcgtcaaacacaaagtaagaagaagccaatttggtaatacagaggacctcaagacaagaataagcgaggcttgcgatgctgttcctgcacagcatatgaaaaactttattcaacactctgttaacgtgtttgagaaatgcttaaatgatataccgatttaaaagataaatcttttatataattcataatatgtagtatatgaaataaactgatgcatttttcttcctgacaacccactaacaatatgatgtaaaattaataaacctttttcaatttctctatatgggcctagatattcaattgatccgtatataacatttaaaaaataaaatactggtatataacctaattgttccaacaatacatctttaataaatcttataaattttacatcttttaattctgatctatgatccagttcgtatttagaaataggcattcatttgctatcagtttatttacttctttatttaaaatatctttgtataaactttcctcttcactttctgtcattatatattgatattcaattttttaaaaaacatcagcttttttatgacaatatatgattcgctacgctacgctacgatacgatacgctacgatacgcgaataaataaaagagttttattggtcaatttaagtataaatcgggatttttttcaacaaagggtatttatggatactgcaaccttttttaacgcttgtatgaatgtttctgttagaaatgagcggtaagttagatttacattgaaattgtgaatattttctctataacatgcaagaagaaattttagacgaaaatgacaaagagttttataattttgttgtcccaactgaatatcatcctggaattgatttaatcagcaaggtcattttaactgatgtacgagtccttaacgtcataactacagctattgctaaagcatcaaaacgttcatatgttattgaacctctagagatcccacataaacagtttggtgctgtcctatacattccccatggtcttcaaaatagtttacctttgatagtcatcaatactattacgacctttgaagaaacgaagtttaatcaaattatttaacaaagcaccaatatttttgaacggtataacacccttcctatttgtgtgatcatcgttgctcagcaacttgatgaaaaaattattgaacaaagctcccagcaccaagagctcccattccttcgagaaataccatgtgcattttgggcaaagcagtgtatattagtgtcatcaaaggatagtaggctcaacaagggtaaattaaaacaccatccattattggatattataattgctatcacaagcaatgaaaaagtcatgttatgtaatgatgaactataataaaattgtttatttaaattttctattatagacttcgtagactctcactagtattgaattgcttaattgactcaatattttcaagatgtcctgttttgaagcattctttccaattgattctcgttgtttttttgaaacgttggacgaaatcatataattctgcattatccacttcattctcaagttctacagtgcttagttgtcttcttttgttgagataaaccaaaggaggagtctcttcaattggcgttgtttcgattgcttcacagtattttcttttctgtcgtttcaagaattccaaagtagcttccacatagcttaatgactttttttttgacgcttcatctcctttttctaggcattttttttatctcgcgcagttggatttcactaatactacaaattttgtttatagcctccaatctttcagcttcttctccaactaactggtcaagattatcatgcgcaattgagtatagtaattttactaaagaatcattccttccatagtctaaagtactaatcaacaaagactgagagcaaaggaaatagccaaccgcttgcaaaggatgtaatattttttcttgttgtttcatctgtaaagtcgaagatgtcagtagcaaacaatgtttagcccatccagtgcttagtatctgtctcgcaaaggggaggtcactatctataggcttgctcagaaaaggtgctgtactacttccaattccaaatatcacaatgataggaagcctgttgtagcgttcgtatgtgagtgtgcagtattgaatggcacgtgccaagaatttgtcgtcggcttgattttgtacttcaactagtacagatggaaatgaactcaagggatcgcggggagcatagagaacatcactttttttttgttataaattctgtaggcgccgaaacatagttatcttctgccgcttctggcacgagagcttttaatagcatgtttatcacttgtttgtcggttaataccagtttgctgatcaaatcagttcctggcctgtgattataagggaggatgcgatcagtgtcatctaaacgattttatgtaagaaattatttgtatttttatagcatgtttacttacctttgtcaatactgaaatagtcagatgttatttttgaaaagtaaaagtgaagaaagaaaaagcgtaacgtatccgtattgtatccataataaaaaaaatctacccctcgtctggtttccaagttaagccgagatattcataatcgtatcatcaagctaaatcagcttatctggcctcatatattgaatcaaaataaaccattgggtgaagtagatgattcagcattcatcgatgccttctgttcgcagccccagtggattaattacaaacctaaaccatttcggttgtctctcatacagcgatctctaccatcatcggcaatgtcaccaacaccaacttccaaatggtcacttttttggaaactgcctatttcgcctgaaagccgatctttatggtatcgtctattccaccgtaaactctatagtcaatcacttctttcaagatttgataatggtttgacctcttcacactgtaaattttgctctgctaatactgaagacttacaacacctcttcgtgcgctgtcctacgaaatggagagtatggatagatgctttcaatttctttagtccacatctcactttcactcaagacaatgtatgctcaatcctttggtcttttcagcagtttacttttgttgacaacagtgatatctagactctcagctgctgtgtgctttccgttatccggcgtgcccattgaagatttactattgacgactttccttttattgataaacagctggtcactcatgctttgtcgcaatttgccaccctcaaaaggggcagactcgatcttgactagcatgttcaatcgcctacactctgttccgtttggttcataccgctctcagacgtgtggctcctattataatttataaaaataaactatttatttacaaaaaaaaaaaaaaaatatctctccatttgcttacttttgctcgctttttaaattagccaatcataaatttttattcctttcccctcacttgtctatcgggctgaattggttgtaattttgacaacatacctgtcgtattactgttttctgaatagatgtacatacaggaactagcgtcacttgacagctgtccttagatgtaaagtcaaaaataaaatgcagcattttataagtattgattttttatgtcaatagaacctgcttttcatcatcaagtattgttttcttttattagagcaattccatgtttccaatcgcgtcttttgtgtttactttagggtgaaagagtaactgcaatgggatcctatattattatgaaacttatatttcaaaccaacagttaaaaagcgttttcctgggaagaaatctttttaaagcctatatatatagtttataaggaaaacatacaaagaatttttatctgcattatactaaatgtttgattgacacacacttattgaaacctgggtacaccggcagcaccagcctggtcaataaaacatgtgctcaacaacctaaaaattcacaaagtatataatgaatccaactctaaccaattattttcatgagatgtgtaatgtactgcttattttactacagttttttccttatctacaagaaatcatattttattacatgctatatgggttcaaggtttgaaaggacctctgctttttcgatacgcgctaatgtttattctgttcatttgtacaaaaagtacaacattttcaatcaatataaatatcatttgggataaatcccatattcacacagacacgttgattttaaaacgcacggtgcttttatcacagtataagaatgagaaatgaaaacatgaataaatgcatggtttatggattcaaattaaatttaattttattaaaattcaattactagtttgccaaattgattaccacgactacataaaaataaaatgttagtattttttttgttttccacgaaataaagtacgaacctcatagttaggatggcttgttcaaatgtgtttttatttaaacctttccaaacatgtgaaacaataggcctaatcttgtgtttttcgacaaattcaaccatctttctaaattctactcttgatcccatggtaactcctctgtaatcgatatttttgatgaagtaagatatcgggatattcagtccggtcgttacagtagctgtttgaccataacctacaacgatgccacctggtcgcatcagtttaggatattcagcataaagaggaccaccggcaccatcgatgactgcagacagcacgttattgcccaagagttcctttagttcctccatgcagttttctaatcatataatgtcaatattgaactacaagaatcctgaatttctaccatctttataattcactccgcctatagcacccagctcaatactcttttgaatcttttctggagaagaagatgtgacgtaaacatgggcacctgcagctacagcaaactgaagagcaaaaagtgcaacccctcctccaataccagtgattaggatatgttggcctttttgaactaagccctttgtaaacaaggatctataaagtacgttacgatcaaaattaagcttttttttacaaaagactttttggtacctgtaggcagtcaatccagccaatggcaaagcagcggcttctgtcattgaaagaaattcaggacaaggcacaatgtcctccttttcgacaatgacttcttcttttgtaaatgtgccaatcactggcaagagacccaatatgtgaaagtcacgttcaggacctctttcatccgaatcccatccatatccgggattaatcaagacacgttgtcctctttggccattcttcgtaatgtaaccaacgccatcagagcccaacacagaatctaatacagtaccatcatattgatccataaggatccaaacatccctttttaaaaaaaattaaaaaaagtcaagaaggagcctggttttgtttttaccgatggttgaaagcagcagcttgtatttggacagctacttgatgatccgcaaggttctcggaggatttgtgttccttgaattcaacgccgtacttgaattttgaatcaaaaggttgagtttcagtgagaatagcagagaccattttgtttcaaaaggcagtaatgatgtggtaaaggtagtgaaatggttgtatttatagtcattaaaaaaagcggaggggttagattaataagcagtaaacagctgctgtcacaaataccatttttcaaatgaattaataagcgcgctgaactctattagttttaaagcatcgttgatgaatcatatattcagatataatttattagcatcgtttattcaatcaacacgcaagattaaatgaatttgttcgtatccaaaaccaacttgctaatcttttaggacgtattttttattataaatttttcattttgttaactgtagtacaaaagctgagaattgtaaacgttctgatagattttattaataagccttctattatctgcaaaaccaaccaagatttgatgaaaaaaagaaaagaaaagcatattattcgttttcataaagaaaaattgtgtagtctttaattatagtttattgagatcaagctatacagtagcagaactaaggacacgcttaacaaaagctgtcatcgatatccactttttttttaaacctcaacttgttacttgaatatcatgtacttgcgtgaaataaaagggtatttttcataaacatttgaatgtatttatattgctttgtgctttgaaataacagcttgctgttgtaacatttagttattttatgctttttttatatagaaagttctttgataagtagcatgttttagataatgttatattagtttattacaatttgcattaagtaaagtaattgaaatttatagatgaatttaggaaaagagaggaaaaagaagaatgaaggttgaatgaaatataaacattttcgtctaatcctctaagcatccgagtagtctcgcatgtttttggtggaggcctttttggcaattcgtccacctaaactctttagtcctaaactgtgtcctgggttaccgacttgaaggtttttgagaccatcctcaaatggaaggccagtgacagtggcatcctcggttcctgcctttttagcatatcgcttaatgttggtttttgataaattaatacggaatgcagtgtctagtaaattgttgggttcaaggtattcatgtggaatatgtaaaaggaaggcaagaagttctgaattggttggacatgagtgtaagagatgatctaaatattatttaaaagaaatgtacattggtaaatattccatatccttttctcacctttgcataaatctagaatggctaggcttactcgataaaacactttaatgcctaagaagaaggaatgtatgtaagctgaggatctgaatatgtgtccttttcgtgttttttttagtttaccctcaaaataaaacgcgtcccaaacacgtagcactgattcccaaggaagtgtcatggtaaatgcagttaggaaccattgggctatatacatgattggaagtacatcattgttttctaaatgctgagccaactttgggttatgatcctttaataattgcccaatgatgtatgcatcaattcttaactgggaaagtgtaggtgtgaagtatccattcatataccgatcaatagtagccaccaataaccaaaacgagtcctttttttaatacaaaaatagttaatccatcaactctagatttctatttcttttcttttttttctattacttcgacagtcatctgcataagcattagtcctgctaaacggcccatgccttggcaatattctaaatcagaattgtattgggcatatgcttttaatatatttcgcaaattctgttgtcccaagccatccttttccataaattgtgtgtgatcaggataacatcgttcaatatctctttcaatcacgtcgtaaatagggatcctaggcttggacaacaggttttgaaattgatttgatctcttgtagtcatcactaccagccaagaattgccacactttggctctcacagatgctggtattcctccacgaaccaattttttcatctttacatcctttttaaccgttccagcatcgagtttgttgattatatttaaccattttaattcattttctctgtattctttcatagctttggtagacatatttgctctgcatgtaaataaactattagcttcctgggaagataaaatggggtttcagggggtgaggaacaatgaagaagacatgtacctgaatgaaggacgaccgcgtttgataatgaatccatattcatcaacattttcattttgaataaaagttgaattgttattattctttgttggtgtagtctggcttttcctttgtacaccggtgttttgtatattagtagctactgggcgtgcaggagatcttggtggtggtatagggccgtacagttctgtgttctcttcatccgagtaatcaatgttgagtgcagatgtatcaaatggatcatgattattgttgttattatctaatcatatattacacgtataagattaattttatgattattgataagctgcttttttttttctgtacctagattttctccagaataattgtaggaatcgtatgatattcgagactcttttatattatgacttgaagaagtcgaaactgagcctatactttcaaaactcggcttactgacccagtgtctcgatgagggtacgggtgaagcatatcgatcagaattggaagaaaatgaatgaatagagcctcttaattggttgaattgttcttgtctatttttcatcatttctatatcaaattctgttccatggctacttgtagagtttctatattgcgaatggtcggtaaaatcaagatcagcgtcaagcgattctaatacacgaggatctaattctacaaaatgcacggtttctgcattaaaatttccaataacgccttcacagtatccctaaaagatctcttatattggtaaatctttatataaaatacagcattgtgctgtgtttatttaccatgtaaatatcattctctatatgttttaatatagtaatcctttctcctgtaaacaaatttagccttattttatatctaaaatgcctgtgtacacaaaccttgcaaatacatcagttcttcaggagtgttggccaaaatatccacttttgatacacaagcgcctaaaccacctatatattttttaacttggtcgatgtcacaatcctgtattgttgtaggaaacatacctttctcagcaaaggctttcaactcggctaaactcatcgaatcgacatctattgaagcattatccaaagcttctgctggatctttcaatagtcgtgcaatcttttcattaagctcttcgagattagcagaggtatgtcgtgtaatttttggttccatatatcaagtcaaaaaagagaaaaataaaataaggaagttccctccttttatatgaaagaaggaagaaaaaaaaggtgaagaggatggtttactcccaaataaggaagacatgtgcgattaaacaccgctatgagttacgtggagaagaacctttttttattgtttatttaaaaagtaacaaaatggcccccattttaaatgtctaaatcatcatctggatcttcgtcatcaaagtcatcagcagcgtcaggatcgtaa

SEQ ID NO: 223 - DNA, 3061 bp, unidentified
  source 1..3061: mol_type = other DNA
ttctttgttgaagtttttctgagtcttgttctctcaaagggtggaaatagcacaagactgaaggatacgaccaaaaactataggcgattgatatcaaaatataaagaagcttactttgaagacgctggttatactccccccaacttaccatatgctcagcaaatagccttgtacgagtgtatgaagatccaaacggcctactataataacatcaaagctcattttggaaacaggctgcgtggtttgataaacaagttatttaaaaagaaggaaaaggcagagagtctcagaggagaaatgcaagcaaacaagtctagtagtaaagcgataaaagaagctacccgaaagaagatttatggaccttgcaatcaggtgaagcttgccatcgcaaaaaaagagatgcctgaagttggtcttttagatgaccaatcaagaacgcaattaaatgattttctctcaagctactcagaggactacacctttcaaaagaactcaatttactatgacgttatggctagtccaaaaaaccatttcaaagccttcttcagacttgctgaactgtctgaagctgaacagacgaaacagtttgcttgtttcccgctacgtaccacctttatttcttgccacatgacgttggatagcaaaataatccattaccatgttctcaagagcaaaaagaatccaaaaacaggaagcaagtttgagacatagggtgctatcatagacctaaataaaagatgttcgcgcaccaaggatttcaaaagcctttgaggttccaaggaattctcgaaacagatggagtcggtgtctccataataaagcaaaacactgatacaagcagaaagtcgcctaagcccaacgctgaaaagaaagtggacggtaatcaaacagagcatattgaaggactagatcaagccgacttaaagagcgctgaaggcaagtgcgtcttgatagacactggaagacgggacttgatgtactgcatgaaagaaaccagcactgttgaagaaaaacaaacacttatatttaccaagaacaaccgctcaaaatgctcaaggcacttcagatatttaagaaggcgtgctcaaccttttgtggtccagaaagccgaagcaatcttttctagatctaaatccaactctgtagacttgaaaaagtttgtacagtacattaaaacaagagcatcagtaaaaaccattttgtacgaatacagtgctcacggcttcaaattgcgtccaaaaaaaaattcattgcgcatctttaattttcaaacagcgcatctttatttggtcaaattgcgcacttgtgatttctcaaactgcgctaataaaaaagtcaaactgcatattttacaactcaaattgcattatttttattcgtacctaagctattatctctttaaaagcaaatatcagatcgataacatgtactcaataaaaggaaaaattatttttgaagatggtcaaggaaatgtttttgatgagagcgggaatgaagcaatggactgggatgaggaagttgatactcataatttggagaacctaaccaacctaacacgctatttgaataagcaagtacagccggaaatggacttagacagtctggattttgttgaaaaaatgaaaacaatagagaagaaccttgaagagaaaaaaacgaaaagcaataataaaaaaaatctatattctgatgaccaaaaaaacgttatttatatatcttcacaagataaaattgttaaacgcagctgaatcggctcggagagcgggagtgaaagtacgtacagggcaagcgtggtctgcaagaatgaaggaagatcctaactggaatatatacgaaaagcaaacgaatcagaacaaaattggtacaggtcagctacaggagaagcataaagcttttcttcttgattattttgatgagtatccttcagctcgagttaaagatgcaattgatggccttacggaaaacttcgaaaacttctccttgaaagaaactgttgtgggaaagtacattagagaggattgtaatttaacaataaaaaaaagttacccgccatccacatgcaagaaacactgacaatactcgtaaagaaagacacgactgggtgaaaacttggtcgaaaacagatatggatttcaatagtaattgtgtctttattgacgaaagcgctttcgacattaatatgaggccaccaacagctagatctgctcgaggtacaccagtcataattactacgccaacaacaagggctataagccatacgattcttggtgcaatatgtcctatgggagtcgtcaacatggagatcagagttcctttaaaatcaaaaagaataaaagttgcaggaagccgcaaaagaaaaagtccagcagcgaaaaaaccagcaacaggtggcaccaattcaggtcattacgatagatttatgaacttaacgttggatgagatggacaagtatccggaaatgaaaggattttatttggttatggacaactcgcctattcatgacaaaaagagtggagagattgacaagatgattgaagattgaggctataagtgtgtttatctcccgaagtactcaccagaacttaaccctattgaacagttttgggcaagcgtcaaacacaaagtaagaagaagccaatttggtaatacagaggacctcaagacaagaataagcgaggcttgcgatgctgttcctgcacagcatatgaaaaactttattcaacactctgttaacgtgtttgagaaatgcttaaatgatataccgatttaaaagataaatcttttatataattcataatatgtagtatatgaaataaactgatgcatttttcttcctgacaacccactaacaatatgatgtaaaattaataaacctttttcaatttctctatatgggcctagatattcaattgatccgtatataacatttaaaaaataaaatactggtatataacctaattgttccaacaatacatctttaataaatcttataaattttacatcttttaattctgatctatgatccagttcgtatttagaaataggcattcatttgctatca

SEQ ID NO: 224 - DNA, 11480 bp, unidentified; identical to SEQ ID NO: 222
  source 1..11480: mol_type = other DNA

SEQ ID NO: 225 - DNA, 11514 bp, unidentified
  source 1..11514: mol_type = other DNA
aggctgcgtggtttgataaacaagttatttaaaaagaaggaaaaggcagagagtctcagaggagaaatgcaagcaaacaagtctagtagtaaagcgataaaagaagctacccgaaagaagatttatggaccttgcaatcaggtgaagcttgccatcgcaaaaaaagagatgcctgaagttggtcttttagatgaccaatcaagaacgcaattaaatgattttctctcaagctactcagaggactacacctttcaaaagaactcaatttactatgacgttatggctagtccaaaaaaccatttcaaagccttcttcagacttgctgaactgtctgaagctgaacagacgaaacagtttgcttgtttcccgctacgtaccacctttatttcttgccacatgacgttggatagcaaaataatccattaccatgttctcaagagcaaaaagaatccaaaaacaggaagcaagtttgagacatagggtgctatcatagacctaaataaaagatgttcgcgcaccaaggatttcaaaagcctttgaggttccaaggaattctcgaaacagatggagtcggtgtctccataataaagcaaaacactgatacaagcagaaagtcgcctaagcccaacgctgaaaagaaagtggacggtaatcaaacagagcatattgaaggactagatcaagccgacttaaagagcgctgaaggcaagtgcgtcttgatagacactggaagacgggacttgatgtactgcatgaaagaaaccagcactgttgaagaaaaacaaacacttatatttaccaagaacaaccgctcaaaatgctcaaggcacttcagatatttaagaaggcgtgctcaaccttttgtggtccagaaagccgaagcaatcttttctagatctaaatccaactctgtagacttgaaaaagtttgtacagtacattaaaacaagagcatcagtaaaaaccattttgtacgaatacagtgctcacggcttcaaattgcgtccaaaaaaaaattcattgcgcatctttaattttcaaacagcgcatctttatttggtcaaattgcgcacttgtgatttctcaaactgcgctaataaaaaagtcaaactgcatattttacaactcaaattgcattatttttattcgtacctaagctattatctctttaaaagcaaatatcagatcgataacatgtactcaataaaaggaaaaattatttttgaagatggtcaaggaaatgtttttgatgagagcgggaatgaagcaatggactgggatgaggaagttgatactcataatttggagaacctaaccaacctaacacgctatttgaataagcaagtacagccggaaatggacttagacagtctggattttgttgaaaaaatgaaaacaatagagaagaaccttgaagagaaaaaaacgaaaagcaataataaaaaaaatctatattctgatgaccaaaaaaacgttatttatatatcttcacaagataaaattgttaaacgcagctgaatcggctcggagagcgggagtgaaagtacgtacagggcaagcgtggtctgcaagaatgaaggaagatcctaactggaatatatacgaaaagcaaacgaatcagaacaaaattggtacaggtcagctacaggagaagcataaagcttttcttcttgattattttgatgagtatccttcagctcgagttaaagatgcaattgatggccttacggaaaacttcgaaaacttctccttgaaagaaactgttgtgggaaagtacattagagaggattgtaatttaacaataaaaaaaagttacccgccatccacatgcaagaaacactgacaatactcgtaaagaaagacacgactgggtgaaaacttggtcgaaaacagatatggatttcaatagtaattgtgtctttattgacgaaagcgctttcgacattaatatgaggccaccaacagctagatctgctcgaggtacaccagtcataattactacgccaacaacaagggctataagccatacgattcttggtgcaatatgtcctatgggagtcgtcaacatggagatcagagttcctttaaaatcaaaaagaataaaagttgcaggaagccgcaaaagaaaaagtccagcagcgaaaaaaccagcaacaggtggcaccaattcaggtcattacgatagatttatgaacttaacgttggatgagatggacaagtatccggaaatgaaaggattttatttggttatggacaactcgcctattcatgacaaaaagagtggagagattgacaagatgattgaagattgaggctataagtgtgtttatctcccgaagtactcaccagaacttaaccctattgaacagttttgggcaagcgtcaaacacaaagtaagaagaagccaatttggtaatacagaggacctcaagacaagaataagcgaggcttgcgatgctgttcctgcacagcatatgaaaaactttattcaacactctgttaacgtgtttgagaaatgcttaaatgatataccgatttaaaagataaatcttttatataattcataatatgtagtatatgaaataaactgatgcatttttcttcctgacaacccactaacaatatgatgtaaaattaataaacctttttcaatttctctatatgggcctagatattcaattgatccgtatataacatttaaaaaataaaatactggtatataacctaattgttccaacaatacatctttaataaatcttataaattttacatcttttaattctgatctatgatccagttcgtatttagaaataggcattcatttgctatcagtttatttacttctttatttaaaatatctttgtataaactttcctcttcactttctgtcattatatattgatattcaattttttaaaaaacatcagcttttttatgacaatatatgattcgctacgctacgctacgatacgatacgctacgatacgcgaataaataaaagagttttattggtcaatttaagtataaatcgggatttttttcaacaaagggtatttatggatactgcaaccttttttaacgcttgtatgaatgtttctgttagaaatgagcggtaagttagatttacattgaaattgtgaatattttctctataacatgcaagaagaaattttagacgaaaatgacaaagagttttataattttgttgtcccaactgaatatcatcctggaattgatttaatcagcaaggtcattttaactgatgtacgagtccttaacgtcataactacagctattgctaaagcatcaaaacgttcatatgttattgaacctctagagatcccacataaacagtttggtgctgtcctatacattccccatggtcttcaaaatagtttacctttgatagtcatcaatactattacgacctttgaagaaacgaagtttaatcaaattatttaacaaagcaccaatatttttgaacggtataacacccttcctatttgtgtgatcatcgttgctcagcaacttgatgaaaaaattattgaacaaagctcccagcaccaagagctcccattccttcgagaaataccatgtgcattttgggcaaagcagtgtatattagtgtcatcaaaggatagtaggctcaacaagggtaaattaaaacaccatccattattggatattataattgctatcacaagcaatgaaaaagtcatgttatgtaatgatgaactataataaaattgtttatttaaattttctattatagacttcgtagactctcactagtattgaattgcttaattgactcaatattttcaagatgtcctgttttgaagcattctttccaattgattctcgttgtttttttgaaacgttggacgaaatcatataattctgcattatccacttcattctcaagttctacagtgcttagttgtcttcttttgttgagataaaccaaaggaggagtctcttcaattggcgttgtttcgattgcttcacagtattttcttttctgtcgtttcaagaattccaaagtagcttccacatagcttaatgactttttttttgacgcttcatctcctttttctaggcattttttttatctcgcgcagttggatttcactaatactacaaattttgtttatagcctccaatctttcagcttcttctccaactaactggtcaagattatcatgcgcaattgagtatagtaattttactaaagaatcattccttccatagtctaaagtactaatcaacaaagactgagagcaaaggaaatagccaaccgcttgcaaaggatgtaatattttttcttgttgtttcatctgtaaagtcgaagatgtcagtagcaaacaatgtttagcccatccagtgcttagtatctgtctcgcaaaggggaggtcactatctataggcttgctcagaaaaggtgctgtactacttccaattccaaatatcacaatgataggaagcctgttgtagcgttcgtatgtgagtgtgcagtattgaatggcacgtgccaagaatttgtcgtcggcttgattttgtacttcaactagtacagatggaaatgaactcaagggatcgcggggagcatagagaacatcactttttttttgttataaattctgtaggcgccgaaacatagttatcttctgccgcttctggcacgagagcttttaatagcatgtttatcacttgtttgtcggttaataccagtttgctgatcaaatcagttcctggcctgtgattataagggaggatgcgatcagtgtcatctaaacgattttatgtaagaaattatttgtatttttatagcatgtttacttacctttgtcaatactgaaatagtcagatgttatttttgaaaagtaaaagtgaagaaagaaaaagcgtaacgtatccgtattgtatccataataaaaaaaatctacccctcgtctggtttccaagttaagccgagatattcataatcgtatcatcaagctaaatcagcttatctggcctcatatattgaatcaaaataaaccattgggtgaagtagatgattcagcattcatcgatgccttctgttcgcagccccagtggattaattacaaacctaaaccatttcggttgtctctcatacagcgatctctaccatcatcggcaatgtcaccaacaccaacttccaaatggtcacttttttggaaactgcctatttcgcctgaaagccgatctttatggtatcgtctattccaccgtaaactctatagtcaatcacttctttcaagatttgataatggtttgacctcttcacactgtaaattttgctctgctaatactgaagacttacaacacctcttcgtgcgctgtcctacgaaatggagagtatggatagatgctttcaatttctttagtccacatctcactttcactcaagacaatgtatgctcaatcctttggtcttttcagcagtttacttttgttgacaacagtgatatctagactctcagctgctgtgtgctttccgttatccggcgtgcccattgaagatttactattgacgactttccttttattgataaacagctggtcactcatgctttgtcgcaatttgccaccctcaaaaggggcagactcgatcttgactagcatgttcaatcgcctacactctgttccgtttggttcataccgctctcagacgtgtggctcctattataatttataaaaataaactatttatttacaaaaaaaaaaaaaaaatatctctccatttgcttacttttgctcgctttttaaattagccaatcataaatttttattcctttcccctcacttgtctatcgggctgaattggttgtaattttgacaacatacctgtcgtattactgttttctgaatagatgtacatacaggaactagcgtcacttgacagctgtccttagatgtaaagtcaaaaataaaatgcagcattttataagtattgattttttatgtcaatagaacctgcttttcatcatcaagtattgttttcttttattagagcaattccatgtttccaatcgcgtcttttgtgtttactttagggtgaaagagtaactgcaatgggatcctatattattatgaaacttatatttcaaaccaacagttaaaaagcgttttcctgggaagaaatctttttaaagcctatatatatagtttataaggaaaacatacaaagaatttttatctgcattatactaaatgtttgattgacacacacttattgaaacctgggtacaccggcagcaccagcctggtcaataaaacatgtgctcaacaacctaaaaattcacaaagtatataatgaatccaactctaaccaattattttcatgagatgtgtaatgtactgcttattttactacagttttttccttatctacaagaaatcatattttattacatgctatatgggttcaaggtttgaaaggacctctgctttttcgatacgcgctaatgtttattctgttcatttgtacaaaaagtacaacattttcaatcaatataaatatcatttgggataaatcccatattcacacagacacgttgattttaaaacgcacggtgcttttatcacagtataagaatgagaaatgaaaacatgaataaatgcatggtttatggattcaaattaaatttaattttattaaaattcaattactagtttgccaaattgattaccacgactacataaaaataaaatgttagtattttttttgttttccacgaaataaagtacgaacctcatagttaggatggcttgttcaaatgtgtttttatttaaacctttccaaacatgtgaaacaataggcctaatcttgtgtttttcgacaaattcaaccatctttctaaattctactcttgatcccatggtaactcctctgtaatcgatatttttgatgaagtaagatatcgggatattcagtccggtcgttacagtagctgtttgaccataacctacaacgatgccacctggtcgcatcagtttaggatattcagcataaagaggaccaccggcaccatcgatgactgcagacagcacgttattgcccaagagttcctttagttcctccatgcagttttctaatcatataatgtcaatattgaactacaagaatcctgaatttctaccatctttataattcactccgcctatagcacccagctcaatactcttttgaatcttttctggagaagaagatgtgacgtaaacatgggcacctgcagctacagcaaactgaagagcaaaaagtgcaacccctcctccaataccagtgattaggatatgttggcctttttgaactaagccctttgtaaacaaggatctataaagtacgttacgatcaaaattaagcttttttttacaaaagactttttggtacctgtaggcagtcaatccagccaatggcaaagcagcggcttctgtcattgaaagaaattcaggacaaggcacaatgtcctccttttcgacaatgacttcttcttttgtaaatgtgccaatcactggcaagagacccaatatgtgaaagtcacgttcaggacctctttcatccgaatcccatccatatccgggattaatcaagacacgttgtcctctttggccattcttcgtaatgtaaccaacgccatcagagcccaacacagaatctaatacagtaccatcatattgatccataaggatccaaacatccctttttaaaaaaaattaaaaaaagtcaagaaggagcctggttttgtttttaccgatggttgaaagcagcagcttgtatttggacagctacttgatgatccgcaaggttctcggaggatttgtgttccttgaattcaacgccgtacttgaattttgaatcaaaaggttgagtttcagtgagaatagcagagaccattttgtttcaaaaggcagtaatgatgtggtaaaggtagtgaaatggttgtatttatagtcattaaaaaaagcggaggggttagattaataagcagtaaacagctgctgtcacaaataccatttttcaaatgaattaataagcgcgctgaactctattagttttaaagcatcgttgatgaatcatatattcagatataatttattagcatcgtttattcaatcaacacgcaagattaaatgaatttgttcgtatccaaaaccaacttgctaatcttttaggacgtattttttattataaatttttcattttgttaactgtagtacaaaagctgagaattgtaaacgttctgatagattttattaataagccttctattatctgcaaaaccaaccaagatttgatgaaaaaaagaaaagaaaagcatattattcgttttcataaagaaaaattgtgtagtctttaattatagtttattgagatcaagctatacagtagcagaactaaggacacgcttaacaaaagctgtcatcgatatccactttttttttaaacctcaacttgttacttgaatatcatgtacttgcgtgaaataaaagggtatttttcataaacatttgaatgtatttatattgctttgtgctttgaaataacagcttgctgttgtaacatttagttattttatgctttttttatatagaaagttctttgataagtagcatgttttagataatgttatattagtttattacaatttgcattaagtaaagtaattgaaatttatagatgaatttaggaaaagagaggaaaaagaagaatgaaggttgaatgaaatataaacattttcgtctaatcctctaagcatccgagtagtctcgcatgtttttggtggaggcctttttggcaattcgtccacctaaactctttagtcctaaactgtgtcctgggttaccgacttgaaggtttttgagaccatcctcaaatggaaggccagtgacagtggcatcctcggttcctgcctttttagcatatcgcttaatgttggtttttgataaattaatacggaatgcagtgtctagtaaattgttgggttcaaggtattcatgtggaatatgtaaaaggaaggcaagaagttctgaattggttggacatgagtgtaagagatgatctaaatattatttaaaagaaatgtacattggtaaatattccatatccttttctcacctttgcataaatctagaatggctaggcttactcgataaaacactttaatgcctaagaagaaggaatgtatgtaagctgaggatctgaatatgtgtccttttcgtgttttttttagtttaccctcaaaataaaacgcgtcccaaacacgtagcactgattcccaaggaagtgtcatggtaaatgcagttaggaaccattgggctatatacatgattggaagtacatcattgttttctaaatgctgagccaactttgggttatgatcctttaataattgcccaatgatgtatgcatcaattcttaactgggaaagtgtaggtgtgaagtatccattcatataccgatcaatagtagccaccaataaccaaaacgagtcctttttttaatacaaaaatagttaatccatcaactctagatttctatttcttttcttttttttctattacttcgacagtcatctgcataagcattagtcctgctaaacggcccatgccttggcaatattctaaatcagaattgtattgggcatatgcttttaatatatttcgcaaattctgttgtcccaagccatccttttccataaattgtgtgtgatcaggataacatcgttcaatatctctttcaatcacgtcgtaaatagggatcctaggcttggacaacaggttttgaaattgatttgatctcttgtagtcatcactaccagccaagaattgccacactttggctctcacagatgctggtattcctccacgaaccaattttttcatctttacatcctttttaaccgttccagcatcgagtttgttgattatatttaaccattttaattcattttctctgtattctttcatagctttggtagacatatttgctctgcatgtaaataaactattagcttcctgggaagataaaatggggtttcagggggtgaggaacaatgaagaagacatgtacctgaatgaaggacgaccgcgtttgataatgaatccatattcatcaacattttcattttgaataaaagttgaattgttattattctttgttggtgtagtctggcttttcctttgtacaccggtgttttgtatattagtagctactgggcgtgcaggagatcttggtggtggtatagggccgtacagttctgtgttctcttcatccgagtaatcaatgttgagtgcagatgtatcaaatggatcatgattattgttgttattatctaatcatatattacacgtataagattaattttatgattattgataagctgcttttttttttctgtacctagattttctccagaataattgtaggaatcgtatgatattcgagactcttttatattatgacttgaagaagtcgaaactgagcctatactttcaaaactcggcttactgacccagtgtctcgatgagggtacgggtgaagcatatcgatcagaattggaagaaaatgaatgaatagagcctcttaattggttgaattgttcttgtctatttttcatcatttctatatcaaattctgttccatggctacttgtagagtttctatattgcgaatggtcggtaaaatcaagatcagcgtcaagcgattctaatacacgaggatctaattctacaaaatgcacggtttctgcattaaaatttccaataacgccttcacagtatccctaaaagatctcttatattggtaaatctttatataaaatacagcattgtgctgtgtttatttaccatgtaaatatcattctctatatgttttaatatagtaatcctttctcctgtaaacaaatttagccttattttatatctaaaatgcctgtgtacacaaaccttgcaaatacatcagttcttcaggagtgttggccaaaatatccacttttgatacacaagcgcctaaaccacctatatattttttaacttggtcgatgtcacaatcctgtattgttgtaggaaacatacctttctcagcaaaggctttcaactcggctaaactcatcgaatcgacatctattgaagcattatccaaagcttctgctggatctttcaatagtcgtgcaatcttttcattaagctcttcgagattagcagaggtatgtcgtgtaatttttggttccatatatcaagtcaaaaaagagaaaaataaaataaggaagttccctccttttatatgaaagaaggaagaaaaaaaaggtgaagaggatggtttactcccaaataaggaagacatgtgcgattaaacaccgctatgagttacgtggagaagaacctttttttattgtttatttaaaaagtaacaaaatggcccccattttaaatgtctaaatcatcatctggatcttcgtcatcaaagtcatcagcagcgtcaggatcgtaa

SEQ ID NO: 226 - DNA, 12520 bp, unidentified
  source 1..12520: mol_type = other DNA
accacaaaattgatactattatagactcatttgaaatatatgtagaagacaactcagacgacgacttccaacccgttgtaacagctagaaaaagaaaaagtaagttgcattgtcaagcttgatgtaggtaaacagctagtttaacgtatgaaactccatcataggtagggaaaatactccacagagtggattacaaaagaggctcaaaggcaaaggaaaagctacagattctgaagttactactacgagtagtactggtatctctacaacagatgaaactatcatgttcaataagatcactcttgatgactatgatcttgaatatagcagtgacgattttgatgcacctgtcgtcaaaagaccctttttgggtgaatcaaccaaatctgcttttcgtatcaccaaatcaacttctgctattgtggagtcaagcacaactgcttctaaaacaagtctaactttccccaagcctagtaaacctgttccaactgctttcaattcagctgcaacttctgtcaagccaagtttttgtcctgtgcctattgacaaggcaagtgacattaaagaaggccctaaaaagataagcaagcgtgtgatgacaattaaagcgactgtaaataatatttggaaaccagcatatttacaggcattacatgatttggttcacactaccaacttactagttacacatacctttgccttcacaaagtacatatatttacaagaactggcatcaaatggaaattttgcactgaacaactttgtgacaaaagatttctttgttgaagtttttctgagtcttgttctctccaagggtggaaatagcacaagactgaaggatacgaccaaaaactataggcgattgatatcaaaatataaagaagcttactttgaagacgctggttatactccccccaacttaccatatgctcagcaaatagccttgtacgagtgtatgaagatccaaacggcctactataataacatcaaagctcattttggaaacaggctgcgtggtttgataaacaagttatttaaaaagaaggaaaaggcagagagtctcagaggagaaatgcaagcaaacaagtctagtagtaaagcgataaaagaagctacccgaaagaagatttatggaccttgcaatcaggtgaagcttgccatcgcaaaaaaagagatgcctgaagttggtcttttagatgaccaatcaagaacgcaattaaatgattttctctcaagctactcagaggactacacctttcaaaagaactcaatttactatgacgttatggctagtccaaaaaaccatttcaaagccttcttcagacttgctgaactgtctgaagctgaacagacgaaacagtttgcttgtttcccgctacgtaccacctttatttcttgccacatgacgttggatagcaaaataatccattaccatgttctcaagagcaaaaagaatccaaaaacaggaagcaagtttgagacatagggtgctatcatagacctaaataaaagatgttcgcgcaccaaggatttcaaaagcctttgaggttccaaggaattctcgaaacagatggagtcggtgtctccataataaagcaaaacactgatacaagcagaaagtcgcctaagcccaacgctgaaaagaaagtggacggtaatcaaacagagcatattgaaggactagatcaagccgacttaaagagcgctgaaggcaagtgcgtcttgatagacactggaagacgggacttgatgtactgcatgaaagaaaccagcactgttgaagaaaaacaaacacttatatttaccaagaacaaccgctcaaaatgctcaaggcacttcagatatttaagaaggcgtgctcaaccttttgtggtccagaaagccgaagcaatcttttctagatctaaatccaactctgtagacttgaaaaagtttgtacagtacattaaaacaagagcatcagtaaaaaccattttgtacgaatacagtgctcacggcttcaaattgcgtccaaaaaaaaattcattgcgcatctttaattttcaaacagcgcatctttatttggtcaaattgcgcacttgtgatttctcaaactgcgctaataaaaaagtcaaactgcatattttacaactcaaattgcattatttttattcgtacctaagctattatctctttaaaagcaaatatcagatcgataacatgtactcaataaaaggaaaaattatttttgaagatggtcaaggaaatgtttttgatgagagcgggaatgaagcaatggactgggatgaggaagttgatactcataatttggagaacctaaccaacctaacacgctatttgaataagcaagtacagccggaaatggacttagacagtctggattttgttgaaaaaatgaaaacaatagagaagaaccttgaagagaaaaaaacgaaaagcaataataaaaaaaatctatattctgatgaccaaaaaaacgttatttatatatcttcacaagataaaattgttaaacgcagctgaatcggctcggagagcgggagtgaaagtacgtacagggcaagcgtggtctgcaagaatgaaggaagatcctaactggaatatatacgaaaagcaaacgaatcagaacaaaattggtacaggtcagctacaggagaagcataaagcttttcttcttgattattttgatgagtatccttcagctcgagttaaagatgcaattgatggccttacggaaaacttcgaaaacttctccttgaaagaaactgttgtgggaaagtacattagagaggattgtaatttaacaataaaaaaaagttacccgccatccacatgcaagaaacactgacaatactcgtaaagaaagacacgactgggtgaaaacttggtcgaaaacagatatggatttcaatagtaattgtgtctttattgacgaaagcgctttcgacattaatatgaggccaccaacagctagatctgctcgaggtacaccagtcataattactacgccaacaacaagggctataagccatacgattcttggtgcaatatgtcctatgggagtcgtcaacatggagatcagagttcctttaaaatcaaaaagaataaaagttgcaggaagccgcaaaagaaaaagtccagcagcgaaaaaaccagcaacaggtggcaccaattcaggtcattacgatagatttatgaacttaacgttggatgagatggacaagtatccggaaatgaaaggattttatttggttatggacaactcgcctattcatgacaaaaagagtggagagattgacaagatgattgaagattgaggctataagtgtgtttatctcccgaagtactcaccagaacttaaccctattgaacagttttgggcaagcgtcaaacacaaagtaagaagaagccaatttggtaatacagaggacctcaagacaagaataagcgaggcttgcgatgctgttcctgcacagcatatgaaaaactttattcaacactctgttaacgtgtttgagaaatgcttaaatgatataccgatttaaaagataaatcttttatataattcataatatgtagtatatgaaataaactgatgcatttttcttcctgacaacccactaacaatatgatgtaaaattaataaacctttttcaatttctctatatgggcctagatattcaattgatccgtatataacatttaaaaaataaaatactggtatataacctaattgttccaacaatacatctttaataaatcttataaattttacatcttttaattctgatctatgatccagttcgtatttagaaataggcattcatttgctatcagtttatttacttctttatttaaaatatctttgtataaactttcctcttcactttctgtcattatatattgatattcaattttttaaaaaacatcagcttttttatgacaatatatgattcgctacgctacgctacgatacgatacgctacgatacgcgaataaataaaagagttttattggtcaatttaagtataaatcgggatttttttcaacaaagggtatttatggatactgcaaccttttttaacgcttgtatgaatgtttctgttagaaatgagcggtaagttagatttacattgaaattgtgaatattttctctataacatgcaagaagaaattttagacgaaaatgacaaagagttttataattttgttgtcccaactgaatatcatcctggaattgatttaatcagcaaggtcattttaactgatgtacgagtccttaacgtcataactacagctattgctaaagcatcaaaacgttcatatgttattgaacctctagagatcccacataaacagtttggtgctgtcctatacattccccatggtcttcaaaatagtttacctttgatagtcatcaatactattacgacctttgaagaaacgaagtttaatcaaattatttaacaaagcaccaatatttttgaacggtataacacccttcctatttgtgtgatcatcgttgctcagcaacttgatgaaaaaattattgaacaaagctcccagcaccaagagctcccattccttcgagaaataccatgtgcattttgggcaaagcagtgtatattagtgtcatcaaaggatagtaggctcaacaagggtaaattaaaacaccatccattattggatattataattgctatcacaagcaatgaaaaagtcatgttatgtaatgatgaactataataaaattgtttatttaaattttctattatagacttcgtagactctcactagtattgaattgcttaattgactcaatattttcaagatgtcctgttttgaagcattctttccaattgattctcgttgtttttttgaaacgttggacgaaatcatataattctgcattatccacttcattctcaagttctacagtgcttagttgtcttcttttgttgagataaaccaaaggaggagtctcttcaattggcgttgtttcgattgcttcacagtattttcttttctgtcgtttcaagaattccaaagtagcttccacatagcttaatgactttttttttgacgcttcatctcctttttctaggcattttttttatctcgcgcagttggatttcactaatactacaaattttgtttatagcctccaatctttcagcttcttctccaactaactggtcaagattatcatgcgcaattgagtatagtaattttactaaagaatcattccttccatagtctaaagtactaatcaacaaagactgagagcaaaggaaatagccaaccgcttgcaaaggatgtaatattttttcttgttgtttcatctgtaaagtcgaagatgtcagtagcaaacaatgtttagcccatccagtgcttagtatctgtctcgcaaaggggaggtcactatctataggcttgctcagaaaaggtgctgtactacttccaattccaaatatcacaatgataggaagcctgttgtagcgttcgtatgtgagtgtgcagtattgaatggcacgtgccaagaatttgtcgtcggcttgattttgtacttcaactagtacagatggaaatgaactcaagggatcgcggggagcatagagaacatcactttttttttgttataaattctgtaggcgccgaaacatagttatcttctgccgcttctggcacgagagcttttaatagcatgtttatcacttgtttgtcggttaataccagtttgctgatcaaatcagttcctggcctgtgattataagggaggatgcgatcagtgtcatctaaacgattttatgtaagaaattatttgtatttttatagcatgtttacttacctttgtcaatactgaaatagtcagatgttatttttgaaaagtaaaagtgaagaaagaaaaagcgtaacgtatccgtattgtatccataataaaaaaaatctacccctcgtctggtttccaagttaagccgagatattcataatcgtatcatcaagctaaatcagcttatctggcctcatatattgaatcaaaataaaccattgggtgaagtagatgattcagcattcatcgatgccttctgttcgcagccccagtggattaattacaaacctaaaccatttcggttgtctctcatacagcgatctctaccatcatcggcaatgtcaccaacaccaacttccaaatggtcacttttttggaaactgcctatttcgcctgaaagccgatctttatggtatcgtctattccaccgtaaactctatagtcaatcacttctttcaagatttgataatggtttgacctcttcacactgtaaattttgctctgctaatactgaagacttacaacacctcttcgtgcgctgtcctacgaaatggagagtatggatagatgctttcaatttctttagtccacatctcactttcactcaagacaatgtatgctcaatcctttggtcttttcagcagtttacttttgttgacaacagtgatatctagactctcagctgctgtgtgctttccgttatccggcgtgcccattgaagatttactattgacgactttccttttattgataaacagctggtcactcatgctttgtcgcaatttgccaccctcaaaaggggcagactcgatcttgactagcatgttcaatcgcctacactctgttccgtttggttcataccgctctcagacgtgtggctcctattataatttataaaaataaactatttatttacaaaaaaaaaaaaaaaatatctctccatttgcttacttttgctcgctttttaaattagccaatcataaatttttattcctttcccctcacttgtctatcgggctgaattggttgtaattttgacaacatacctgtcgtattactgttttctgaatagatgtacatacaggaactagcgtcacttgacagctgtccttagatgtaaagtcaaaaataaaatgcagcattttataagtattgattttttatgtcaatagaacctgcttttcatcatcaagtattgttttcttttattagagcaattccatgtttccaatcgcgtcttttgtgtttactttagggtgaaagagtaactgcaatgggatcctatattattatgaaacttatatttcaaaccaacagttaaaaagcgttttcctgggaagaaatctttttaaagcctatatatatagtttataaggaaaacatacaaagaatttttatctgcattatactaaatgtttgattgacacacacttattgaaacctgggtacaccggcagcaccagcctggtcaataaaacatgtgctcaacaacctaaaaattcacaaagtatataatgaatccaactctaaccaattattttcatgagatgtgtaatgtactgcttattttactacagttttttccttatctacaagaaatcatattttattacatgctatatgggttcaaggtttgaaaggacctctgctttttcgatacgcgctaatgtttattctgttcatttgtacaaaaagtacaacattttcaatcaatataaatatcatttgggataaatcccatattcacacagacacgttgattttaaaacgcacggtgcttttatcacagtataagaatgagaaatgaaaacatgaataaatgcatggtttatggattcaaattaaatttaattttattaaaattcaattactagtttgccaaattgattaccacgactacataaaaataaaatgttagtattttttttgttttccacgaaataaagtacgaacctcatagttaggatggcttgttcaaatgtgtttttatttaaacctttccaaacatgtgaaacaataggcctaatcttgtgtttttcgacaaattcaaccatctttctaaattctactcttgatcccatggtaactcctctgtaatcgatatttttgatgaagtaagatatcgggatattcagtccggtcgttacagtagctgtttgaccataacctacaacgatgccacctggtcgcatcagtttaggatattcagcataaagaggaccaccggcaccatcgatgactgcagacagcacgttattgcccaagagttcctttagttcctccatgcagttttctaatcatataatgtcaatattgaactacaagaatcctgaatttctaccatctttataattcactccgcctatagcacccagctcaatactcttttgaatcttttctggagaagaagatgtgacgtaaacatgggcacctgcagctacagcaaactgaagagcaaaaagtgcaacccctcctccaataccagtgattaggatatgttggcctttttgaactaagccctttgtaaacaaggatctataaagtacgttacgatcaaaattaagcttttttttacaaaagactttttggtacctgtaggcagtcaatccagccaatggcaaagcagcggcttctgtcattgaaagaaattcaggacaaggcacaatgtcctccttttcgacaatgacttcttcttttgtaaatgtgccaatcactggcaagagacccaatatgtgaaagtcacgttcaggacctctttcatccgaatcccatccatatccgggattaatcaagacacgttgtcctctttggccattcttcgtaatgtaaccaacgccatcagagcccaacacagaatctaatacagtaccatcatattgatccataaggatccaaacatccctttttaaaaaaaattaaaaaaagtcaagaaggagcctggttttgtttttaccgatggttgaaagcagcagcttgtatttggacagctacttgatgatccgcaaggttctcggaggatttgtgttccttgaattcaacgccgtacttgaattttgaatcaaaaggttgagtttcagtgagaatagcagagaccattttgtttcaaaaggcagtaatgatgtggtaaaggtagtgaaatggttgtatttatagtcattaaaaaaagcggaggggttagattaataagcagtaaacagctgctgtcacaaataccatttttcaaatgaattaataagcgcgctgaactctattagttttaaagcatcgttgatgaatcatatattcagatataatttattagcatcgtttattcaatcaacacgcaagattaaatgaatttgttcgtatccaaaaccaacttgctaatcttttaggacgtattttttattataaatttttcattttgttaactgtagtacaaaagctgagaattgtaaacgttctgatagattttattaataagccttctattatctgcaaaaccaaccaagatttgatgaaaaaaagaaaagaaaagcatattattcgttttcataaagaaaaattgtgtagtctttaattatagtttattgagatcaagctatacagtagcagaactaaggacacgcttaacaaaagctgtcatcgatatccactttttttttaaacctcaacttgttacttgaatatcatgtacttgcgtgaaataaaagggtatttttcataaacatttgaatgtatttatattgctttgtgctttgaaataacagcttgctgttgtaacatttagttattttatgctttttttatatagaaagttctttgataagtagcatgttttagataatgttatattagtttattacaatttgcattaagtaaagtaattgaaatttatagatgaatttaggaaaagagaggaaaaagaagaatgaaggttgaatgaaatataaacattttcgtctaatcctctaagcatccgagtagtctcgcatgtttttggtggaggcctttttggcaattcgtccacctaaactctttagtcctaaactgtgtcctgggttaccgacttgaaggtttttgagaccatcctcaaatggaaggccagtgacagtggcatcctcggttcctgcctttttagcatatcgcttaatgttggtttttgataaattaatacggaatgcagtgtctagtaaattgttgggttcaaggtattcatgtggaatatgtaaaaggaaggcaagaagttctgaattggttggacatgagtgtaagagatgatctaaatattatttaaaagaaatgtacattggtaaatattccatatccttttctcacctttgcataaatctagaatggctaggcttactcgataaaacactttaatgcctaagaagaaggaatgtatgtaagctgaggatctgaatatgtgtccttttcgtgttttttttagtttaccctcaaaataaaacgcgtcccaaacacgtagcactgattcccaaggaagtgtcatggtaaatgcagttaggaaccattgggctatatacatgattggaagtacatcattgttttctaaatgctgagccaactttgggttatgatcctttaataattgcccaatgatgtatgcatcaattcttaactgggaaagtgtaggtgtgaagtatccattcatataccgatcaatagtagccaccaataaccaaaacgagtcctttttttaatacaaaaatagttaatccatcaactctagatttctatttcttttcttttttttctattacttcgacagtcatctgcataagcattagtcctgctaaacggcccatgccttggcaatattctaaatcagaattgtattgggcatatgcttttaatatatttcgcaaattctgttgtcccaagccatccttttccataaattgtgtgtgatcaggataacatcgttcaatatctctttcaatcacgtcgtaaatagggatcctaggcttggacaacaggttttgaaattgatttgatctcttgtagtcatcactaccagccaagaattgccacactttggctctcacagatgctggtattcctccacgaaccaattttttcatctttacatcctttttaaccgttccagcatcgagtttgttgattatatttaaccattttaattcattttctctgtattctttcatagctttggtagacatatttgctctgcatgtaaataaactattagcttcctgggaagataaaatggggtttcagggggtgaggaacaatgaagaagacatgtacctgaatgaaggacgaccgcgtttgataatgaatccatattcatcaacattttcattttgaataaaagttgaattgttattattctttgttggtgtagtctggcttttcctttgtacaccggtgttttgtatattagtagctactgggcgtgcaggagatcttggtggtggtatagggccgtacagttctgtgttctcttcatccgagtaatcaatgttgagtgcagatgtatcaaatggatcatgattattgttgttattatctaatcatatattacacgtataagattaattttatgattattgataagctgcttttttttttctgtacctagattttctccagaataattgtaggaatcgtatgatattcgagactcttttatattatgacttgaagaagtcgaaactgagcctatactttcaaaactcggcttactgacccagtgtctcgatgagggtacgggtgaagcatatcgatcagaattggaagaaaatgaatgaatagagcctcttaattggttgaattgttcttgtctatttttcatcatttctatatcaaattctgttccatggctacttgtagagtttctatattgcgaatggtcggtaaaatcaagatcagcgtcaagcgattctaatacacgaggatctaattctacaaaatgcacggtttctgcattaaaatttccaataacgccttcacagtatccctaaaagatctcttatattggtaaatctttatataaaatacagcattgtgctgtgtttatttaccatgtaaatatcattctctatatgttttaatatagtaatcctttctcctgtaaacaaatttagccttattttatatctaaaatgcctgtgtacacaaaccttgcaaatacatcagttcttcaggagtgttggccaaaatatccacttttgatacacaagcgcctaaaccacctatatattttttaacttggtcgatgtcacaatcctgtattgttgtaggaaacatacctttctcagcaaaggctttcaactcggctaaactcatcgaatcgacatctattgaagcattatccaaagcttctgctggatctttcaatagtcgtgcaatcttttcattaagctcttcgagattagcagaggtatgtcgtgtaatttttggttccatatatcaagtcaaaaaagagaaaaataaaataaggaagttccctccttttatatgaaagaaggaagaaaaaaaaggtgaagaggatggtttactcccaaataaggaagacatgtgcgattaaacaccgctatgagttacgtggagaagaacctttttttattgtttatttaaaaagtaacaaaatggcccccattttaaatgtctaaatcatcatctggatcttcgtcatcaaagtcatcagcagcgtcaggatcgtaa

SEQ ID NO: 227 - DNA, 2354 bp, unidentified
  misc_feature 1..2354: note = Fanzor polypeptide
  source 1..2354: mol_type = other DNA
tgttctcaagagcaaaaagaatccaaaaacaggaagcaagtttgagacatggggtgccgtcgtagacctaaataaaaggtgttcgcgcatcaaggatttcaaaagcctttgcggttccaaggaattctcgaaacagatggagtcggtgtctccataataacgcaaaacactgatacaagcagaaagtcgcctaaacccaatattgaaaagaaagtagacggtaaccaaacagagcatattgaaggactagatcaagccaacttaaagagcattgaaggcaagtgcgtcttgatagacactggaagacgggacttgatgtactgcatgaaagaaaccagcactgttgaagaaaaacaaacacttatatttaccaagaacaaccgctcaaaatgctcaaggcatttcagatatttaagaaggcgtgctcaaccttttgtggtccagaaagccgaagcaatcctttctagatctaaatccaactctgtagacttgaaaaagtttgtacagtacattaaaacaagagcatcagtaaaaccattttgtacgaatacagtgctcacggcttcaaattgcgtccaaaaaaaaattcattgcgcatctttaattttcaaacagcgcatctttatttggtcaaattgcgcacttgtgatttctcaaactgcgctaataaaaaagtcaaactgcatattttacaactcaaattgcattacttttatttgtacctttttcataagctattatctctttaaaagcaaatatcagatcgataacatgtactcaataaaaggaaaaattatttttgaagatggtcaaggaaatgtttttgatgagagcgggaatgaagcaatggactgggatgaggaagttgatcctcataatttggagaacctaaccaacctaacacgctatttgaataagcaagtacagccggaaatggacttagacagtctggattttgttgaaaaaatgaaaacaatagagaagaaccttgaagagaaaaaaacgaaaagcaataataaaaaaaaatctatgttctgatgaccaaaaaaacgttatttatatatcttcacaagataaaattgttaaacgcagctgaatcggctcgaagagcgggagtgaaagtacgtacagggcaagcgtggtctgcaagaatgaaggaagatcctaactggaatatatacgaaaagcaaacgaatcagaacaaaattggacgaaatcatataattctgcattatccacttcattctcaagttctacagtgcttagttgtcttcttttgttgagataaaccaaaggaggagtctcttcaattggcgttgtttcgattgcttagtattttcttttctgtcgtttcaagaattccaaagtagcttccacatagcttaatgactttttttttgacgcttcatctcctttttccaggcatttttttatctcgcgcagttggacttcactaatactacaaattttgtttatagcctccaatctttcagcttcttctccaattaactggtcaagattatcatgcgcaattgagtatagtaattttactaaagaatcattccttccatagtctaaagtactaatcaacaaagactgagagcaaaggaaatagccaaccgcttgcaaaggatgtaatattttttcttgttgtttcatctgtaaagtcgaagatgtcagtagcaaacaatgtttagcccatccagtgcttagtatctgtctcgcaaaggggaggtcactatctatagacttgctcagaaaaggtgctgtactacttccaattccaaatatcacaatgatagaaagcctgttgtagcgttcgtatgtgagtgtacagtattgaatggcacgtgccaagaatttgtcgtcggcttgattttgtacttcaactagtacagatggaaatgaactcaagggatcgcggggagcatagagaacatcacttttttttttgttataaattctgtaggcgccgaaacatagttatcttctgccgcttctggcacgagagcttttaatagcatgtttatcacttgtttgtcggttaataccagtttgctgatcaaatcagttcctggcctgtgattataagggaggatgcgatcagtgtcatctaaacgattttatgtaagaaattatttgtatttttatagcatgtttacttacctttgtcaatactgaaatagtcagatattatttttgaaaagtaaaagtgaagaaagaaaaagcgtaacgtatccgtattgtatccataataaaaaaaatctacccctcgtctggtttccaagttaagccgagatattcataatcgtatcatcaagctaaatcagcttatctggcctcatatattgaat

SEQ ID NO: 228 - DNA, 11434 bp, unidentified
  misc_feature 1..11434: note = Fanzor polypeptide
  source 1..11434: mol_type = other DNA
aaagaaggaaaaggcagagagtctcagaggagaaatgcaagcaaacaagtctagtagtaaagcgataaaagaagctacccgaaagaagatttatggaccttgcaatcaggtgaagcttgccatcgcaaaaaaagagatgcctgaagttggtcttttagatgaccaatcaagaacgcaattaaatgattttctctcaagctactcagaggactacacctttcaaaagaactcaatttactatgacgttatggctagtccaaaaaaccatttcaaagccttcttcagacttgctgaacagtctgaagctgaacagacgaaacagtttgcttgtttcccgctacgtaccacctttatttcttgctacatgacgttggatagcaaaataatccattaccatgttctcaagagcaaaaagaatccaaaaacaggaagcaagtttgagacatggggtgccgtcgtagacctaaataaaaggtgttcgcgcatcaaggatttcaaaagcctttgcggttccaaggaattctcgaaacagatggagtcggtgtctccataataacgcaaaacactgatacaagcagaaagtcgcctaaacccaatattgaaaagaaagtagacggtaaccaaacagagcatattgaaggactagatcaagccaacttaaagagcattgaaggcaagtgcgtcttgatagacactggaagacgggacttgatgtactgcatgaaagaaaccagcactgttgaagaaaaacaaacacttatatttaccaagaacaaccgctcaaaatgctcaaggcatttcagatatttaagaaggcgtgctcaaccttttgtggtccagaaagccgaagcaatcctttctagatctaaatccaactctgtagacttgaaaaagtttgtacagtacattaaaacaagagcatcagtaaaaccattttgtacgaatacagtgctcacggcttcaaattgcgtccaaaaaaaaattcattgcgcatctttaattttcaaacagcgcatctttatttggtcaaattgcgcacttgtgatttctcaaactgcgctaataaaaaagtcaaactgcatattttacaactcaaattgcattacttttatttgtacctttttcataagctattatctctttaaaagcaaatatcagatcgataacatgtactcaataaaaggaaaaattatttttgaagatggtcaaggaaatgtttttgatgagagcgggaatgaagcaatggactgggatgaggaagttgatcctcataatttggagaacctaaccaacctaacacgctatttgaataagcaagtacagccggaaatggacttagacagtctggattttgttgaaaaaatgaaaacaatagagaagaaccttgaagagaaaaaaacgaaaagcaataataaaaaaaaatctatgttctgatgaccaaaaaaacgttatttatatatcttcacaagataaaattgttaaacgcagctgaatcggctcgaagagcgggagtgaaagtacgtacagggcaagcgtggtctgcaagaatgaaggaagatcctaactggaatatatacgaaaagcaaacgaatcagaacaaaattggacgaaatcatataattctgcattatccacttcattctcaagttctacagtgcttagttgtcttcttttgttgagataaaccaaaggaggagtctcttcaattggcgttgtttcgattgcttagtattttcttttctgtcgtttcaagaattccaaagtagcttccacatagcttaatgactttttttttgacgcttcatctcctttttccaggcatttttttatctcgcgcagttggacttcactaatactacaaattttgtttatagcctccaatctttcagcttcttctccaattaactggtcaagattatcatgcgcaattgagtatagtaattttactaaagaatcattccttccatagtctaaagtactaatcaacaaagactgagagcaaaggaaatagccaaccgcttgcaaaggatgtaatattttttcttgttgtttcatctgtaaagtcgaagatgtcagtagcaaacaatgtttagcccatccagtgcttagtatctgtctcgcaaaggggaggtcactatctatagacttgctcagaaaaggtgctgtactacttccaattccaaatatcacaatgatagaaagcctgttgtagcgttcgtatgtgagtgtacagtattgaatggcacgtgccaagaatttgtcgtcggcttgattttgtacttcaactagtacagatggaaatgaactcaagggatcgcggggagcatagagaacatcacttttttttttgttataaattctgtaggcgccgaaacatagttatcttctgccgcttctggcacgagagcttttaatagcatgtttatcacttgtttgtcggttaataccagtttgctgatcaaatcagttcctggcctgtgattataagggaggatgcgatcagtgtcatctaaacgattttatgtaagaaattatttgtatttttatagcatgtttacttacctttgtcaatactgaaatagtcagatattatttttgaaaagtaaaagtgaagaaagaaaaagcgtaacgtatccgtattgtatccataataaaaaaaatctacccctcgtctggtttccaagttaagccgagatattcataatcgtatcatcaagctaaatcagcttatctggcctcatatattgaatcaaaataaaccattgggtgaagtagatgattcagcattcatcgatgccttctgttcgcagccccagtggattaattacaaacctaaaccatttcggttgtctctcatacagcgatctctaccatcatcggcaatgtcaccaacaccaacttccaaatggtcacttttttggaaactgcctatttcgcctgaaagccgatctttatggtatcgtctattccaccgtaaactctatagtcaatcacttctttcaagatttgataatggtttgacctcttcacactgtaaattttgctctgctaatactgaagacttacaacacctcttcgtgcgctgtcctacgaaatggagagtatggatagatgctttcaatttctttagtccacatctcactttcactcaagacaatgtatgctcaatcctttggtcttttcagcagtttacttttgttgacaacagtgatatctagactctcagctgctgtgtgctttccgttatccggcgtgcccattgaagatttactattgacgactttccttttattgataaacagctgatcactcatgctttgtcgcaatttgccaccctcaaaaggggcagactcgatcttgactagcatgttcaatcgcctacactctgttccgtttggttcataccgctctcagacgtgtggctcctattataatttataaaaataaactatttatttacaaaaaaaaaaaaaaatatctctccatttgcttacttttgctcgctttttaaattagccaatcataaatttttattcctttcccctcacttgtctatcgggctgaattggttgtaattttgacaacatacctgtcgtattactgttttctgaatagatgtacatacaggaactagcgtcacttgacagctgtccttagatgtaaagtcaaaaacaaaatgcagcattttataagtattgatttttttatgtcaatagaacctgcttttcatcatcaagtattgttttcttttattagagcaattccatgtttccaatcgcgtcttttgtgtttactttagggtgaaagagtaactgcaatgtgatcctatattattatgaaacttatatttcaaaccaacagttaaaaagcgttttcctgggaagaaatctttttaaagcctatgtatatatagtttataaggaaaacatacaaagaatttttatctgcattatactaaatgtttgattgacacacacttattgaaacctgggtacaccggcagcaccagcctggtcaataaaacatgtgctcaacaacctaaaaattcacaaagtatataatgaatccaactctaaccaattattttcatgagatgtgtaatgtactgcttattttactacagttttttccttatctacaagaaatcatattttattacatgctatatgggttcaaggtttgaaaggacctctgctttttcgatacgcgctaatgtttattctgttcatttgtgtaaaaagtacaacattttcaatcaatataaatatcatttgggataaatcccatattcacacagacacgttgattttaaaacgcacggtgcttttatcacagtataagaatgagaaatgaaaacatgaataaatgcatggtttatggattcaaattaaatttaattttattaaaattcaattactagtttgccaaattgattaccacgactacataaaaataaaatgttagtatttctttttgttttccacgaaataaagtacgaacctcatagttaggatggcttgttcaaatgtgtttttatttaaacctttccaaacatgtgaaacaataggcctaatcttgtgtttttcgacaaattcaaccatttttctaaattctactcttgatcccatggtaactcctctgtaatcgatatttttgatgaagtaagatatcggaatattcagtccggtcgttacagtagctgtttgaccataacctacaacgatgccacctggtcgcatcagtttaggatattcagcataaagaggaccaccggcaccatcgatgactgcagacagcacgttattgcccaagagtttctttagttcctccatgcagttttctaatcatataatgtcaatattgaactacaagaatcctcaatttctaccatctttataattcactccgcctatagcacccagctcaatactcttttgaatcttttctggagaagaagatgtgacgtaaacatgggcacctgcagctacagcaaactgaagagcaaaaagtgcaacccctcctccaataccagtgattaggatatgttggcctttttgaactaagccctttgtaaacaaggatctataaagcatgttacgatcaaaattaagctttttttgtacaaaaggctttttggtacctgtaggcagtcaatccagccaatggcaaagcagcggcttctgtcattgaaagaaattcaggacaaggcacaatgtcctccttttcgacaatgacttcttcttttgtaaatgtgccaatcactggcaagagacccaatatgtgaaagtcacgttcaggacctctttcatccgaatcccatccatatccgggattaatcaagacacgttgtcctctttggccatttttcgtaatgtaaccaacgccatcagagcccaacacagaatctaatacagtaccatcatattgatccataaggatccaaacatccctttttaaaaaaaattaaaaaaagtcaagaaggagcctggttttgtttttaccgatggttgaaagcagcagcttgtatttggacagctacttgatgatccgcaaggttctcggaggatttgtgttccttgaattcaacgccgtacttgaattttgaatcaaaaggttgagtttcagtgagaatagcagagaccattttgtttcaaaaggcagtaatgatgtggtaaaggtagtgaaatggttgtatttatagtcattaaaaaaagcggaggggttagattaataagcagtaaacagctgctgtcacaaataccatttttcaaatgaattaataagcgcgctgaattctattaattttaaagcatcgttgatgaatcatatattcagatataatttattagcatcgtttattcaatcaacacgcaagattaaatgaatttgttcgtatccaaaaccaacttgctaatcttttaggacgtatttttcattgtaaatttttcattttgttaactgtagtacaaaagctgagaattgtaaacgttctgatagattttattaataagccttctattatctgcaaaaccaaccaagatttgatgaaaaaaagaaaaggaaagcatattattcgttttcataaagaaaaattgtgtagtctttaattatagtttattgagatcaagctatacagtagcagaactaaggacacgcttaacaaaagctgtcatcgatatccactttttttttaaacctcaacttgttacttgaatatcatgtacttgcgtgaaataaaagggtatttttcataaacatttgaatgtatttatattgctttgtgctttgaaataacagcttgctgttgtaacatttagttattttatgctttttttatatagaaagttctttgataagtagcatgttttagataatgttatattagtttattacaatttgcattaagtaaagtaattgaaatttatagatgaatttaggaaaagagaggaaaaagaagaatgaaggttgaatgaaatataaacattttcgtctaatcctctaagcatccgagtagtctcgcatgtttttggtggaggcctttttggcaattcgtccacctaaactctttagtcctaaactgtgtcctgggttaccgacttgaaggtttttgagaccatcctcaaatggaaggccagtgacagtggcatcctcggttcctgcctttttagcatatcgcttaatgttggtttttgataaattaatacggaatgcagtgtctagtaaattgttgggttcaaggtattcatgtggaatatgtaaaaggaaggcaagaagttctgaattggttggacatgagtgtaagagatgatctaaatattatttaaaagaaatgtacattggtaaatattccatatccttttctcacctttgcataaatctagaatggctaggcttactcgataaaacactttaatgcctaagaagaaggaatgtatgtaagctgaggatctgaatatgtgtccttttcgtgttttttttagtttaccctcaaaataaaacgcgtcccaaacacgtagcactgattcccaaggaagtgtcatggtaaatgcagttaggaaccattgggctatatacatgattggaagtacatcattgttttctaaatgctgagccaactttgggttatgatcctttaataattgcccaatgatgtatgcatcaattcttaactgggaaagtgtaggtgtgaagtatccattcatataccgatcaatagtagccaccaataaccaaaacgagtcctttttttaatacaaaaatagttaatccatcaactctagatttctatttcttttcttttttttctattacttcgacagtcatctgcataagcattagtcctgctaaacggcccatgccttggcaatattctaaatcagaattgtattgggcatatgcttttaatatatttcgcaaattctgttgtcccaagccatccttttccataaattgtgtgtgatcaggataacatcgttcaatatctctttcaatcacgtcgtaaatagggatcctaggcttggacaacaggttttgaaattgatttgatctcttgtagtcatcactaccagccaagaattgccacactttggctctcacagatgctggtattcctccacgaaccaattttttcatctttacatcctttttaaccgttccagcatcgagtttgttgattatatttaaccattttaattcattttctctgtattctttcatagctttggtagacatatttgctctgcatgtaaataaactattagcttcctgggaagataaaatggggtttcagggggtgaggaacaatgaagaagacatgtacctgaatgaaggacgaccgcgtttgataatgaatccatattcatcaacattttcattttgaataaaagttgaattgttattattctttgttggtgtagtctggcttttcctttgtacaccggtgttttgtatattagtagctactgggcgtgcaggagatcttggtggtggtatagggccgtacagttctgtgttctcttcatccgagtaatcaatgttgagtgcagatgtatcaaatggatcatgattattgttgttattatctaatcatatattacacgtataagattaattttatgattattgataagctgcttttttttttctgtacctagattttctccagaataattgtaggaatcgtatgatattcgagactcttttatattatgacttgaagaagtcgaaactgagcctatactttcaaaactcggcttactgacccagtgtctcgatgagggtacgggtgaagcatatcgatcagaattggaagaaaatgaatgaatagagcctcttaattggttgaattgttcttgtctatttttcatcatttctatatcaaattctgttccatggctacttgtagagtttctatattgcgaatggtcggtaaaatcaagatcagcgtcaagcgattctaatacacgaggatctaattctacaaaatgcacggtttctgcattaaaatttccaataacgccttcacagtatccctaaaagatctcttatattggtaaatctttatataaaatacagcattgtgctgtgtttatttaccatgtaaatatcattctctatatgttttaatatagtaatcctttctcctgtaaacaaatttagccttattttatatctaaaatgcctgtgtacacaaaccttgcaaatacatcagttcttcaggagtgttggccaaaatatccacttttgatacacaagcgcctaaaccacctatatattttttaacttggtcgatgtcacaatcctgtattgttgtaggaaacatacctttctcagcaaaggctttcaactcggctaaactcatcgaatcgacatctattgaagcattatccaaagcttctgctggatctttcaatagtcgtgcaatcttttcattaagctcttcgagattagcagaggtatgtcgtgtaatttttggttccatatatcaagtcaaaaaagagaaaaataaaataaggaagttccctccttttatatgaaagaaggaagaaaaaaaaggtgaagaggatggtttactcccaaataaggaagacatgtgcgattaaacaccgctatgagttacgtggagaagaacctttttttattgtttatttaaaaagtaacaaaatggcccccattttaaatgtctaaatcatcatctggatcttcgtcatcaaagtcatcagcagcgtcaggatcgtaatagattaagcctccttgcttcttttgctcctcaacgctaacttctaattgttgagccttgtaataaggcaagaccaaattctcctttgcttttctttgttcatcggtcaatgacaagttgaaggataaattggctgctggatcgggttggttgtctacttgcatctcttcaggttgattttcaacttcgacaacgcctgttaattgacttgctggtaccacttgaagtattccatctctcacaaggaacccatttgtctcataagttactttaccactctttttacgccattcaatatgtacaataccaccctttgtgattgcattggaagtggtagtcaaatatgaaaacgtatcttgaggtgtgaatccagtcagagctgcttgcgtatcaaagtgtgtgcgttctttaagtgcttcaagctttattgtgacagtagctaatttgttgatagattcttgcatacttaagccatttttagttggtaacttgatatcaaagtgatgtctaatcgccaagtgtgtggtgtctattgcttttttagtacaaatgaataaaaaaaaaaaaatacgataaccaaccagttgttaatgattctaatgtttttacaagttgataagttttaaattgagataccataaataatgacgctagagagtcaacaagaatcgtgcagcatggtgtatcatttacttgcttgatcaatggaagtaaaatggagttttcaatatcagttatattgttaatcaattgtacattgggatcatcgtttgctttattcacattatcccaaccatatggatctgtgtagcagtcgatgatgtgtatgtcttttgttgattcaaattgcttcttccaaacttttggtgatgtttctgttaacagcactacaagtgatttgttgtttttaagtgcgcgtttaccaatgtccactaagatggacattcccgataagcgaatagagtcattgattaaaataaaagaagaagacttgtttaatatttgttcaaagcaaagtgtattcattttgcttaaaaaagtttgattatctatttcttgggggctgttactttttgacaaatgcgtgacttgtagtgattttttctccatcattttatcatgcaattctaaacaacggcaaggacaactctatgtaaagagggaatggtgattcaattataggtcttaaatatagcttcgttaatgttaagctgatggctagaataatctcgttgtaatagagtatatctctataagaactttagatattcagcgcgttcacagtagaggcaaaggtgtttacaccaaaagccaatacaatctaggatttgatggtcacagtatctttcaataaactgtacaagatgcaatactattccttcctttgactaccatgcatttttctgtcgtcacagtttgataaacttatttttatatttgccgagttaaattatttatcattgaaattaaataaaaatcaaatatagaatttgaaccttgtagtttcaaatgaaatactgagaataccaaatttaagtcaattcttcattgagctgttgaaatgttgtattctttgtcataaatcattagaattagctattgcccattgtcatcgattaattctagaacatcccataaattggaaggcacttggtttcttacatattggcctagtttatctctttgatatattgtttgatgaagtattcaagcttactctgaacaccttgcttctaattggttttgtctttttttactgatgcatttaataaaaatatcattaaagttatatttcattctatttgcatactaaattcattgtttcaaacatctagctctttcttcctatatttctactattcagggacattcattcaagttactgaagaaaatgtatgcataaaacctgctatgaagaagtttaaaaaaccagacggattgacactcatggacgacaatatgatcattgtggttgctgcggtagtaatgtcacattgaatcagttcgtcaggatcgagataaccatgtggcttaaaaaggaacgctagagtatgcaaaagagttttcttgtggtagggcttgattataaattgtatatgctccagccttcggctggttgtcagaaactacacatttagatggcttctatctgtaacacatttgctttcagtagtagtatattggtggtgataatct

SEQ ID NO: 229 - DNA, 3699 bp, unidentified
  misc_feature 1..3699: note = Fanzor polypeptide
  source 1..3699: mol_type = other DNA
gatttctttgttgaagtttttctgagtcttgttctctcaaagggtggaaatagcacaagactgaaggatacgaccaaaaactataggcgattgatatcaaaatataaagaagcttactttgaagacgctggttatactccccccaacttaccatatgctcagcaaatagccttgtacgagtgtatgaagatccaaacggcctactataataacatcaaagctcattttggaaacaggctgcgtggtttgataaacaagttatttaaaaagaaggaaaaggcagagagtctcagaggagaaatgcaagcaaacaagtctagtagtaaagcgataaaagaagctacccgaaagaagatttatggaccttgcaatcaggtgaagcttgccatcgcaaaaaaagagatgcctgaagttggtcttttagatgaccaatcaagaacgcaattaaatgattttctctcaagctactcagaggactacacctttcaaaagaactcaatttactatgacgttatggctagtccaaaaaaccatttcaaagccttcttcagacttgctgaacagtctgaagctgaacagacgaaacagtttgcttgtttcccgctacgtaccacctttatttcttgctacatgacgttggatagcaaaataatccattaccatgttctcaagagcaaaaagaatccaaaaacaggaagcaagtttgagacatggggtgccgtcgtagacctaaataaaaggtgttcgcgcatcaaggatttcaaaagcctttgcggttccaaggaattctcgaaacagatggagtcggtgtctccataataacgcaaaacactgatacaagcagaaagtcgcctaaacccaatattgaaaagaaagtagacggtaaccaaacagagcatattgaaggactagatcaagccaacttaaagagcattgaaggcaagtgcgtcttgatagacactggaagacgggacttgatgtactgcatgaaagaaaccagcactgttgaagaaaaacaaacacttatatttaccaagaacaaccgctcaaaatgctcaaggcatttcagatatttaagaaggcgtgctcaaccttttgtggtccagaaagccgaagcaatcctttctagatctaaatccaactctgtagacttgaaaaagtttgtacagtacattaaaacaagagcatcagtaaaaccattttgtacgaatacagtgctcacggcttcaaattgcgtccaaaaaaaaattcattgcgcatctttaattttcaaacagcgcatctttatttggtcaaattgcgcacttgtgatttctcaaactgcgctaataaaaaagtcaaactgcatattttacaactcaaattgcattacttttatttgtacctttttcataagctattatctctttaaaagcaaatatcagatcgataacatgtactcaataaaaggaaaaattatttttgaagatggtcaaggaaatgtttttgatgagagcgggaatgaagcaatggactgggatgaggaagttgatcctcataatttggagaacctaaccaacctaacacgctatttgaataagcaagtacagccggaaatggacttagacagtctggattttgttgaaaaaatgaaaacaatagagaagaaccttgaagagaaaaaaacgaaaagcaataataaaaaaaaatctatgttctgatgaccaaaaaaacgttatttatatatcttcacaagataaaattgttaaacgcagctgaatcggctcgaagagcgggagtgaaagtacgtacagggcaagcgtggtctgcaagaatgaaggaagatcctaactggaatatatacgaaaagcaaacgaatcagaacaaaattggacgaaatcatataattctgcattatccacttcattctcaagttctacagtgcttagttgtcttcttttgttgagataaaccaaaggaggagtctcttcaattggcgttgtttcgattgcttagtattttcttttctgtcgtttcaagaattccaaagtagcttccacatagcttaatgactttttttttgacgcttcatctcctttttccaggcatttttttatctcgcgcagttggacttcactaatactacaaattttgtttatagcctccaatctttcagcttcttctccaattaactggtcaagattatcatgcgcaattgagtatagtaattttactaaagaatcattccttccatagtctaaagtactaatcaacaaagactgagagcaaaggaaatagccaaccgcttgcaaaggatgtaatattttttcttgttgtttcatctgtaaagtcgaagatgtcagtagcaaacaatgtttagcccatccagtgcttagtatctgtctcgcaaaggggaggtcactatctatagacttgctcagaaaaggtgctgtactacttccaattccaaatatcacaatgatagaaagcctgttgtagcgttcgtatgtgagtgtacagtattgaatggcacgtgccaagaatttgtcgtcggcttgattttgtacttcaactagtacagatggaaatgaactcaagggatcgcggggagcatagagaacatcacttttttttttgttataaattctgtaggcgccgaaacatagttatcttctgccgcttctggcacgagagcttttaatagcatgtttatcacttgtttgtcggttaataccagtttgctgatcaaatcagttcctggcctgtgattataagggaggatgcgatcagtgtcatctaaacgattttatgtaagaaattatttgtatttttatagcatgtttacttacctttgtcaatactgaaatagtcagatattatttttgaaaagtaaaagtgaagaaagaaaaagcgtaacgtatccgtattgtatccataataaaaaaaatctacccctcgtctggtttccaagttaagccgagatattcataatcgtatcatcaagctaaatcagcttatctggcctcatatattgaatcaaaataaaccattgggtgaagtagatgattcagcattcatcgatgccttctgttcgcagccccagtggattaattacaaacctaaaccatttcggttgtctctcatacagcgatctctaccatcatcggcaatgtcaccaacaccaacttccaaatggtcacttttttggaaactgcctatttcgcctgaaagccgatctttatggtatcgtctattccaccgtaaactctatagtcaatcacttctttcaagatttgataatggtttgacctcttcacactgtaaattttgctctgctaatactgaagacttacaacacctcttcgtgcgctgtcctacgaaatggagagtatggatagatgctttcaatttctttagtccacatctcactttcactcaagacaatgtatgctcaatcctttggtcttttcagcagtttacttttgttgacaacagtgatatctagactctcagctgctgtgtgctttccgttatccggcgtgcccattgaagatttactattgacgactttccttttattgataaacagctgatcactcatgctttgtcgcaatttgccaccctcaaaaggggcagactcgatcttgactagcatgttcaatcgcctacactctgttccgtttggttcataccgctctcagacgtgtggctcctattata

SEQ ID NO: 230 - DNA, 12517 bp, unidentified
  source 1..12517: mol_type = other DNA
agcggaaatggtaggctccatatctaataatggatcgaaatgtcactgaccacaaaattgatactattatagacttatttgaaatatatgtagaagacaactcagacgacgacttccaacccgttgtaacagctagaaaaagaaaaagtaagttgcattgtcaagcttgatgtaggtaaacagctagtttaacgtatgaaactccatcataggtagggaaaatactccacagagtggattacaaaagaggctcaaaggcaaaggaaaagctacagattctgaagttactactacgagtagtactggtatctctacaacagatgaaactatcatgttcaataagatcactcttgatgactatgatcttgaatatagcagtgacgattttgatgcacctgtcgtcaaaagaccctttttgggtgaatcaaccaaatctgcttttcgtatcaccaaatcaacttctgctattgtggagtcaagcacaactgcttctaaaacaagtctaactttccccaagcctagtaaacctgttccaactgctttcaattcagctgcaacttctgtcaagccaagtttttgtcctgtgcctattgacaaggcaagtgacattaaagaaggccctaagaagataagcaagcgtgtgatgacaattaaaacgactgtaaagaatatttggaaaccagcatatttacaggcattgcatgatttggttcacactaccaacttactagttacacatacctttgccttcacaaagtacatatatttacaagaactggcagcaaatgaaaattttgcgctgaacaactttgtgacaaaggatttctttgttgaagtttttctgagtcttgttctctcaaagggtggaaatagcacaagactgaaggatacgaccaaaaactataggcgattgatatcaaaatataaagaagcttactttgaagacgctggttatactccccccaacttaccatatgctcagcaaatagccttgtacgagtgtatgaagatccaaacggcctactataataacatcaaagctcattttggaaacaggctgcgtggtttgataaacaagttatttaaaaagaaggaaaaggcagagagtctcagaggagaaatgcaagcaaacaagtctagtagtaaagcgataaaagaagctacccgaaagaagatttatggaccttgcaatcaggtgaagcttgccatcgcaaaaaaagagatgcctgaagttggtcttttagatgaccaatcaagaacgcaattaaatgattttctctcaagctactcagaggactacacctttcaaaagaactcaatttactatgacgttatggctagtccaaaaaaccatttcaaagccttcttcagacttgctgaacagtctgaagctgaacagacgaaacagtttgcttgtttcccgctacgtaccacctttatttcttgctacatgacgttggatagcaaaataatccattaccatgttctcaagagcaaaaagaatccaaaaacaggaagcaagtttgagacatggggtgccgtcgtagacctaaataaaaggtgttcgcgcatcaaggatttcaaaagcctttgcggttccaaggaattctcgaaacagatggagtcggtgtctccataataacgcaaaacactgatacaagcagaaagtcgcctaaacccaatattgaaaagaaagtagacggtaaccaaacagagcatattgaaggactagatcaagccaacttaaagagcattgaaggcaagtgcgtcttgatagacactggaagacgggacttgatgtactgcatgaaagaaaccagcactgttgaagaaaaacaaacacttatatttaccaagaacaaccgctcaaaatgctcaaggcatttcagatatttaagaaggcgtgctcaaccttttgtggtccagaaagccgaagcaatcctttctagatctaaatccaactctgtagacttgaaaaagtttgtacagtacattaaaacaagagcatcagtaaaaccattttgtacgaatacagtgctcacggcttcaaattgcgtccaaaaaaaaattcattgcgcatctttaattttcaaacagcgcatctttatttggtcaaattgcgcacttgtgatttctcaaactgcgctaataaaaaagtcaaactgcatattttacaactcaaattgcattacttttatttgtacctttttcataagctattatctctttaaaagcaaatatcagatcgataacatgtactcaataaaaggaaaaattatttttgaagatggtcaaggaaatgtttttgatgagagcgggaatgaagcaatggactgggatgaggaagttgatcctcataatttggagaacctaaccaacctaacacgctatttgaataagcaagtacagccggaaatggacttagacagtctggattttgttgaaaaaatgaaaacaatagagaagaaccttgaagagaaaaaaacgaaaagcaataataaaaaaaaatctatgttctgatgaccaaaaaaacgttatttatatatcttcacaagataaaattgttaaacgcagctgaatcggctcgaagagcgggagtgaaagtacgtacagggcaagcgtggtctgcaagaatgaaggaagatcctaactggaatatatacgaaaagcaaacgaatcagaacaaaattggacgaaatcatataattctgcattatccacttcattctcaagttctacagtgcttagttgtcttcttttgttgagataaaccaaaggaggagtctcttcaattggcgttgtttcgattgcttagtattttcttttctgtcgtttcaagaattccaaagtagcttccacatagcttaatgactttttttttgacgcttcatctcctttttccaggcatttttttatctcgcgcagttggacttcactaatactacaaattttgtttatagcctccaatctttcagcttcttctccaattaactggtcaagattatcatgcgcaattgagtatagtaattttactaaagaatcattccttccatagtctaaagtactaatcaacaaagactgagagcaaaggaaatagccaaccgcttgcaaaggatgtaatattttttcttgttgtttcatctgtaaagtcgaagatgtcagtagcaaacaatgtttagcccatccagtgcttagtatctgtctcgcaaaggggaggtcactatctatagacttgctcagaaaaggtgctgtactacttccaattccaaatatcacaatgatagaaagcctgttgtagcgttcgtatgtgagtgtacagtattgaatggcacgtgccaagaatttgtcgtcggcttgattttgtacttcaactagtacagatggaaatgaactcaagggatcgcggggagcatagagaacatcacttttttttttgttataaattctgtaggcgccgaaacatagttatcttctgccgcttctggcacgagagcttttaatagcatgtttatcacttgtttgtcggttaataccagtttgctgatcaaatcagttcctggcctgtgattataagggaggatgcgatcagtgtcatctaaacgattttatgtaagaaattatttgtatttttatagcatgtttacttacctttgtcaatactgaaatagtcagatattatttttgaaaagtaaaagtgaagaaagaaaaagcgtaacgtatccgtattgtatccataataaaaaaaatctacccctcgtctggtttccaagttaagccgagatattcataatcgtatcatcaagctaaatcagcttatctggcctcatatattgaatcaaaataaaccattgggtgaagtagatgattcagcattcatcgatgccttctgttcgcagccccagtggattaattacaaacctaaaccatttcggttgtctctcatacagcgatctctaccatcatcggcaatgtcaccaacaccaacttccaaatggtcacttttttggaaactgcctatttcgcctgaaagccgatctttatggtatcgtctattccaccgtaaactctatagtcaatcacttctttcaagatttgataatggtttgacctcttcacactgtaaattttgctctgctaatactgaagacttacaacacctcttcgtgcgctgtcctacgaaatggagagtatggatagatgctttcaatttctttagtccacatctcactttcactcaagacaatgtatgctcaatcctttggtcttttcagcagtttacttttgttgacaacagtgatatctagactctcagctgctgtgtgctttccgttatccggcgtgcccattgaagatttactattgacgactttccttttattgataaacagctgatcactcatgctttgtcgcaatttgccaccctcaaaaggggcagactcgatcttgactagcatgttcaatcgcctacactctgttccgtttggttcataccgctctcagacgtgtggctcctattataatttataaaaataaactatttatttacaaaaaaaaaaaaaaatatctctccatttgcttacttttgctcgctttttaaattagccaatcataaatttttattcctttcccctcacttgtctatcgggctgaattggttgtaattttgacaacatacctgtcgtattactgttttctgaatagatgtacatacaggaactagcgtcacttgacagctgtccttagatgtaaagtcaaaaacaaaatgcagcattttataagtattgatttttttatgtcaatagaacctgcttttcatcatcaagtattgttttcttttattagagcaattccatgtttccaatcgcgtcttttgtgtttactttagggtgaaagagtaactgcaatgtgatcctatattattatgaaacttatatttcaaaccaacagttaaaaagcgttttcctgggaagaaatctttttaaagcctatgtatatatagtttataaggaaaacatacaaagaatttttatctgcattatactaaatgtttgattgacacacacttattgaaacctgggtacaccggcagcaccagcctggtcaataaaacatgtgctcaacaacctaaaaattcacaaagtatataatgaatccaactctaaccaattattttcatgagatgtgtaatgtactgcttattttactacagttttttccttatctacaagaaatcatattttattacatgctatatgggttcaaggtttgaaaggacctctgctttttcgatacgcgctaatgtttattctgttcatttgtgtaaaaagtacaacattttcaatcaatataaatatcatttgggataaatcccatattcacacagacacgttgattttaaaacgcacggtgcttttatcacagtataagaatgagaaatgaaaacatgaataaatgcatggtttatggattcaaattaaatttaattttattaaaattcaattactagtttgccaaattgattaccacgactacataaaaataaaatgttagtatttctttttgttttccacgaaataaagtacgaacctcatagttaggatggcttgttcaaatgtgtttttatttaaacctttccaaacatgtgaaacaataggcctaatcttgtgtttttcgacaaattcaaccatttttctaaattctactcttgatcccatggtaactcctctgtaatcgatatttttgatgaagtaagatatcggaatattcagtccggtcgttacagtagctgtttgaccataacctacaacgatgccacctggtcgcatcagtttaggatattcagcataaagaggaccaccggcaccatcgatgactgcagacagcacgttattgcccaagagtttctttagttcctccatgcagttttctaatcatataatgtcaatattgaactacaagaatcctcaatttctaccatctttataattcactccgcctatagcacccagctcaatactcttttgaatcttttctggagaagaagatgtgacgtaaacatgggcacctgcagctacagcaaactgaagagcaaaaagtgcaacccctcctccaataccagtgattaggatatgttggcctttttgaactaagccctttgtaaacaaggatctataaagcatgttacgatcaaaattaagctttttttgtacaaaaggctttttggtacctgtaggcagtcaatccagccaatggcaaagcagcggcttctgtcattgaaagaaattcaggacaaggcacaatgtcctccttttcgacaatgacttcttcttttgtaaatgtgccaatcactggcaagagacccaatatgtgaaagtcacgttcaggacctctttcatccgaatcccatccatatccgggattaatcaagacacgttgtcctctttggccatttttcgtaatgtaaccaacgccatcagagcccaacacagaatctaatacagtaccatcatattgatccataaggatccaaacatccctttttaaaaaaaattaaaaaaagtcaagaaggagcctggttttgtttttaccgatggttgaaagcagcagcttgtatttggacagctacttgatgatccgcaaggttctcggaggatttgtgttccttgaattcaacgccgtacttgaattttgaatcaaaaggttgagtttcagtgagaatagcagagaccattttgtttcaaaaggcagtaatgatgtggtaaaggtagtgaaatggttgtatttatagtcattaaaaaaagcggaggggttagattaataagcagtaaacagctgctgtcacaaataccatttttcaaatgaattaataagcgcgctgaattctattaattttaaagcatcgttgatgaatcatatattcagatataatttattagcatcgtttattcaatcaacacgcaagattaaatgaatttgttcgtatccaaaaccaacttgctaatcttttaggacgtatttttcattgtaaatttttcattttgttaactgtagtacaaaagctgagaattgtaaacgttctgatagattttattaataagccttctattatctgcaaaaccaaccaagatttgatgaaaaaaagaaaaggaaagcatattattcgttttcataaagaaaaattgtgtagtctttaattatagtttattgagatcaagctatacagtagcagaactaaggacacgcttaacaaaagctgtcatcgatatccactttttttttaaacctcaacttgttacttgaatatcatgtacttgcgtgaaataaaagggtatttttcataaacatttgaatgtatttatattgctttgtgctttgaaataacagcttgctgttgtaacatttagttattttatgctttttttatatagaaagttctttgataagtagcatgttttagataatgttatattagtttattacaatttgcattaagtaaagtaattgaaatttatagatgaatttaggaaaagagaggaaaaagaagaatgaaggttgaatgaaatataaacattttcgtctaatcctctaagcatccgagtagtctcgcatgtttttggtggaggcctttttggcaattcgtccacctaaactctttagtcctaaactgtgtcctgggttaccgacttgaaggtttttgagaccatcctcaaatggaaggccagtgacagtggcatcctcggttcctgcctttttagcatatcgcttaatgttggtttttgataaattaatacggaatgcagtgtctagtaaattgttgggttcaaggtattcatgtggaatatgtaaaaggaaggcaagaagttctgaattggttggacatgagtgtaagagatgatctaaatattatttaaaagaaatgtacattggtaaatattccatatccttttctcacctttgcataaatctagaatggctaggcttactcgataaaacactttaatgcctaagaagaaggaatgtatgtaagctgaggatctgaatatgtgtccttttcgtgttttttttagtttaccctcaaaataaaacgcgtcccaaacacgtagcactgattcccaaggaagtgtcatggtaaatgcagttaggaaccattgggctatatacatgattggaagtacatcattgttttctaaatgctgagccaactttgggttatgatcctttaataattgcccaatgatgtatgcatcaattcttaactgggaaagtgtaggtgtgaagtatccattcatataccgatcaatagtagccaccaataaccaaaacgagtcctttttttaatacaaaaatagttaatccatcaactctagatttctatttcttttcttttttttctattacttcgacagtcatctgcataagcattagtcctgctaaacggcccatgccttggcaatattctaaatcagaattgtattgggcatatgcttttaatatatttcgcaaattctgttgtcccaagccatccttttccataaattgtgtgtgatcaggataacatcgttcaatatctctttcaatcacgtcgtaaatagggatcctaggcttggacaacaggttttgaaattgatttgatctcttgtagtcatcactaccagccaagaattgccacactttggctctcacagatgctggtattcctccacgaaccaattttttcatctttacatcctttttaaccgttccagcatcgagtttgttgattatatttaaccattttaattcattttctctgtattctttcatagctttggtagacatatttgctctgcatgtaaataaactattagcttcctgggaagataaaatggggtttcagggggtgaggaacaatgaagaagacatgtacctgaatgaaggacgaccgcgtttgataatgaatccatattcatcaacattttcattttgaataaaagttgaattgttattattctttgttggtgtagtctggcttttcctttgtacaccggtgttttgtatattagtagctactgggcgtgcaggagatcttggtggtggtatagggccgtacagttctgtgttctcttcatccgagtaatcaatgttgagtgcagatgtatcaaatggatcatgattattgttgttattatctaatcatatattacacgtataagattaattttatgattattgataagctgcttttttttttctgtacctagattttctccagaataattgtaggaatcgtatgatattcgagactcttttatattatgacttgaagaagtcgaaactgagcctatactttcaaaactcggcttactgacccagtgtctcgatgagggtacgggtgaagcatatcgatcagaattggaagaaaatgaatgaatagagcctcttaattggttgaattgttcttgtctatttttcatcatttctatatcaaattctgttccatggctacttgtagagtttctatattgcgaatggtcggtaaaatcaagatcagcgtcaagcgattctaatacacgaggatctaattctacaaaatgcacggtttctgcattaaaatttccaataacgccttcacagtatccctaaaagatctcttatattggtaaatctttatataaaatacagcattgtgctgtgtttatttaccatgtaaatatcattctctatatgttttaatatagtaatcctttctcctgtaaacaaatttagccttattttatatctaaaatgcctgtgtacacaaaccttgcaaatacatcagttcttcaggagtgttggccaaaatatccacttttgatacacaagcgcctaaaccacctatatattttttaacttggtcgatgtcacaatcctgtattgttgtaggaaacatacctttctcagcaaaggctttcaactcggctaaactcatcgaatcgacatctattgaagcattatccaaagcttctgctggatctttcaatagtcgtgcaatcttttcattaagctcttcgagattagcagaggtatgtcgtgtaatttttggttccatatatcaagtcaaaaaagagaaaaataaaataaggaagttccctccttttatatgaaagaaggaagaaaaaaaaggtgaagaggatggtttactcccaaataaggaagacatgtgcgattaaacaccgctatgagttacgtggagaagaacctttttttattgtttatttaaaaagtaacaaaatggcccccattttaaatgtctaaatcatcatctggatcttcgtcatcaaagtcatcagcagcgtcaggatcgtaatagattaagcctccttgcttcttttgctcctcaacgctaacttctaattgttgagccttgtaataaggcaagaccaaattctcctttgcttttctttgttcatcggtcaatgacaagttgaaggataaattggctgctggatcgggttggttgtctacttgcatctcttcaggttgattttcaacttcgacaacgcctgttaattgacttgctggtaccacttgaagtattccatctctcacaaggaacccatttgtctcataagttactttaccactctttttacgccattcaatatgtacaataccaccctttgtgattgcattggaagtggtagtcaaatatgaaaacgtatcttgaggtgtgaatccagtcagagctgcttgcgtatcaaagtgtgtgcgttctttaagtgcttcaagctttattgtgacagtagctaatttgttgatagattcttgcatacttaagccatttttagttggtaacttgatatcaaagtgatgtctaatcgccaagtgtgtggtgtctattgcttttttagtacaaatgaataaaaaaaaaaaaatacgataaccaaccagttgttaatgattctaatgtttttacaagttgataagttttaaattgagataccataaataatgacgctagagagtcaacaagaatcgtgcagcatggtgtatcatttacttgcttgatcaatggaagtaaaatggagttttcaatatcagttatattgttaatcaattgtacattgggatcatcgtttgctttattcacattatcccaaccatatggatctgtgtagcagtcgatgatgtgtatgtcttttgttgattcaaattgcttcttccaaacttttggtgatgtttctgttaacagcactacaagtgatttgttgtttttaagtgcgcgtttaccaatgtccactaagatggacattcccgataagcgaatagagtcattgattaaaataaaagaagaagacttgtttaatatttgttcaaagcaaagtgtattcattttgcttaaaaaagtttgattatctatttcttgggggctgttactttttgacaaatgcgtgacttgtagtgattttttctccatcattttatcatgcaattctaaacaacggcaaggacaactctatgtaaagagggaatggtgattcaattataggtcttaaatatagcttcgttaatgttaagctgatggctagaataatctcgttgtaatagagtatatctctataagaactttagatattcagcgcgttcacagtagaggcaaaggtgtttacaccaaaagccaatacaatctaggatttgatggtcacagtatctttcaataaactgtacaagatgcaatactattccttcctttgactaccatgcatttttctgtcgtcacagtttgataaacttatttttatatttgccgagttaaattatttatcattgaaattaaataaaaatcaaatatagaatttgaaccttgtagtttcaaatgaaatactgagaataccaaatttaagtcaattcttcattgagctgttgaaatgttgtattctttgtcataaatcattagaattagctattgcccattgtcatcgattaattctagaacatcccataaattggaaggcacttggtttcttacatattggcctagtttatctctttgatatattgtttgatgaagtattcaagcttactctgaacaccttgcttctaattggttttgtctttttttactgatgcatttaataaaaatatcattaaagttatatttcattctatttgcatactaaattcattgtttcaaacatctagctctttcttcctatatttctactattcagggacattcattcaagttactgaagaaaatgtatgcataaaacctgctatgaagaagtttaaaaaaccagacggattgacactcatggacgacaatatgatcattgtggttgctgcggtagtaatgtcacattgaatcagttcgtcaggatcgagataaccatgtggcttaaaaaggaacgctagagtatgcaaaagagttttcttgtggtagggcttgattataaattgtatatgctccagccttcggctggttgtcagaaactacacatttagatggcttctatctgtaacacatttgctttcagtagtagtatattggtggtgataa

SEQ ID NO: 231 - DNA, 11695 bp, unidentified
  source 1..11695: mol_type = other DNA
tttctttgttgaagtttttctgagtcttgttctctcaaagggtggaaatagcacaagactgaaggatacgaccaaaaactataggcgattgctatcgaaatataaaaaagcttactttgaagacgctggttaaactccccaaagcttaccataagctcagcaaatagccttgtacgagtgtacgaagatccaaacggcctactataatagcatcaaagctcattttggaaacaggctgcgtggtttgataaacaagttatttaaaaagaaggaaaaggcagagagtctcagaggagaaatgcaagcaaacaagtctagtagtaaagcgataaaagaagctacccgaaagaagatttatggaccttgcaatcaggtgaagcttgccatcgcaaaaaaagagatgcctgaagttggtcttttagatgaccaatcaagaacgcaattaaatgattttctctcaagctactcagaggactacacctttcaaaagaactcaatttactatgacgttatggctagtccaaaaaaccatttcaaagccttcttcagacttgctgaacagtctgaagctgaacagacgaaacagtttgcttgtttcccgctacgtaccacctttatttcttgctacatgacgttggatagcaaaataatccattaccatgttctcaagagcaaaaagaatccaaaaacaggaagcaagtttgagacatggggtgccgtcgtagacctaaataaaaggtgttcgcgcatcaaggatttcaaaagcctttgcggttccaaggaattctcgaaacagatggagtcggtgtctccataataacgcaaaacactgatacaagcagaaagtcgcctaaacccaatattgaaaagaaagtagacggtaaccaaacagagcatattgaaggactagatcaagccaacttaaagagcattgaaggcaagtgcgtcttgatagacactggaagacgggacttgatgtactgcatgaaagaaaccagcactgttgaagaaaaacaaacacttatatttaccaagaacaaccgctcaaaatgctcaaggcatttcagatatttaagaaggcgtgctcaaccttttgtggtccagaaagccgaagcaatcctttctagatctaaatccaactctgtagacttgaaaaagtttgtacagtacattaaaacaagagcatcagtaaaaccattttgtacgaatacagtgctcacggcttcaaattgcgtccaaaaaaaaattcattgcgcatctttaattttcaaacagcgcatctttatttggtcaaattgcgcacttgtgatttctcaaactgcgctaataaaaaagtcaaactgcatattttacaactcaaattgcattacttttatttgtacctttttcataagctattatctctttaaaagcaaatatcagatcgataacatgtactcaataaaaggaaaaattatttttgaagatggtcaaggaaatgtttttgatgagagcgggaatgaagcaatggactgggatgaggaagttgatcctcataatttggagaacctaaccaacctaacacgctatttgaataagcaagtacagccggaaatggacttagacagtctggattttgttgaaaaaatgaaaacaatagagaagaaccttgaagagaaaaaaacgaaaagcaataataaaaaaaaatctatgttctgatgaccaaaaaaacgttatttatatatcttcacaagataaaattgttaaacgcagctgaatcggctcgaagagcgggagtgaaagtacgtacagggcaagcgtggtctgcaagaatgaaggaagatcctaactggaatatatacgaaaagcaaacgaatcagaacaaaattggacgaaatcatataattctgcattatccacttcattctcaagttctacagtgcttagttgtcttcttttgttgagataaaccaaaggaggagtctcttcaattggcgttgtttcgattgcttagtattttcttttctgtcgtttcaagaattccaaagtagcttccacatagcttaatgactttttttttgacgcttcatctcctttttccaggcatttttttatctcgcgcagttggacttcactaatactacaaattttgtttatagcctccaatctttcagcttcttctccaattaactggtcaagattatcatgcgcaattgagtatagtaattttactaaagaatcattccttccatagtctaaagtactaatcaacaaagactgagagcaaaggaaatagccaaccgcttgcaaaggatgtaatattttttcttgttgtttcatctgtaaagtcgaagatgtcagtagcaaacaatgtttagcccatccagtgcttagtatctgtctcgcaaaggggaggtcactatctatagacttgctcagaaaaggtgctgtactacttccaattccaaatatcacaatgatagaaagcctgttgtagcgttcgtatgtgagtgtacagtattgaatggcacgtgccaagaatttgtcgtcggcttgattttgtacttcaactagtacagatggaaatgaactcaagggatcgcggggagcatagagaacatcacttttttttttgttataaattctgtaggcgccgaaacatagttatcttctgccgcttctggcacgagagcttttaatagcatgtttatcacttgtttgtcggttaataccagtttgctgatcaaatcagttcctggcctgtgattataagggaggatgcgatcagtgtcatctaaacgattttatgtaagaaattatttgtatttttatagcatgtttacttacctttgtcaatactgaaatagtcagatattatttttgaaaagtaaaagtgaagaaagaaaaagcgtaacgtatccgtattgtatccataataaaaaaaatctacccctcgtctggtttccaagttaagccgagatattcataatcgtatcatcaagctaaatcagcttatctggcctcatatattgaatcaaaataaaccattgggtgaagtagatgattcagcattcatcgatgccttctgttcgcagccccagtggattaattacaaacctaaaccatttcggttgtctctcatacagcgatctctaccatcatcggcaatgtcaccaacaccaacttccaaatggtcacttttttggaaactgcctatttcgcctgaaagccgatctttatggtatcgtctattccaccgtaaactctatagtcaatcacttctttcaagatttgataatggtttgacctcttcacactgtaaattttgctctgctaatactgaagacttacaacacctcttcgtgcgctgtcctacgaaatggagagtatggatagatgctttcaatttctttagtccacatctcactttcactcaagacaatgtatgctcaatcctttggtcttttcagcagtttacttttgttgacaacagtgatatctagactctcagctgctgtgtgctttccgttatccggcgtgcccattgaagatttactattgacgactttccttttattgataaacagctgatcactcatgctttgtcgcaatttgccaccctcaaaaggggcagactcgatcttgactagcatgttcaatcgcctacactctgttccgtttggttcataccgctctcagacgtgtggctcctattataatttataaaaataaactatttatttacaaaaaaaaaaaaaaatatctctccatttgcttacttttgctcgctttttaaattagccaatcataaatttttattcctttcccctcacttgtctatcgggctgaattggttgtaattttgacaacatacctgtcgtattactgttttctgaatagatgtacatacaggaactagcgtcacttgacagctgtccttagatgtaaagtcaaaaacaaaatgcagcattttataagtattgatttttttatgtcaatagaacctgcttttcatcatcaagtattgttttcttttattagagcaattccatgtttccaatcgcgtcttttgtgtttactttagggtgaaagagtaactgcaatgtgatcctatattattatgaaacttatatttcaaaccaacagttaaaaagcgttttcctgggaagaaatctttttaaagcctatgtatatatagtttataaggaaaacatacaaagaatttttatctgcattatactaaatgtttgattgacacacacttattgaaacctgggtacaccggcagcaccagcctggtcaataaaacatgtgctcaacaacctaaaaattcacaaagtatataatgaatccaactctaaccaattattttcatgagatgtgtaatgtactgcttattttactacagttttttccttatctacaagaaatcatattttattacatgctatatgggttcaaggtttgaaaggacctctgctttttcgatacgcgctaatgtttattctgttcatttgtgtaaaaagtacaacattttcaatcaatataaatatcatttgggataaatcccatattcacacagacacgttgattttaaaacgcacggtgcttttatcacagtataagaatgagaaatgaaaacatgaataaatgcatggtttatggattcaaattaaatttaattttattaaaattcaattactagtttgccaaattgattaccacgactacataaaaataaaatgttagtatttctttttgttttccacgaaataaagtacgaacctcatagttaggatggcttgttcaaatgtgtttttatttaaacctttccaaacatgtgaaacaataggcctaatcttgtgtttttcgacaaattcaaccatttttctaaattctactcttgatcccatggtaactcctctgtaatcgatatttttgatgaagtaagatatcggaatattcagtccggtcgttacagtagctgtttgaccataacctacaacgatgccacctggtcgcatcagtttaggatattcagcataaagaggaccaccggcaccatcgatgactgcagacagcacgttattgcccaagagtttctttagttcctccatgcagttttctaatcatataatgtcaatattgaactacaagaatcctcaatttctaccatctttataattcactccgcctatagcacccagctcaatactcttttgaatcttttctggagaagaagatgtgacgtaaacatgggcacctgcagctacagcaaactgaagagcaaaaagtgcaacccctcctccaataccagtgattaggatatgttggcctttttgaactaagccctttgtaaacaaggatctataaagcatgttacgatcaaaattaagctttttttgtacaaaaggctttttggtacctgtaggcagtcaatccagccaatggcaaagcagcggcttctgtcattgaaagaaattcaggacaaggcacaatgtcctccttttcgacaatgacttcttcttttgtaaatgtgccaatcactggcaagagacccaatatgtgaaagtcacgttcaggacctctttcatccgaatcccatccatatccgggattaatcaagacacgttgtcctctttggccatttttcgtaatgtaaccaacgccatcagagcccaacacagaatctaatacagtaccatcatattgatccataaggatccaaacatccctttttaaaaaaaattaaaaaaagtcaagaaggagcctggttttgtttttaccgatggttgaaagcagcagcttgtatttggacagctacttgatgatccgcaaggttctcggaggatttgtgttccttgaattcaacgccgtacttgaattttgaatcaaaaggttgagtttcagtgagaatagcagagaccattttgtttcaaaaggcagtaatgatgtggtaaaggtagtgaaatggttgtatttatagtcattaaaaaaagcggaggggttagattaataagcagtaaacagctgctgtcacaaataccatttttcaaatgaattaataagcgcgctgaattctattaattttaaagcatcgttgatgaatcatatattcagatataatttattagcatcgtttattcaatcaacacgcaagattaaatgaatttgttcgtatccaaaaccaacttgctaatcttttaggacgtatttttcattgtaaatttttcattttgttaactgtagtacaaaagctgagaattgtaaacgttctgatagattttattaataagccttctattatctgcaaaaccaaccaagatttgatgaaaaaaagaaaaggaaagcatattattcgttttcataaagaaaaattgtgtagtctttaattatagtttattgagatcaagctatacagtagcagaactaaggacacgcttaacaaaagctgtcatcgatatccactttttttttaaacctcaacttgttacttgaatatcatgtacttgcgtgaaataaaagggtatttttcataaacatttgaatgtatttatattgctttgtgctttgaaataacagcttgctgttgtaacatttagttattttatgctttttttatatagaaagttctttgataagtagcatgttttagataatgttatattagtttattacaatttgcattaagtaaagtaattgaaatttatagatgaatttaggaaaagagaggaaaaagaagaatgaaggttgaatgaaatataaacattttcgtctaatcctctaagcatccgagtagtctcgcatgtttttggtggaggcctttttggcaattcgtccacctaaactctttagtcctaaactgtgtcctgggttaccgacttgaaggtttttgagaccatcctcaaatggaaggccagtgacagtggcatcctcggttcctgcctttttagcatatcgcttaatgttggtttttgataaattaatacggaatgcagtgtctagtaaattgttgggttcaaggtattcatgtggaatatgtaaaaggaaggcaagaagttctgaattggttggacatgagtgtaagagatgatctaaatattatttaaaagaaatgtacattggtaaatattccatatccttttctcacctttgcataaatctagaatggctaggcttactcgataaaacactttaatgcctaagaagaaggaatgtatgtaagctgaggatctgaatatgtgtccttttcgtgttttttttagtttaccctcaaaataaaacgcgtcccaaacacgtagcactgattcccaaggaagtgtcatggtaaatgcagttaggaaccattgggctatatacatgattggaagtacatcattgttttctaaatgctgagccaactttgggttatgatcctttaataattgcccaatgatgtatgcatcaattcttaactgggaaagtgtaggtgtgaagtatccattcatataccgatcaatagtagccaccaataaccaaaacgagtcctttttttaatacaaaaatagttaatccatcaactctagatttctatttcttttcttttttttctattacttcgacagtcatctgcataagcattagtcctgctaaacggcccatgccttggcaatattctaaatcagaattgtattgggcatatgcttttaatatatttcgcaaattctgttgtcccaagccatccttttccataaattgtgtgtgatcaggataacatcgttcaatatctctttcaatcacgtcgtaaatagggatcctaggcttggacaacaggttttgaaattgatttgatctcttgtagtcatcactaccagccaagaattgccacactttggctctcacagatgctggtattcctccacgaaccaattttttcatctttacatcctttttaaccgttccagcatcgagtttgttgattatatttaaccattttaattcattttctctgtattctttcatagctttggtagacatatttgctctgcatgtaaataaactattagcttcctgggaagataaaatggggtttcagggggtgaggaacaatgaagaagacatgtacctgaatgaaggacgaccgcgtttgataatgaatccatattcatcaacattttcattttgaataaaagttgaattgttattattctttgttggtgtagtctggcttttcctttgtacaccggtgttttgtatattagtagctactgggcgtgcaggagatcttggtggtggtatagggccgtacagttctgtgttctcttcatccgagtaatcaatgttgagtgcagatgtatcaaatggatcatgattattgttgttattatctaatcatatattacacgtataagattaattttatgattattgataagctgcttttttttttctgtacctagattttctccagaataattgtaggaatcgtatgatattcgagactcttttatattatgacttgaagaagtcgaaactgagcctatactttcaaaactcggcttactgacccagtgtctcgatgagggtacgggtgaagcatatcgatcagaattggaagaaaatgaatgaatagagcctcttaattggttgaattgttcttgtctatttttcatcatttctatatcaaattctgttccatggctacttgtagagtttctatattgcgaatggtcggtaaaatcaagatcagcgtcaagcgattctaatacacgaggatctaattctacaaaatgcacggtttctgcattaaaatttccaataacgccttcacagtatccctaaaagatctcttatattggtaaatctttatataaaatacagcattgtgctgtgtttatttaccatgtaaatatcattctctatatgttttaatatagtaatcctttctcctgtaaacaaatttagccttattttatatctaaaatgcctgtgtacacaaaccttgcaaatacatcagttcttcaggagtgttggccaaaatatccacttttgatacacaagcgcctaaaccacctatatattttttaacttggtcgatgtcacaatcctgtattgttgtaggaaacatacctttctcagcaaaggctttcaactcggctaaactcatcgaatcgacatctattgaagcattatccaaagcttctgctggatctttcaatagtcgtgcaatcttttcattaagctcttcgagattagcagaggtatgtcgtgtaatttttggttccatatatcaagtcaaaaaagagaaaaataaaataaggaagttccctccttttatatgaaagaaggaagaaaaaaaaggtgaagaggatggtttactcccaaataaggaagacatgtgcgattaaacaccgctatgagttacgtggagaagaacctttttttattgtttatttaaaaagtaacaaaatggcccccattttaaatgtctaaatcatcatctggatcttcgtcatcaaagtcatcagcagcgtcaggatcgtaatagattaagcctccttgcttcttttgctcctcaacgctaacttctaattgttgagccttgtaataaggcaagaccaaattctcctttgcttttctttgttcatcggtcaatgacaagttgaaggataaattggctgctggatcgggttggttgtctacttgcatctcttcaggttgattttcaacttcgacaacgcctgttaattgacttgctggtaccacttgaagtattccatctctcacaaggaacccatttgtctcataagttactttaccactctttttacgccattcaatatgtacaataccaccctttgtgattgcattggaagtggtagtcaaatatgaaaacgtatcttgaggtgtgaatccagtcagagctgcttgcgtatcaaagtgtgtgcgttctttaagtgcttcaagctttattgtgacagtagctaatttgttgatagattcttgcatacttaagccatttttagttggtaacttgatatcaaagtgatgtctaatcgccaagtgtgtggtgtctattgcttttttagtacaaatgaataaaaaaaaaaaaatacgataaccaaccagttgttaatgattctaatgtttttacaagttgataagttttaaattgagataccataaataatgacgctagagagtcaacaagaatcgtgcagcatggtgtatcatttacttgcttgatcaatggaagtaaaatggagttttcaatatcagttatattgttaatcaattgtacattgggatcatcgtttgctttattcacattatcccaaccatatggatctgtgtagcagtcgatgatgtgtatgtcttttgttgattcaaattgcttcttccaaacttttggtgatgtttctgttaacagcactacaagtgatttgttgtttttaagtgcgcgtttaccaatgtccactaagatggacattcccgataagcgaatagagtcattgattaaaataaaagaagaagacttgtttaatatttgttcaaagcaaagtgtattcattttgcttaaaaaagtttgattatctatttcttgggggctgttactttttgacaaatgcgtgacttgtagtgattttttctccatcattttatcatgcaattctaaacaacggcaaggacaactctatgtaaagagggaatggtgattcaattataggtcttaaatatagcttcgttaatgttaagctgatggctagaataatctcgttgtaatagagtatatctctataagaactttagatattcagcgcgttcacagtagaggcaaaggtgtttacaccaaaagccaatacaatctaggatttgatggtcacagtatctttcaataaactgtacaagatgcaatactattccttcctttgactaccatgcatttttctgtcgtcacagtttgataaacttatttttatatttgccgagttaaattatttatcattgaaattaaataaaaatcaaatatagaatttgaaccttgtagtttcaaatgaaatactgagaataccaaatttaagtcaattcttcattgagctgttgaaatgttgtattctttgtcataaatcattagaattagctattgcccattgtcatcgattaattctagaacatcccataaattggaaggcacttggtttcttacatattggcctagtttatctctttgatatattgtttgatgaagtattcaagcttactctgaacaccttgcttctaattggttttgtctttttttactgatgcatttaataaaaatatcattaaagttatatttcattctatttgcatactaaattcattgtttcaaacatctagctctttcttcctatatttctactattcagggacattcattcaagttactgaagaaaatgtatgcataaaacctgctatgaagaagtttaaaaaaccagacggattgacactcatggacgacaatatgatcattgtggttgctgcggtagtaatgtcacattgaatcagttcgtcaggatcgagataaccatgtggcttaaaaaggaacgctagagtatgcaaaagagttttcttgtggtagggcttgattataaattgtatatgctccagccttcggctggttgtcagaaactacacatttagatggcttctatctgtaacacatttgctttcagtagtagtatattggtggtgataa

SEQ ID NO: 232 - DNA, 11429 bp, unidentified
  source 1..11429: mol_type = other DNA
agaaggaaaaggcagagagtctcagaggagaaatgcaagcaaacaagtctagtagtaaagcgataaaagaagctacccgaaagaagatttatggaccttgcaatcaggtgaagcttgccatcgcaaaaaaagagatgcctgaagttggtcttttagatgaccaatcaagaacgcaattaaatgattttctctcaagctactcagaggactacacctttcaaaagaactcaatttactatgacgttatggctagtccaaaaaaccatttcaaagccttcttcagacttgctgaacagtctgaagctgaacagacgaaacagtttgcttgtttcccgctacgtaccacctttatttcttgctacatgacgttggatagcaaaataatccattaccatgttctcaagagcaaaaagaatccaaaaacaggaagcaagtttgagacatggggtgccgtcgtagacctaaataaaaggtgttcgcgcatcaaggatttcaaaagcctttgcggttccaaggaattctcgaaacagatggagtcggtgtctccataataacgcaaaacactgatacaagcagaaagtcgcctaaacccaatattgaaaagaaagtagacggtaaccaaacagagcatattgaaggactagatcaagccaacttaaagagcattgaaggcaagtgcgtcttgatagacactggaagacgggacttgatgtactgcatgaaagaaaccagcactgttgaagaaaaacaaacacttatatttaccaagaacaaccgctcaaaatgctcaaggcatttcagatatttaagaaggcgtgctcaaccttttgtggtccagaaagccgaagcaatcctttctagatctaaatccaactctgtagacttgaaaaagtttgtacagtacattaaaacaagagcatcagtaaaaccattttgtacgaatacagtgctcacggcttcaaattgcgtccaaaaaaaaattcattgcgcatctttaattttcaaacagcgcatctttatttggtcaaattgcgcacttgtgatttctcaaactgcgctaataaaaaagtcaaactgcatattttacaactcaaattgcattacttttatttgtacctttttcataagctattatctctttaaaagcaaatatcagatcgataacatgtactcaataaaaggaaaaattatttttgaagatggtcaaggaaatgtttttgatgagagcgggaatgaagcaatggactgggatgaggaagttgatcctcataatttggagaacctaaccaacctaacacgctatttgaataagcaagtacagccggaaatggacttagacagtctggattttgttgaaaaaatgaaaacaatagagaagaaccttgaagagaaaaaaacgaaaagcaataataaaaaaaaatctatgttctgatgaccaaaaaaacgttatttatatatcttcacaagataaaattgttaaacgcagctgaatcggctcgaagagcgggagtgaaagtacgtacagggcaagcgtggtctgcaagaatgaaggaagatcctaactggaatatatacgaaaagcaaacgaatcagaacaaaattggacgaaatcatataattctgcattatccacttcattctcaagttctacagtgcttagttgtcttcttttgttgagataaaccaaaggaggagtctcttcaattggcgttgtttcgattgcttagtattttcttttctgtcgtttcaagaattccaaagtagcttccacatagcttaatgactttttttttgacgcttcatctcctttttccaggcatttttttatctcgcgcagttggacttcactaatactacaaattttgtttatagcctccaatctttcagcttcttctccaattaactggtcaagattatcatgcgcaattgagtatagtaattttactaaagaatcattccttccatagtctaaagtactaatcaacaaagactgagagcaaaggaaatagccaaccgcttgcaaaggatgtaatattttttcttgttgtttcatctgtaaagtcgaagatgtcagtagcaaacaatgtttagcccatccagtgcttagtatctgtctcgcaaaggggaggtcactatctatagacttgctcagaaaaggtgctgtactacttccaattccaaatatcacaatgatagaaagcctgttgtagcgttcgtatgtgagtgtacagtattgaatggcacgtgccaagaatttgtcgtcggcttgattttgtacttcaactagtacagatggaaatgaactcaagggatcgcggggagcatagagaacatcacttttttttttgttataaattctgtaggcgccgaaacatagttatcttctgccgcttctggcacgagagcttttaatagcatgtttatcacttgtttgtcggttaataccagtttgctgatcaaatcagttcctggcctgtgattataagggaggatgcgatcagtgtcatctaaacgattttatgtaagaaattatttgtatttttatagcatgtttacttacctttgtcaatactgaaatagtcagatattatttttgaaaagtaaaagtgaagaaagaaaaagcgtaacgtatccgtattgtatccataataaaaaaaatctacccctcgtctggtttccaagttaagccgagatattcataatcgtatcatcaagctaaatcagcttatctggcctcatatattgaatcaaaataaaccattgggtgaagtagatgattcagcattcatcgatgccttctgttcgcagccccagtggattaattacaaacctaaaccatttcggttgtctctcatacagcgatctctaccatcatcggcaatgtcaccaacaccaacttccaaatggtcacttttttggaaactgcctatttcgcctgaaagccgatctttatggtatcgtctattccaccgtaaactctatagtcaatcacttctttcaagatttgataatggtttgacctcttcacactgtaaattttgctctgctaatactgaagacttacaacacctcttcgtgcgctgtcctacgaaatggagagtatggatagatgctttcaatttctttagtccacatctcactttcactcaagacaatgtatgctcaatcctttggtcttttcagcagtttacttttgttgacaacagtgatatctagactctcagctgctgtgtgctttccgttatccggcgtgcccattgaagatttactattgacgactttccttttattgataaacagctgatcactcatgctttgtcgcaatttgccaccctcaaaaggggcagactcgatcttgactagcatgttcaatcgcctacactctgttccgtttggttcataccgctctcagacgtgtggctcctattataatttataaaaataaactatttatttacaaaaaaaaaaaaaaatatctctccatttgcttacttttgctcgctttttaaattagccaatcataaatttttattcctttcccctcacttgtctatcgggctgaattggttgtaattttgacaacatacctgtcgtattactgttttctgaatagatgtacatacaggaactagcgtcacttgacagctgtccttagatgtaaagtcaaaaacaaaatgcagcattttataagtattgatttttttatgtcaatagaacctgcttttcatcatcaagtattgttttcttttattagagcaattccatgtttccaatcgcgtcttttgtgtttactttagggtgaaagagtaactgcaatgtgatcctatattattatgaaacttatatttcaaaccaacagttaaaaagcgttttcctgggaagaaatctttttaaagcctatgtatatatagtttataaggaaaacatacaaagaatttttatctgcattatactaaatgtttgattgacacacacttattgaaacctgggtacaccggcagcaccagcctggtcaataaaacatgtgctcaacaacctaaaaattcacaaagtatataatgaatccaactctaaccaattattttcatgagatgtgtaatgtactgcttattttactacagttttttccttatctacaagaaatcatattttattacatgctatatgggttcaaggtttgaaaggacctctgctttttcgatacgcgctaatgtttattctgttcatttgtgtaaaaagtacaacattttcaatcaatataaatatcatttgggataaatcccatattcacacagacacgttgattttaaaacgcacggtgcttttatcacagtataagaatgagaaatgaaaacatgaataaatgcatggtttatggattcaaattaaatttaattttattaaaattcaattactagtttgccaaattgattaccacgactacataaaaataaaatgttagtatttctttttgttttccacgaaataaagtacgaacctcatagttaggatggcttgttcaaatgtgtttttatttaaacctttccaaacatgtgaaacaataggcctaatcttgtgtttttcgacaaattcaaccatttttctaaattctactcttgatcccatggtaactcctctgtaatcgatatttttgatgaagtaagatatcggaatattcagtccggtcgttacagtagctgtttgaccataacctacaacgatgccacctggtcgcatcagtttaggatattcagcataaagaggaccaccggcaccatcgatgactgcagacagcacgttattgcccaagagtttctttagttcctccatgcagttttctaatcatataatgtcaatattgaactacaagaatcctcaatttctaccatctttataattcactccgcctatagcacccagctcaatactcttttgaatcttttctggagaagaagatgtgacgtaaacatgggcacctgcagctacagcaaactgaagagcaaaaagtgcaacccctcctccaataccagtgattaggatatgttggcctttttgaactaagccctttgtaaacaaggatctataaagcatgttacgatcaaaattaagctttttttgtacaaaaggctttttggtacctgtaggcagtcaatccagccaatggcaaagcagcggcttctgtcattgaaagaaattcaggacaaggcacaatgtcctccttttcgacaatgacttcttcttttgtaaatgtgccaatcactggcaagagacccaatatgtgaaagtcacgttcaggacctctttcatccgaatcccatccatatccgggattaatcaagacacgttgtcctctttggccatttttcgtaatgtaaccaacgccatcagagcccaacacagaatctaatacagtaccatcatattgatccataaggatccaaacatccctttttaaaaaaaattaaaaaaagtcaagaaggagcctggttttgtttttaccgatggttgaaagcagcagcttgtatttggacagctacttgatgatccgcaaggttctcggaggatttgtgttccttgaattcaacgccgtacttgaattttgaatcaaaaggttgagtttcagtgagaatagcagagaccattttgtttcaaaaggcagtaatgatgtggtaaaggtagtgaaatggttgtatttatagtcattaaaaaaagcggaggggttagattaataagcagtaaacagctgctgtcacaaataccatttttcaaatgaattaataagcgcgctgaattctattaattttaaagcatcgttgatgaatcatatattcagatataatttattagcatcgtttattcaatcaacacgcaagattaaatgaatttgttcgtatccaaaaccaacttgctaatcttttaggacgtatttttcattgtaaatttttcattttgttaactgtagtacaaaagctgagaattgtaaacgttctgatagattttattaataagccttctattatctgcaaaaccaaccaagatttgatgaaaaaaagaaaaggaaagcatattattcgttttcataaagaaaaattgtgtagtctttaattatagtttattgagatcaagctatacagtagcagaactaaggacacgcttaacaaaagctgtcatcgatatccactttttttttaaacctcaacttgttacttgaatatcatgtacttgcgtgaaataaaagggtatttttcataaacatttgaatgtatttatattgctttgtgctttgaaataacagcttgctgttgtaacatttagttattttatgctttttttatatagaaagttctttgataagtagcatgttttagataatgttatattagtttattacaatttgcattaagtaaagtaattgaaatttatagatgaatttaggaaaagagaggaaaaagaagaatgaaggttgaatgaaatataaacattttcgtctaatcctctaagcatccgagtagtctcgcatgtttttggtggaggcctttttggcaattcgtccacctaaactctttagtcctaaactgtgtcctgggttaccgacttgaaggtttttgagaccatcctcaaatggaaggccagtgacagtggcatcctcggttcctgcctttttagcatatcgcttaatgttggtttttgataaattaatacggaatgcagtgtctagtaaattgttgggttcaaggtattcatgtggaatatgtaaaaggaaggcaagaagttctgaattggttggacatgagtgtaagagatgatctaaatattatttaaaagaaatgtacattggtaaatattccatatccttttctcacctttgcataaatctagaatggctaggcttactcgataaaacactttaatgcctaagaagaaggaatgtatgtaagctgaggatctgaatatgtgtccttttcgtgttttttttagtttaccctcaaaataaaacgcgtcccaaacacgtagcactgattcccaaggaagtgtcatggtaaatgcagttaggaaccattgggctatatacatgattggaagtacatcattgttttctaaatgctgagccaactttgggttatgatcctttaataattgcccaatgatgtatgcatcaattcttaactgggaaagtgtaggtgtgaagtatccattcatataccgatcaatagtagccaccaataaccaaaacgagtcctttttttaatacaaaaatagttaatccatcaactctagatttctatttcttttcttttttttctattacttcgacagtcatctgcataagcattagtcctgctaaacggcccatgccttggcaatattctaaatcagaattgtattgggcatatgcttttaatatatttcgcaaattctgttgtcccaagccatccttttccataaattgtgtgtgatcaggataacatcgttcaatatctctttcaatcacgtcgtaaatagggatcctaggcttggacaacaggttttgaaattgatttgatctcttgtagtcatcactaccagccaagaattgccacactttggctctcacagatgctggtattcctccacgaaccaattttttcatctttacatcctttttaaccgttccagcatcgagtttgttgattatatttaaccattttaattcattttctctgtattctttcatagctttggtagacatatttgctctgcatgtaaataaactattagcttcctgggaagataaaatggggtttcagggggtgaggaacaatgaagaagacatgtacctgaatgaaggacgaccgcgtttgataatgaatccatattcatcaacattttcattttgaataaaagttgaattgttattattctttgttggtgtagtctggcttttcctttgtacaccggtgttttgtatattagtagctactgggcgtgcaggagatcttggtggtggtatagggccgtacagttctgtgttctcttcatccgagtaatcaatgttgagtgcagatgtatcaaatggatcatgattattgttgttattatctaatcatatattacacgtataagattaattttatgattattgataagctgcttttttttttctgtacctagattttctccagaataattgtaggaatcgtatgatattcgagactcttttatattatgacttgaagaagtcgaaactgagcctatactttcaaaactcggcttactgacccagtgtctcgatgagggtacgggtgaagcatatcgatcagaattggaagaaaatgaatgaatagagcctcttaattggttgaattgttcttgtctatttttcatcatttctatatcaaattctgttccatggctacttgtagagtttctatattgcgaatggtcggtaaaatcaagatcagcgtcaagcgattctaatacacgaggatctaattctacaaaatgcacggtttctgcattaaaatttccaataacgccttcacagtatccctaaaagatctcttatattggtaaatctttatataaaatacagcattgtgctgtgtttatttaccatgtaaatatcattctctatatgttttaatatagtaatcctttctcctgtaaacaaatttagccttattttatatctaaaatgcctgtgtacacaaaccttgcaaatacatcagttcttcaggagtgttggccaaaatatccacttttgatacacaagcgcctaaaccacctatatattttttaacttggtcgatgtcacaatcctgtattgttgtaggaaacatacctttctcagcaaaggctttcaactcggctaaactcatcgaatcgacatctattgaagcattatccaaagcttctgctggatctttcaatagtcgtgcaatcttttcattaagctcttcgagattagcagaggtatgtcgtgtaatttttggttccatatatcaagtcaaaaaagagaaaaataaaataaggaagttccctccttttatatgaaagaaggaagaaaaaaaaggtgaagaggatggtttactcccaaataaggaagacatgtgcgattaaacaccgctatgagttacgtggagaagaacctttttttattgtttatttaaaaagtaacaaaatggcccccattttaaatgtctaaatcatcatctggatcttcgtcatcaaagtcatcagcagcgtcaggatcgtaatagattaagcctccttgcttcttttgctcctcaacgctaacttctaattgttgagccttgtaataaggcaagaccaaattctcctttgcttttctttgttcatcggtcaatgacaagttgaaggataaattggctgctggatcgggttggttgtctacttgcatctcttcaggttgattttcaacttcgacaacgcctgttaattgacttgctggtaccacttgaagtattccatctctcacaaggaacccatttgtctcataagttactttaccactctttttacgccattcaatatgtacaataccaccctttgtgattgcattggaagtggtagtcaaatatgaaaacgtatcttgaggtgtgaatccagtcagagctgcttgcgtatcaaagtgtgtgcgttctttaagtgcttcaagctttattgtgacagtagctaatttgttgatagattcttgcatacttaagccatttttagttggtaacttgatatcaaagtgatgtctaatcgccaagtgtgtggtgtctattgcttttttagtacaaatgaataaaaaaaaaaaaatacgataaccaaccagttgttaatgattctaatgtttttacaagttgataagttttaaattgagataccataaataatgacgctagagagtcaacaagaatcgtgcagcatggtgtatcatttacttgcttgatcaatggaagtaaaatggagttttcaatatcagttatattgttaatcaattgtacattgggatcatcgtttgctttattcacattatcccaaccatatggatctgtgtagcagtcgatgatgtgtatgtcttttgttgattcaaattgcttcttccaaacttttggtgatgtttctgttaacagcactacaagtgatttgttgtttttaagtgcgcgtttaccaatgtccactaagatggacattcccgataagcgaatagagtcattgattaaaataaaagaagaagacttgtttaatatttgttcaaagcaaagtgtattcattttgcttaaaaaagtttgattatctatttcttgggggctgttactttttgacaaatgcgtgacttgtagtgattttttctccatcattttatcatgcaattctaaacaacggcaaggacaactctatgtaaagagggaatggtgattcaattataggtcttaaatatagcttcgttaatgttaagctgatggctagaataatctcgttgtaatagagtatatctctataagaactttagatattcagcgcgttcacagtagaggcaaaggtgtttacaccaaaagccaatacaatctaggatttgatggtcacagtatctttcaataaactgtacaagatgcaatactattccttcctttgactaccatgcatttttctgtcgtcacagtttgataaacttatttttatatttgccgagttaaattatttatcattgaaattaaataaaaatcaaatatagaatttgaaccttgtagtttcaaatgaaatactgagaataccaaatttaagtcaattcttcattgagctgttgaaatgttgtattctttgtcataaatcattagaattagctattgcccattgtcatcgattaattctagaacatcccataaattggaaggcacttggtttcttacatattggcctagtttatctctttgatatattgtttgatgaagtattcaagcttactctgaacaccttgcttctaattggttttgtctttttttactgatgcatttaataaaaatatcattaaagttatatttcattctatttgcatactaaattcattgtttcaaacatctagctctttcttcctatatttctactattcagggacattcattcaagttactgaagaaaatgtatgcataaaacctgctatgaagaagtttaaaaaaccagacggattgacactcatggacgacaatatgatcattgtggttgctgcggtagtaatgtcacattgaatcagttcgtcaggatcgagataaccatgtggcttaaaaaggaacgctagagtatgcaaaagagttttcttgtggtagggcttgattataaattgtatatgctccagccttcggctggttgtcagaaactacacatttagatggcttctatctgtaacacatttgctttcagtagtagtatattggtggtgataa

SEQ ID NO: 233 - DNA, 11429 bp, unidentified; identical to SEQ ID NO: 232
  source 1..11429: mol_type = other DNA

SEQ ID NO: 234 - DNA, 11429 bp, unidentified; identical to SEQ ID NO: 232
  source 1..11429: mol_type = other DNA

SEQ ID NO: 235 - DNA, 11429 bp, unidentified; identical to SEQ ID NO: 232
  source 1..11429: mol_type = other DNA

SEQ ID NO: 236 - DNA, 11429 bp, unidentified; identical to SEQ ID NO: 232
  source 1..11429: mol_type = other DNA

SEQ ID NO: 237 - DNA, 11697 bp, unidentified
  source 1..11697: mol_type = other DNA
gatttctttgttgaagtttttctgagtcttgttctctcaaagggtggaaatagcacaagactgaaggatacgaccaaaaactataggcgattgctatcgaaatataaaaaagcttactttgaagacgctggttaaactccccaaagcttaccataagctcagcaaatagccttgtacgagtgtacgaagatccaaacggcctactataatagcatcaaagctcattttggaaacaggctgcgtggtttgataaacaagttatttaaaaagaaggaaaaggcagagagtctcagaggagaaatgcaagcaaacaagtctagtagtaaagcgataaaagaagctacccgaaagaagatttatggaccttgcaatcaggtgaagcttgccatcgcaaaaaaagagatgcctgaagttggtcttttagatgaccaatcaagaacgcaattaaatgattttctctcaagctactcagaggactacacctttcaaaagaactcaatttactatgacgttatggctagtccaaaaaaccatttcaaagccttcttcagacttgctgaacagtctgaagctgaacagacgaaacagtttgcttgtttcccgctacgtaccacctttatttcttgctacatgacgttggatagcaaaataatccattaccatgttctcaagagcaaaaagaatccaaaaacaggaagcaagtttgagacatggggtgccgtcgtagacctaaataaaaggtgttcgcgcatcaaggatttcaaaagcctttgcggttccaaggaattctcgaaacagatggagtcggtgtctccataataacgcaaaacactgatacaagcagaaagtcgcctaaacccaatattgaaaagaaagtagacggtaaccaaacagagcatattgaaggactagatcaagccaacttaaagagcattgaaggcaagtgcgtcttgatagacactggaagacgggacttgatgtactgcatgaaagaaaccagcactgttgaagaaaaacaaacacttatatttaccaagaacaaccgctcaaaatgctcaaggcatttcagatatttaagaaggcgtgctcaaccttttgtggtccagaaagccgaagcaatcctttctagatctaaatccaactctgtagacttgaaaaagtttgtacagtacattaaaacaagagcatcagtaaaaccattttgtacgaatacagtgctcacggcttcaaattgcgtccaaaaaaaaattcattgcgcatctttaattttcaaacagcgcatctttatttggtcaaattgcgcacttgtgatttctcaaactgcgctaataaaaaagtcaaactgcatattttacaactcaaattgcattacttttatttgtacctttttcataagctattatctctttaaaagcaaatatcagatcgataacatgtactcaataaaaggaaaaattatttttgaagatggtcaaggaaatgtttttgatgagagcgggaatgaagcaatggactgggatgaggaagttgatcctcataatttggagaacctaaccaacctaacacgctatttgaataagcaagtacagccggaaatggacttagacagtctggattttgttgaaaaaatgaaaacaatagagaagaaccttgaagagaaaaaaacgaaaagcaataataaaaaaaaatctatgttctgatgaccaaaaaaacgttatttatatatcttcacaagataaaattgttaaacgcagctgaatcggctcgaagagcgggagtgaaagtacgtacagggcaagcgtggtctgcaagaatgaaggaagatcctaactggaatatatacgaaaagcaaacgaatcagaacaaaattggacgaaatcatataattctgcattatccacttcattctcaagttctacagtgcttagttgtcttcttttgttgagataaaccaaaggaggagtctcttcaattggcgttgtttcgattgcttagtattttcttttctgtcgtttcaagaattccaaagtagcttccacatagcttaatgactttttttttgacgcttcatctcctttttccaggcatttttttatctcgcgcagttggacttcactaatactacaaattttgtttatagcctccaatctttcagcttcttctccaattaactggtcaagattatcatgcgcaattgagtatagtaattttactaaagaatcattccttccatagtctaaagtactaatcaacaaagactgagagcaaaggaaatagccaaccgcttgcaaaggatgtaatattttttcttgttgtttcatctgtaaagtcgaagatgtcagtagcaaacaatgtttagcccatccagtgcttagtatctgtctcgcaaaggggaggtcactatctatagacttgctcagaaaaggtgctgtactacttccaattccaaatatcacaatgatagaaagcctgttgtagcgttcgtatgtgagtgtacagtattgaatggcacgtgccaagaatttgtcgtcggcttgattttgtacttcaactagtacagatggaaatgaactcaagggatcgcggggagcatagagaacatcacttttttttttgttataaattctgtaggcgccgaaacatagttatcttctgccgcttctggcacgagagcttttaatagcatgtttatcacttgtttgtcggttaataccagtttgctgatcaaatcagttcctggcctgtgattataagggaggatgcgatcagtgtcatctaaacgattttatgtaagaaattatttgtatttttatagcatgtttacttacctttgtcaatactgaaatagtcagatattatttttgaaaagtaaaagtgaagaaagaaaaagcgtaacgtatccgtattgtatccataataaaaaaaatctacccctcgtctggtttccaagttaagccgagatattcataatcgtatcatcaagctaaatcagcttatctggcctcatatattgaatcaaaataaaccattgggtgaagtagatgattcagcattcatcgatgccttctgttcgcagccccagtggattaattacaaacctaaaccatttcggttgtctctcatacagcgatctctaccatcatcggcaatgtcaccaacaccaacttccaaatggtcacttttttggaaactgcctatttcgcctgaaagccgatctttatggtatcgtctattccaccgtaaactctatagtcaatcacttctttcaagatttgataatggtttgacctcttcacactgtaaattttgctctgctaatactgaagacttacaacacctcttcgtgcgctgtcctacgaaatggagagtatggatagatgctttcaatttctttagtccacatctcactttcactcaagacaatgtatgctcaatcctttggtcttttcagcagtttacttttgttgacaacagtgatatctagactctcagctgctgtgtgctttccgttatccggcgtgcccattgaagatttactattgacgactttccttttattgataaacagctgatcactcatgctttgtcgcaatttgccaccctcaaaaggggcagactcgatcttgactagcatgttcaatcgcctacactctgttccgtttggttcataccgctctcagacgtgtggctcctattataatttataaaaataaactatttatttacaaaaaaaaaaaaaaatatctctccatttgcttacttttgctcgctttttaaattagccaatcataaatttttattcctttcccctcacttgtctatcgggctgaattggttgtaattttgacaacatacctgtcgtattactgttttctgaatagatgtacatacaggaactagcgtcacttgacagctgtccttagatgtaaagtcaaaaacaaaatgcagcattttataagtattgatttttttatgtcaatagaacctgcttttcatcatcaagtattgttttcttttattagagcaattccatgtttccaatcgcgtcttttgtgtttactttagggtgaaagagtaactgcaatgtgatcctatattattatgaaacttatatttcaaaccaacagttaaaaagcgttttcctgggaagaaatctttttaaagcctatgtatatatagtttataaggaaaacatacaaagaatttttatctgcattatactaaatgtttgattgacacacacttattgaaacctgggtacaccggcagcaccagcctggtcaataaaacatgtgctcaacaacctaaaaattcacaaagtatataatgaatccaactctaaccaattattttcatgagatgtgtaatgtactgcttattttactacagttttttccttatctacaagaaatcatattttattacatgctatatgggttcaaggtttgaaaggacctctgctttttcgatacgcgctaatgtttattctgttcatttgtgtaaaaagtacaacattttcaatcaatataaatatcatttgggataaatcccatattcacacagacacgttgattttaaaacgcacggtgcttttatcacagtataagaatgagaaatgaaaacatgaataaatgcatggtttatggattcaaattaaatttaattttattaaaattcaattactagtttgccaaattgattaccacgactacataaaaataaaatgttagtatttctttttgttttccacgaaataaagtacgaacctcatagttaggatggcttgttcaaatgtgtttttatttaaacctttccaaacatgtgaaacaataggcctaatcttgtgtttttcgacaaattcaaccatttttctaaattctactcttgatcccatggtaactcctctgtaatcgatatttttgatgaagtaagatatcggaatattcagtccggtcgttacagtagctgtttgaccataacctacaacgatgccacctggtcgcatcagtttaggatattcagcataaagaggaccaccggcaccatcgatgactgcagacagcacgttattgcccaagagtttctttagttcctccatgcagttttctaatcatataatgtcaatattgaactacaagaatcctcaatttctaccatctttataattcactccgcctatagcacccagctcaatactcttttgaatcttttctggagaagaagatgtgacgtaaacatgggcacctgcagctacagcaaactgaagagcaaaaagtgcaacccctcctccaataccagtgattaggatatgttggcctttttgaactaagccctttgtaaacaaggatctataaagcatgttacgatcaaaattaagctttttttgtacaaaaggctttttggtacctgtaggcagtcaatccagccaatggcaaagcagcggcttctgtcattgaaagaaattcaggacaaggcacaatgtcctccttttcgacaatgacttcttcttttgtaaatgtgccaatcactggcaagagacccaatatgtgaaagtcacgttcaggacctctttcatccgaatcccatccatatccgggattaatcaagacacgttgtcctctttggccatttttcgtaatgtaaccaacgccatcagagcccaacacagaatctaatacagtaccatcatattgatccataaggatccaaacatccctttttaaaaaaaattaaaaaaagtcaagaaggagcctggttttgtttttaccgatggttgaaagcagcagcttgtatttggacagctacttgatgatccgcaaggttctcggaggatttgtgttccttgaattcaacgccgtacttgaattttgaatcaaaaggttgagtttcagtgagaatagcagagaccattttgtttcaaaaggcagtaatgatgtggtaaaggtagtgaaatggttgtatttatagtcattaaaaaaagcggaggggttagattaataagcagtaaacagctgctgtcacaaataccatttttcaaatgaattaataagcgcgctgaattctattaattttaaagcatcgttgatgaatcatatattcagatataatttattagcatcgtttattcaatcaacacgcaagattaaatgaatttgttcgtatccaaaaccaacttgctaatcttttaggacgtatttttcattgtaaatttttcattttgttaactgtagtacaaaagctgagaattgtaaacgttctgatagattttattaataagccttctattatctgcaaaaccaaccaagatttgatgaaaaaaagaaaaggaaagcatattattcgttttcataaagaaaaattgtgtagtctttaattatagtttattgagatcaagctatacagtagcagaactaaggacacgcttaacaaaagctgtcatcgatatccactttttttttaaacctcaacttgttacttgaatatcatgtacttgcgtgaaataaaagggtatttttcataaacatttgaatgtatttatattgctttgtgctttgaaataacagcttgctgttgtaacatttagttattttatgctttttttatatagaaagttctttgataagtagcatgttttagataatgttatattagtttattacaatttgcattaagtaaagtaattgaaatttatagatgaatttaggaaaagagaggaaaaagaagaatgaaggttgaatgaaatataaacattttcgtctaatcctctaagcatccgagtagtctcgcatgtttttggtggaggcctttttggcaattcgtccacctaaactctttagtcctaaactgtgtcctgggttaccgacttgaaggtttttgagaccatcctcaaatggaaggccagtgacagtggcatcctcggttcctgcctttttagcatatcgcttaatgttggtttttgataaattaatacggaatgcagtgtctagtaaattgttgggttcaaggtattcatgtggaatatgtaaaaggaaggcaagaagttctgaattggttggacatgagtgtaagagatgatctaaatattatttaaaagaaatgtacattggtaaatattccatatccttttctcacctttgcataaatctagaatggctaggcttactcgataaaacactttaatgcctaagaagaaggaatgtatgtaagctgaggatctgaatatgtgtccttttcgtgttttttttagtttaccctcaaaataaaacgcgtcccaaacacgtagcactgattcccaaggaagtgtcatggtaaatgcagttaggaaccattgggctatatacatgattggaagtacatcattgttttctaaatgctgagccaactttgggttatgatcctttaataattgcccaatgatgtatgcatcaattcttaactgggaaagtgtaggtgtgaagtatccattcatataccgatcaatagtagccaccaataaccaaaacgagtcctttttttaatacaaaaatagttaatccatcaactctagatttctatttcttttcttttttttctattacttcgacagtcatctgcataagcattagtcctgctaaacggcccatgccttggcaatattctaaatcagaattgtattgggcatatgcttttaatatatttcgcaaattctgttgtcccaagccatccttttccataaattgtgtgtgatcaggataacatcgttcaatatctctttcaatcacgtcgtaaatagggatcctaggcttggacaacaggttttgaaattgatttgatctcttgtagtcatcactaccagccaagaattgccacactttggctctcacagatgctggtattcctccacgaaccaattttttcatctttacatcctttttaaccgttccagcatcgagtttgttgattatatttaaccattttaattcattttctctgtattctttcatagctttggtagacatatttgctctgcatgtaaataaactattagcttcctgggaagataaaatggggtttcagggggtgaggaacaatgaagaagacatgtacctgaatgaaggacgaccgcgtttgataatgaatccatattcatcaacattttcattttgaataaaagttgaattgttattattctttgttggtgtagtctggcttttcctttgtacaccggtgttttgtatattagtagctactgggcgtgcaggagatcttggtggtggtatagggccgtacagttctgtgttctcttcatccgagtaatcaatgttgagtgcagatgtatcaaatggatcatgattattgttgttattatctaatcatatattacacgtataagattaattttatgattattgataagctgcttttttttttctgtacctagattttctccagaataattgtaggaatcgtatgatattcgagactcttttatattatgacttgaagaagtcgaaactgagcctatactttcaaaactcggcttactgacccagtgtctcgatgagggtacgggtgaagcatatcgatcagaattggaagaaaatgaatgaatagagcctcttaattggttgaattgttcttgtctatttttcatcatttctatatcaaattctgttccatggctacttgtagagtttctatattgcgaatggtcggtaaaatcaagatcagcgtcaagcgattctaatacacgaggatctaattctacaaaatgcacggtttctgcattaaaatttccaataacgccttcacagtatccctaaaagatctcttatattggtaaatctttatataaaatacagcattgtgctgtgtttatttaccatgtaaatatcattctctatatgttttaatatagtaatcctttctcctgtaaacaaatttagccttattttatatctaaaatgcctgtgtacacaaaccttgcaaatacatcagttcttcaggagtgttggccaaaatatccacttttgatacacaagcgcctaaaccacctatatattttttaacttggtcgatgtcacaatcctgtattgttgtaggaaacatacctttctcagcaaaggctttcaactcggctaaactcatcgaatcgacatctattgaagcattatccaaagcttctgctggatctttcaatagtcgtgcaatcttttcattaagctcttcgagattagcagaggtatgtcgtgtaatttttggttccatatatcaagtcaaaaaagagaaaaataaaataaggaagttccctccttttatatgaaagaaggaagaaaaaaaaggtgaagaggatggtttactcccaaataaggaagacatgtgcgattaaacaccgctatgagttacgtggagaagaacctttttttattgtttatttaaaaagtaacaaaatggcccccattttaaatgtctaaatcatcatctggatcttcgtcatcaaagtcatcagcagcgtcaggatcgtaatagattaagcctccttgcttcttttgctcctcaacgctaacttctaattgttgagccttgtaataaggcaagaccaaattctcctttgcttttctttgttcatcggtcaatgacaagttgaaggataaattggctgctggatcgggttggttgtctacttgcatctcttcaggttgattttcaacttcgacaacgcctgttaattgacttgctggtaccacttgaagtattccatctctcacaaggaacccatttgtctcataagttactttaccactctttttacgccattcaatatgtacaataccaccctttgtgattgcattggaagtggtagtcaaatatgaaaacgtatcttgaggtgtgaatccagtcagagctgcttgcgtatcaaagtgtgtgcgttctttaagtgcttcaagctttattgtgacagtagctaatttgttgatagattcttgcatacttaagccatttttagttggtaacttgatatcaaagtgatgtctaatcgccaagtgtgtggtgtctattgcttttttagtacaaatgaataaaaaaaaaaaaatacgataaccaaccagttgttaatgattctaatgtttttacaagttgataagttttaaattgagataccataaataatgacgctagagagtcaacaagaatcgtgcagcatggtgtatcatttacttgcttgatcaatggaagtaaaatggagttttcaatatcagttatattgttaatcaattgtacattgggatcatcgtttgctttattcacattatcccaaccatatggatctgtgtagcagtcgatgatgtgtatgtcttttgttgattcaaattgcttcttccaaacttttggtgatgtttctgttaacagcactacaagtgatttgttgtttttaagtgcgcgtttaccaatgtccactaagatggacattcccgataagcgaatagagtcattgattaaaataaaagaagaagacttgtttaatatttgttcaaagcaaagtgtattcattttgcttaaaaaagtttgattatctatttcttgggggctgttactttttgacaaatgcgtgacttgtagtgattttttctccatcattttatcatgcaattctaaacaacggcaaggacaactctatgtaaagagggaatggtgattcaattataggtcttaaatatagcttcgttaatgttaagctgatggctagaataatctcgttgtaatagagtatatctctataagaactttagatattcagcgcgttcacagtagaggcaaaggtgtttacaccaaaagccaatacaatctaggatttgatggtcacagtatctttcaataaactgtacaagatgcaatactattccttcctttgactaccatgcatttttctgtcgtcacagtttgataaacttatttttatatttgccgagttaaattatttatcattgaaattaaataaaaatcaaatatagaatttgaaccttgtagtttcaaatgaaatactgagaataccaaatttaagtcaattcttcattgagctgttgaaatgttgtattctttgtcataaatcattagaattagctattgcccattgtcatcgattaattctagaacatcccataaattggaaggcacttggtttcttacatattggcctagtttatctctttgatatattgtttgatgaagtattcaagcttactctgaacaccttgcttctaattggttttgtctttttttactgatgcatttaataaaaatatcattaaagttatatttcattctatttgcatactaaattcattgtttcaaacatctagctctttcttcctatatttctactattcagggacattcattcaagttactgaagaaaatgtatgcataaaacctgctatgaagaagtttaaaaaaccagacggattgacactcatggacgacaatatgatcattgtggttgctgcggtagtaatgtcacattgaatcagttcgtcaggatcgagataaccatgtggcttaaaaaggaacgctagagtatgcaaaagagttttcttgtggtagggcttgattataaattgtatatgctccagccttcggctggttgtcagaaactacacatttagatggcttctatctgtaacacatttgctttcagtagtagtatattggtggtgataa

SEQ ID NO: 238 - DNA, 11431 bp, unidentified
  source 1..11431: mol_type = other DNA
aaagaaggaaaaggcagagagtctcagaggagaaatgcaagcaaacaagtctagtagtaaagcgataaaagaagctacccgaaagaagatttatggaccttgcaatcaggtgaagcttgccatcgcaaaaaaagagatgcctgaagttggtcttttagatgaccaatcaagaacgcaattaaatgattttctctcaagctactcagaggactacacctttcaaaagaactcaatttactatgacgttatggctagtccaaaaaaccatttcaaagccttcttcagacttgctgaacagtctgaagctgaacagacgaaacagtttgcttgtttcccgctacgtaccacctttatttcttgctacatgacgttggatagcaaaataatccattaccatgttctcaagagcaaaaagaatccaaaaacaggaagcaagtttgagacatggggtgccgtcgtagacctaaataaaaggtgttcgcgcatcaaggatttcaaaagcctttgcggttccaaggaattctcgaaacagatggagtcggtgtctccataataacgcaaaacactgatacaagcagaaagtcgcctaaacccaatattgaaaagaaagtagacggtaaccaaacagagcatattgaaggactagatcaagccaacttaaagagcattgaaggcaagtgcgtcttgatagacactggaagacgggacttgatgtactgcatgaaagaaaccagcactgttgaagaaaaacaaacacttatatttaccaagaacaaccgctcaaaatgctcaaggcatttcagatatttaagaaggcgtgctcaaccttttgtggtccagaaagccgaagcaatcctttctagatctaaatccaactctgtagacttgaaaaagtttgtacagtacattaaaacaagagcatcagtaaaaccattttgtacgaatacagtgctcacggcttcaaattgcgtccaaaaaaaaattcattgcgcatctttaattttcaaacagcgcatctttatttggtcaaattgcgcacttgtgatttctcaaactgcgctaataaaaaagtcaaactgcatattttacaactcaaattgcattacttttatttgtacctttttcataagctattatctctttaaaagcaaatatcagatcgataacatgtactcaataaaaggaaaaattatttttgaagatggtcaaggaaatgtttttgatgagagcgggaatgaagcaatggactgggatgaggaagttgatcctcataatttggagaacctaaccaacctaacacgctatttgaataagcaagtacagccggaaatggacttagacagtctggattttgttgaaaaaatgaaaacaatagagaagaaccttgaagagaaaaaaacgaaaagcaataataaaaaaaaatctatgttctgatgaccaaaaaaacgttatttatatatcttcacaagataaaattgttaaacgcagctgaatcggctcgaagagcgggagtgaaagtacgtacagggcaagcgtggtctgcaagaatgaaggaagatcctaactggaatatatacgaaaagcaaacgaatcagaacaaaattggacgaaatcatataattctgcattatccacttcattctcaagttctacagtgcttagttgtcttcttttgttgagataaaccaaaggaggagtctcttcaattggcgttgtttcgattgcttagtattttcttttctgtcgtttcaagaattccaaagtagcttccacatagcttaatgactttttttttgacgcttcatctcctttttccaggcatttttttatctcgcgcagttggacttcactaatactacaaattttgtttatagcctccaatctttcagcttcttctccaattaactggtcaagattatcatgcgcaattgagtatagtaattttactaaagaatcattccttccatagtctaaagtactaatcaacaaagactgagagcaaaggaaatagccaaccgcttgcaaaggatgtaatattttttcttgttgtttcatctgtaaagtcgaagatgtcagtagcaaacaatgtttagcccatccagtgcttagtatctgtctcgcaaaggggaggtcactatctatagacttgctcagaaaaggtgctgtactacttccaattccaaatatcacaatgatagaaagcctgttgtagcgttcgtatgtgagtgtacagtattgaatggcacgtgccaagaatttgtcgtcggcttgattttgtacttcaactagtacagatggaaatgaactcaagggatcgcggggagcatagagaacatcacttttttttttgttataaattctgtaggcgccgaaacatagttatcttctgccgcttctggcacgagagcttttaatagcatgtttatcacttgtttgtcggttaataccagtttgctgatcaaatcagttcctggcctgtgattataagggaggatgcgatcagtgtcatctaaacgattttatgtaagaaattatttgtatttttatagcatgtttacttacctttgtcaatactgaaatagtcagatattatttttgaaaagtaaaagtgaagaaagaaaaagcgtaacgtatccgtattgtatccataataaaaaaaatctacccctcgtctggtttccaagttaagccgagatattcataatcgtatcatcaagctaaatcagcttatctggcctcatatattgaatcaaaataaaccattgggtgaagtagatgattcagcattcatcgatgccttctgttcgcagccccagtggattaattacaaacctaaaccatttcggttgtctctcatacagcgatctctaccatcatcggcaatgtcaccaacaccaacttccaaatggtcacttttttggaaactgcctatttcgcctgaaagccgatctttatggtatcgtctattccaccgtaaactctatagtcaatcacttctttcaagatttgataatggtttgacctcttcacactgtaaattttgctctgctaatactgaagacttacaacacctcttcgtgcgctgtcctacgaaatggagagtatggatagatgctttcaatttctttagtccacatctcactttcactcaagacaatgtatgctcaatcctttggtcttttcagcagtttacttttgttgacaacagtgatatctagactctcagctgctgtgtgctttccgttatccggcgtgcccattgaagatttactattgacgactttccttttattgataaacagctgatcactcatgctttgtcgcaatttgccaccctcaaaaggggcagactcgatcttgactagcatgttcaatcgcctacactctgttccgtttggttcataccgctctcagacgtgtggctcctattataatttataaaaataaactatttatttacaaaaaaaaaaaaaaatatctctccatttgcttacttttgctcgctttttaaattagccaatcataaatttttattcctttcccctcacttgtctatcgggctgaattggttgtaattttgacaacatacctgtcgtattactgttttctgaatagatgtacatacaggaactagcgtcacttgacagctgtccttagatgtaaagtcaaaaacaaaatgcagcattttataagtattgatttttttatgtcaatagaacctgcttttcatcatcaagtattgttttcttttattagagcaattccatgtttccaatcgcgtcttttgtgtttactttagggtgaaagagtaactgcaatgtgatcctatattattatgaaacttatatttcaaaccaacagttaaaaagcgttttcctgggaagaaatctttttaaagcctatgtatatatagtttataaggaaaacatacaaagaatttttatctgcattatactaaatgtttgattgacacacacttattgaaacctgggtacaccggcagcaccagcctggtcaataaaacatgtgctcaacaacctaaaaattcacaaagtatataatgaatccaactctaaccaattattttcatgagatgtgtaatgtactgcttattttactacagttttttccttatctacaagaaatcatattttattacatgctatatgggttcaaggtttgaaaggacctctgctttttcgatacgcgctaatgtttattctgttcatttgtgtaaaaagtacaacattttcaatcaatataaatatcatttgggataaatcccatattcacacagacacgttgattttaaaacgcacggtgcttttatcacagtataagaatgagaaatgaaaacatgaataaatgcatggtttatggattcaaattaaatttaattttattaaaattcaattactagtttgccaaattgattaccacgactacataaaaataaaatgttagtatttctttttgttttccacgaaataaagtacgaacctcatagttaggatggcttgttcaaatgtgtttttatttaaacctttccaaacatgtgaaacaataggcctaatcttgtgtttttcgacaaattcaaccatttttctaaattctactcttgatcccatggtaactcctctgtaatcgatatttttgatgaagtaagatatcggaatattcagtccggtcgttacagtagctgtttgaccataacctacaacgatgccacctggtcgcatcagtttaggatattcagcataaagaggaccaccggcaccatcgatgactgcagacagcacgttattgcccaagagtttctttagttcctccatgcagttttctaatcatataatgtcaatattgaactacaagaatcctcaatttctaccatctttataattcactccgcctatagcacccagctcaatactcttttgaatcttttctggagaagaagatgtgacgtaaacatgggcacctgcagctacagcaaactgaagagcaaaaagtgcaacccctcctccaataccagtgattaggatatgttggcctttttgaactaagccctttgtaaacaaggatctataaagcatgttacgatcaaaattaagctttttttgtacaaaaggctttttggtacctgtaggcagtcaatccagccaatggcaaagcagcggcttctgtcattgaaagaaattcaggacaaggcacaatgtcctccttttcgacaatgacttcttcttttgtaaatgtgccaatcactggcaagagacccaatatgtgaaagtcacgttcaggacctctttcatccgaatcccatccatatccgggattaatcaagacacgttgtcctctttggccatttttcgtaatgtaaccaacgccatcagagcccaacacagaatctaatacagtaccatcatattgatccataaggatccaaacatccctttttaaaaaaaattaaaaaaagtcaagaaggagcctggttttgtttttaccgatggttgaaagcagcagcttgtatttggacagctacttgatgatccgcaaggttctcggaggatttgtgttccttgaattcaacgccgtacttgaattttgaatcaaaaggttgagtttcagtgagaatagcagagaccattttgtttcaaaaggcagtaatgatgtggtaaaggtagtgaaatggttgtatttatagtcattaaaaaaagcggaggggttagattaataagcagtaaacagctgctgtcacaaataccatttttcaaatgaattaataagcgcgctgaattctattaattttaaagcatcgttgatgaatcatatattcagatataatttattagcatcgtttattcaatcaacacgcaagattaaatgaatttgttcgtatccaaaaccaacttgctaatcttttaggacgtatttttcattgtaaatttttcattttgttaactgtagtacaaaagctgagaattgtaaacgttctgatagattttattaataagccttctattatctgcaaaaccaaccaagatttgatgaaaaaaagaaaaggaaagcatattattcgttttcataaagaaaaattgtgtagtctttaattatagtttattgagatcaagctatacagtagcagaactaaggacacgcttaacaaaagctgtcatcgatatccactttttttttaaacctcaacttgttacttgaatatcatgtacttgcgtgaaataaaagggtatttttcataaacatttgaatgtatttatattgctttgtgctttgaaataacagcttgctgttgtaacatttagttattttatgctttttttatatagaaagttctttgataagtagcatgttttagataatgttatattagtttattacaatttgcattaagtaaagtaattgaaatttatagatgaatttaggaaaagagaggaaaaagaagaatgaaggttgaatgaaatataaacattttcgtctaatcctctaagcatccgagtagtctcgcatgtttttggtggaggcctttttggcaattcgtccacctaaactctttagtcctaaactgtgtcctgggttaccgacttgaaggtttttgagaccatcctcaaatggaaggccagtgacagtggcatcctcggttcctgcctttttagcatatcgcttaatgttggtttttgataaattaatacggaatgcagtgtctagtaaattgttgggttcaaggtattcatgtggaatatgtaaaaggaaggcaagaagttctgaattggttggacatgagtgtaagagatgatctaaatattatttaaaagaaatgtacattggtaaatattccatatccttttctcacctttgcataaatctagaatggctaggcttactcgataaaacactttaatgcctaagaagaaggaatgtatgtaagctgaggatctgaatatgtgtccttttcgtgttttttttagtttaccctcaaaataaaacgcgtcccaaacacgtagcactgattcccaaggaagtgtcatggtaaatgcagttaggaaccattgggctatatacatgattggaagtacatcattgttttctaaatgctgagccaactttgggttatgatcctttaataattgcccaatgatgtatgcatcaattcttaactgggaaagtgtaggtgtgaagtatccattcatataccgatcaatagtagccaccaataaccaaaacgagtcctttttttaatacaaaaatagttaatccatcaactctagatttctatttcttttcttttttttctattacttcgacagtcatctgcataagcattagtcctgctaaacggcccatgccttggcaatattctaaatcagaattgtattgggcatatgcttttaatatatttcgcaaattctgttgtcccaagccatccttttccataaattgtgtgtgatcaggataacatcgttcaatatctctttcaatcacgtcgtaaatagggatcctaggcttggacaacaggttttgaaattgatttgatctcttgtagtcatcactaccagccaagaattgccacactttggctctcacagatgctggtattcctccacgaaccaattttttcatctttacatcctttttaaccgttccagcatcgagtttgttgattatatttaaccattttaattcattttctctgtattctttcatagctttggtagacatatttgctctgcatgtaaataaactattagcttcctgggaagataaaatggggtttcagggggtgaggaacaatgaagaagacatgtacctgaatgaaggacgaccgcgtttgataatgaatccatattcatcaacattttcattttgaataaaagttgaattgttattattctttgttggtgtagtctggcttttcctttgtacaccggtgttttgtatattagtagctactgggcgtgcaggagatcttggtggtggtatagggccgtacagttctgtgttctcttcatccgagtaatcaatgttgagtgcagatgtatcaaatggatcatgattattgttgttattatctaatcatatattacacgtataagattaattttatgattattgataagctgcttttttttttctgtacctagattttctccagaataattgtaggaatcgtatgatattcgagactcttttatattatgacttgaagaagtcgaaactgagcctatactttcaaaactcggcttactgacccagtgtctcgatgagggtacgggtgaagcatatcgatcagaattggaagaaaatgaatgaatagagcctcttaattggttgaattgttcttgtctatttttcatcatttctatatcaaattctgttccatggctacttgtagagtttctatattgcgaatggtcggtaaaatcaagatcagcgtcaagcgattctaatacacgaggatctaattctacaaaatgcacggtttctgcattaaaatttccaataacgccttcacagtatccctaaaagatctcttatattggtaaatctttatataaaatacagcattgtgctgtgtttatttaccatgtaaatatcattctctatatgttttaatatagtaatcctttctcctgtaaacaaatttagccttattttatatctaaaatgcctgtgtacacaaaccttgcaaatacatcagttcttcaggagtgttggccaaaatatccacttttgatacacaagcgcctaaaccacctatatattttttaacttggtcgatgtcacaatcctgtattgttgtaggaaacatacctttctcagcaaaggctttcaactcggctaaactcatcgaatcgacatctattgaagcattatccaaagcttctgctggatctttcaatagtcgtgcaatcttttcattaagctcttcgagattagcagaggtatgtcgtgtaatttttggttccatatatcaagtcaaaaaagagaaaaataaaataaggaagttccctccttttatatgaaagaaggaagaaaaaaaaggtgaagaggatggtttactcccaaataaggaagacatgtgcgattaaacaccgctatgagttacgtggagaagaacctttttttattgtttatttaaaaagtaacaaaatggcccccattttaaatgtctaaatcatcatctggatcttcgtcatcaaagtcatcagcagcgtcaggatcgtaatagattaagcctccttgcttcttttgctcctcaacgctaacttctaattgttgagccttgtaataaggcaagaccaaattctcctttgcttttctttgttcatcggtcaatgacaagttgaaggataaattggctgctggatcgggttggttgtctacttgcatctcttcaggttgattttcaacttcgacaacgcctgttaattgacttgctggtaccacttgaagtattccatctctcacaaggaacccatttgtctcataagttactttaccactctttttacgccattcaatatgtacaataccaccctttgtgattgcattggaagtggtagtcaaatatgaaaacgtatcttgaggtgtgaatccagtcagagctgcttgcgtatcaaagtgtgtgcgttctttaagtgcttcaagctttattgtgacagtagctaatttgttgatagattcttgcatacttaagccatttttagttggtaacttgatatcaaagtgatgtctaatcgccaagtgtgtggtgtctattgcttttttagtacaaatgaataaaaaaaaaaaaatacgataaccaaccagttgttaatgattctaatgtttttacaagttgataagttttaaattgagataccataaataatgacgctagagagtcaacaagaatcgtgcagcatggtgtatcatttacttgcttgatcaatggaagtaaaatggagttttcaatatcagttatattgttaatcaattgtacattgggatcatcgtttgctttattcacattatcccaaccatatggatctgtgtagcagtcgatgatgtgtatgtcttttgttgattcaaattgcttcttccaaacttttggtgatgtttctgttaacagcactacaagtgatttgttgtttttaagtgcgcgtttaccaatgtccactaagatggacattcccgataagcgaatagagtcattgattaaaataaaagaagaagacttgtttaatatttgttcaaagcaaagtgtattcattttgcttaaaaaagtttgattatctatttcttgggggctgttactttttgacaaatgcgtgacttgtagtgattttttctccatcattttatcatgcaattctaaacaacggcaaggacaactctatgtaaagagggaatggtgattcaattataggtcttaaatatagcttcgttaatgttaagctgatggctagaataatctcgttgtaatagagtatatctctataagaactttagatattcagcgcgttcacagtagaggcaaaggtgtttacaccaaaagccaatacaatctaggatttgatggtcacagtatctttcaataaactgtacaagatgcaatactattccttcctttgactaccatgcatttttctgtcgtcacagtttgataaacttatttttatatttgccgagttaaattatttatcattgaaattaaataaaaatcaaatatagaatttgaaccttgtagtttcaaatgaaatactgagaataccaaatttaagtcaattcttcattgagctgttgaaatgttgtattctttgtcataaatcattagaattagctattgcccattgtcatcgattaattctagaacatcccataaattggaaggcacttggtttcttacatattggcctagtttatctctttgatatattgtttgatgaagtattcaagcttactctgaacaccttgcttctaattggttttgtctttttttactgatgcatttaataaaaatatcattaaagttatatttcattctatttgcatactaaattcattgtttcaaacatctagctctttcttcctatatttctactattcagggacattcattcaagttactgaagaaaatgtatgcataaaacctgctatgaagaagtttaaaaaaccagacggattgacactcatggacgacaatatgatcattgtggttgctgcggtagtaatgtcacattgaatcagttcgtcaggatcgagataaccatgtggcttaaaaaggaacgctagagtatgcaaaagagttttcttgtggtagggcttgattataaattgtatatgctccagccttcggctggttgtcagaaactacacatttagatggcttctatctgtaacacatttgctttcagtagtagtatattggtggtgataa

SEQ ID NO: 239 - DNA, 21056 bp, unidentified
  misc_feature 1..21056: note = Fanzor polypeptide
  source 1..21056: mol_type = other DNA
tcttgtcgtataagctgccgagataaatgactgatgccacgatatccgatgggctttgtcgtcttgtcgatgatcccgcattacagatgctcgcgtacgccttcttgcctgccaagataacttccctcaggatgaccttcgatggttcgaacagatatgggaaacaattttcgagacttgtttcgatttcattcacaagtcgtttgtacactttgtttactttgtcctcagtattgcgaaaaacatacttcttcaagttgagtcgagtagatgatgtcatctatctaatctaatctatctatctaatactactatgagtcttctgtgtaagacaaaccctttatactatttttcatgttgtgtggggggcaaagcggattgtcgtactgcggttaaggggggcccctcccaatgaatgtacatcccatcgaccatgcgtgagacggccgctgattcggggacgcgacaaaacattattttttttttcttccgcttactttttcgctcctgcatttaggttcgtcttcttcgggtaatgggaacatctcggcatggcaaacccgttttggcagtgcctcggccgtcgtgcgtttctggacgaacgtgtggaacgtgttcctcagcacgcggatgtaacgcacatatgtcgataagaatgcgtcgatacctatgcgtggacagttcgtgtcgtgctcctggttgtgcacatagttttggaacacgagaattccgctcggatgaaggagtcgcattgcgtgtacgccgctctcgagagcatgcaccgaatcttttgcgtctacgtaaacgatatcgtacgttccacctgaggacgaagaattagaaagggatgccagtgacgtttctgggggcagcactgttgaattgcctgctttatccacaactttttggagcgtgtttctcacgttttcaggtgggttccacactgcctgtccgcgctcgtacacacacggtttgtaatcgaacgggtcgaggacggtggcagtgtccttaggtcctgtgagtacgttttctattagccactgcaggaccctgccttcatatgcgcctacgagtagcgcatgcactccattgttgcggtaggatgccttgcccctccatttcgggtcaagcagaatactctcccatgcgggtatgtgatccgtgaaccagtcgattctgaattgggccatttgtaaatggggcggaaaaaaatgttgagaacaactttgtaatggcggcggcgtctttctgtcgaaaaaaaaggcttccaatgtaaatcgttgcacatgttcctagcatcggctgctatattcttcgtcctatgtctgttatcgtacgacaagatgctccccaaattttcgagcaatctgtatcgccgtctgaagatccatgtgtccgacccagacaaaaacacaacaaagttgacacctttgtattttttggctctaagcattcacggtaatatgacggcggcttttgctttgtcattgggagttctattttgctccaccttctgcattattacattagttgtgtccaagtacatgattccaaatgtacgcaaccggttattgaatatcttagatcttcgccggttattctccatattgtcatctagccatcgtgatctccacattgcgatggtagttgtgttggtcagtgttattcttgtcgggacgatggtattcataaaagacaccgattgcaatagcaaggaagaggaaacattggcgaagatacaataccaggtactgtttacaaatatcaatgccgcattcatggcgcttattgttttactgatgtacacaatcatgaacatcaacactacagtctagcttgagacatcagcaccaaggaatcacaattccgctccataccatgtttcgcagccagtcaaaattggccgggaggcaggaacgcccattacgatgtgatgcgatggatgatctggaatcagggtttcatcatcacagtggacgcgaaataacaaacacactgcatgaatgcatctgccaagtcgtccttctttttctcctccaagaactcggacataatcgagtgatccttgatcacatcgtgaagaagaacgcacgttcgaacgacggcgtcccccttgttcagtgcatacttcctacgttgctccggcaatgaacttccacgtccacgtcgccccctgctgctttcaacagttccactaggtcctcctctattgccacggttgtcgtcctctagaggggcatcggagtcgattgacatatcaatcaccactggtactgttgcaaagcgttctagcagctctctcagaggtggtaatgaatccattgaaacgggtaagcaatccgtcttcagctttattacaggactcacaaacacgacgcgtccgacttgcttcctcaatacaaactcgctgaagtactggcacaaaaacatttgaacggccatcatgatcatgctgcgacgcttgggttgtctctcgataaggacgtagtcgatgttctctccttggccaccttctctcaatttggttccaaaccgcttctccatttcggcggtcaacacgagggcacacctttcagggaaattggatacagacgaccctccgagatcaatcacctcccattcagtgacctttccggacgctatcgaattttccggaaacgacattcgacagaaagcgaggttcctcgttcccacgtcaaacgatagaaatgaatgaggcatggtgaactctgatggtttgatttaactggactccgtatgtaggcgaacaactccttaagtaccctccctcctgaataaaacaatcagtgtttaagcggtactactttgtggatgcggcgcaagctggaatacttcccccgacatctagagatccatccacacgtgcaaaagtacgtttaccgactctcaagttcgagttgcacttgctgttgctgtttgcggtgacatgttttccatgcgggcgctgatgcgtatggtgcgggtcgaacgagaaccacgcggaatccgatggggcgttggcgatccgctcgttcgtgcgacccatgtgcacccgcattggatgttgcggttgacccacataatcgaggtagaaatcgcgaaagacgttatccggacagagaagcgaccaaggtgacgctgaagcggtggtctcttgcatagcctcgttcctagcattatcacgcgccactatgagacgtgtgcacaattcctgttgagcatcgctccgcatcgaatatccctcccactcacacgcaatctgcagtgctcttgcgttcaggagcgtctgcgtgaagcttgctacacgtaggcagacctcatctggaccatcattgagagtcatgaacccgcacgacggcactacacgtgtgtggctgtcaaatgctatcgcaatgatatgaccgtgcaagctgacttcgctacgtccgtcaagcagccctaacagtgggcggaacgcgcgccactccgtgtctggtgtaagatccgtaagggcggcgcgcaaggcggtgatatcctcgatgaacgcggacgtgcacatgacagagacatcgcactcttctgcaacatgatgattgtcggatggcggtgataaggcattcatgaagtgatccagagcgcaccctcccaccattacgcacctcgaagatcgggatgcaaagaaggcgcgagcaagggcgcgcgcacgaaatactagaagatgatcgtcattgcatgaggcggcgggtccattcatgggtgggtttgggtgttcttgttcgacaattcgtagccctgattctacccaattcgtttccgacgtgaagttctgctcgatgagtagcatgcgtctcaccgcatactctaggcgccaatgagaattgaacgggtcgcagagcatgttcatgatgtccagcttagcaaactgcggatgtacaacctttgatttgggaactgcttccacacatggaatcttgtggtagatggactctggaacgaacgtcacatcgcacatgcgtacgaattcgatgctgatcgtgaaggtgctgtcatgctgcgcctccttgccgcgaacaaactcgtgattcctagacaacgtcatacacaactcagcaacgtcctcaagaggcgtggggctgtagaactcaacgtctatgtagtcgtcatcatcgttgtagagcccttctttgtctgacgccacgagaagagtgtgtatagcatagcccccgtatattatgcgaccgcgttctcgagcaaactcaacgatgactttcaatgcagcttttcgctctgaagatgttggacgcatatgcatcgaactagcaacttgagctgatcgggacaaggcaacagcattgctacaaatttcttcaacatctgatgaataaatcaatggggggatgagtgtaacaccggacatatctttcacatgtccgttgggttggatgtgaacgattaaagaccctcttctttacacttgttctcaaataaagttgtaatgtaagtttatttcgcaaccagtaaaaatcgcccgggaggctggaacgcccattaacaactgtattcagtgtaaacataactcgattaattaagtgagttgaatgtgaggtgaatgtgaggtgattgtgaagaacaacaaacaggatgaaaacaggattcgtgtacgctctcttggagcgcgagtttacaaagaccaaagagcccgtcataaaaataggtatgagtagaaaggcaaacccagcagacagacttcgagggtaccccaagggtagcttttacatttgggtacgacacacgccgtccgcgtcaaaggacgagcgcctgatcctcgcgacaatgaagatatggttcaagcagcgaacggacttaggggcagagtactttgagggagaccaaaacgtggttactggcctgctctccgcgctaatgcaggcccgggagagcatgatgagcgaagagtcggacgatgatgttgtgtcctcagattctcctgaggaccaggggatcgagaagccagagccccagcaaaagcctgcacctgtcgacaacatcgctttgttcgatgcgtttgccagagagaaatttcctacactcaacagggccagcatcccgtgcgcaaagatgcatgcgatgttttcagacttctggaatattaacacggaggctgtgatgcgtgtgggaaacacatggattgaacgccagtgcaagtcgcgtctgggcgcaacgctgaggccgcatacagaccccgatacaaacctaccaaatcccatgattgttttcccacccttgttgttcgacaaggatcgccacaatgtaccaataccccatccattgttcacgaaatattcttacagaagaacgtaaacaaatggccgtggttcactaatattttgaggaagttgattccgcggtgctgatatacactcgaaccggagtgtacggtacacattgcggtgtaacctaatgttgtcgcgaccaccggagggggaccgagtggtgtctacaacaatacgagtttttattcatcaacaacaacagagctgctgtgggcaaatggaagaggtcgtcctagacccatcaattccatgcagtgcagccttgcgattgtgagagcagaagagcgatcccggtccgagtaaatgcatgtttctggagagaatcgcagtcctcgtacctctgggtaccgctcgatcgatttttgagaatcgacaagggaagtggcgaagccacccctcctgtgcttctcttgtgcgcctttacgtttattgtacaaccttacccctaagtggtcgcaatcagcgacctttggcatcgttttcgatttagtgtgaccaaaacgttcaccacccaacctaagattcacgtctgctgaacaaacacttgggatcttgtaaacacgttctttttctttacccgtctcccacgacataagagtcgttttgaactcatctgtcacagaaacgtcctctttgaaaattcttttacacgatgcgaacatggccccggtgggaactgcaacttctccaggtccagtaggcttcagtttcgtgatggcagatccgtaggccacgcaaaccttcataccaggaagttctttcatcatgcaccgcttgatacccgcccagaaagagtctttgacctttcgttttccgatgtaacgctgcaagttgtcacgggattctcggcgtcgcaaagccaatctccaccactcgtcagaaaacttagcgtaatttgacaagtacgcggatatcttatccgtcctcgatgtactcaaagctgctccattttcacgcagagactcccacataggaatcatgtcagcaaaacgcagttccttctgccttgtctgcttcttgatacccgacttgtgttaaaatgcaccacgtgtcagcttccatgtcttatttttatcgtctgccaaatacgttaccgtagcgatgttgctccgtcctgggtccacacccaggacgacgatacccatatcgggcaatatcgttttaagtgagccgtcgtatttttctgcgatcttgataccttcttctttacgaggcttcttacaggtcttcttcaaatctgagacaaggacctgtactgtcttgctgtactgcatgctcaaagagactccgtcagtacagatgctgcagtcgaaaacccacccattcttgacaggtggttttctgaagaaggaacctgcgactgtttttcgggcgttcacaagcgtgtcatacaaaccctttgcatgtctgtactcgtcagtagccttgatatccttaacatcatcatcgtactgcttcaggaccgacttgtatgcatcccattcaccaggaccacatgattttttcttcttctgtgcaggcctctggggcaacatgaagctttcgggattctttacatgttcccacttggaaagctcaacgatgttctggtcattggggaacatgtgcctgaacaggttcacgagggtcttcaggtcaaggcgaacatgcacccgttggacattgaagatgggcatcaatcggatacgacgtgcatccatatcctccaaccgtgtctgtatccaataattaaaccggaccatggtcggaaagtccatgtctttgccatagttatcataaactcgacttccatctggaacactcagcatctccctaacttcattgacgtactcttgaacagactctggccatccctccatgttttggacttcttgctgaatagcctgcatcacgtcgtatccccgaatgatcttcgatgtgtccagcgtcttcggggcatttaatttattaaagtggtggaagtgagtctggccagacgtggtatcaaaggaacccatgcgttgtttgacacgacagtgctcaatgtgtgacctgcatagttcaatacctgatcgaaatagatcggataagacttgatgtagtcagcgtcgtcattaccaattacatcgccgatggagtccttcacagcttcgtacgatatcttgctttcctcatcagggaagattccgtctaccccgatacggagccaatccttccagtaggtatctttcatgttgtacaggtctggaatatccagacctttctctaatagactcgtgatgtggaaagtcagcacaagactggaccgccgtaacatgcggctcaccacattgacgagctggtccacatgctccctaaacttaccgaattcttcatcgtcaagactcattgccttcttcagggcgcatttcacgacacacatcttttccaccgtcttgtattctggagggggtctggcgatgagaccattgtcttcgcataaacggacaatatcgtccttcttgtcctttgatgagtatgctacttcggccaattttagtagctccttcaatttagcgactgtcggaggtttcgttgccatcttacataatttatacatcacagaactctttatacaaacatcacatacgtgttccatacgtggtcaaaacaacccataatgattttatcagtgaggttgctgaatgctaaggaaatcatatcagacacgtgcgtctttgtatcgattcattcattcgtaaacacagaagttttgaacacacacaagtcagcgaccattcttaacgccaattttctatcgtacatttccatctgatatatgtttcattttactgttccgccaactgtagtattccgtcgagtgtagagagagtcattccggaggatcgtcccgttgaattttattttttttaaatttgaatttgaattttatttttttgtgttcgtgttccactataaaatgtccctagctgtatggacatcattcatgcctgcaacagcgcaaacaggtggtcggaatcgcaatcgaaatcgaaaagaaaaaaaaagtgtacaggtggaggagcagcatcatgatggcgatggtcatcgcattttggatagaaatgataacaacaagaattctttagatagccattacaaaaagaagcagcatcgtcaggatcgatcgcatagtagtagtaagagtaattacgtgaactttgcaagtatacaatgggttaggttcgagaacgtcaaggaggacgcgactgtcttcaactttatcgaaaagggtggtggcaagttcgtgacatgggacatggacgagcacgtcaacgacatggtgggcaggatcacatcgagccctctggaagaattcttcccgagcggtcctttcaaggtattcttcccaatccgaatcaataacggtgaacttagaggcgattttttcatccaacatgcatttgaatacccccccacgtacctcgccatcttcaatgcggtgcgaaccaccattataacagccatatcgttcgtcatagtgagcgaaggagaagacgatggtgtagtagggaacaaacaaaatgcagagcaatacctttcacaagttatcgtgcaaaaccttttggtgcgaatcacaggtggcgcaagacatgtctatgtgcactgggagaagaaacgacttaacgacgatgcactgacccgtcgttcaatgaaacgcctctccatgtctccgattcccatcaagtaaaaaaagattcgtgttttatacagttgttctcaaataattttgggacactcagtataatttgaatgatatcccctgaaaccaggtacagggtccgtggttcactacaaatattttttgaggagtctcaggaaggtttgtaatatatacaacgtgtccaagagctcactacatagatgggtcaatgctgatcaggtgggtaaaagtaagcgtttaaaacgaaaaaggaaagaattgtccatgcttccacgttccacgatatccaataatattgcagagaaccccttcataacatgcaaggattttgtcggtataatttgcaagagttgtaatgtgagattatcgatcagtactgcatcgagacacataaaacaatgtggattttctaggaagaaggcgtttcccacagttctctacggacattcaaaagaaaatgtagaaatgttttgtgacaagtacagataaagctctaacgttgtttgtatcgacgaagcaggattttacgcttgagaacacagcaaatatggatacagcaagatcggttctcgattaactacgaagacaatgagtaacctccgtcgtgtgaagttcactttattactcgctatttcatctcagggaataatagattatcagttattggagcacaattgtaaaaaagaagatttcattaaattctttaaaactttggtcatcccaaagaaaaccacgatcgtcatggataatattcggtttcaccattcttcagaaatcaaggatatatccgaatgcaaagggtggaagcttttgtacacccctccttattgccccagagctaatgcgattggacaaatatttggaagcatgaagagagactacagggcatcatgtccattgacgtcaacctgtaatttcgattacttaatgcaaatatgttgtgttctagaaatgtggaggtataaagacttgtcaaaatatatgattaatacgagagattgggttaggaatgttcgagagagcctgtctgcagatccagattacatcaaaacgttttcggggtacaatttgtgatggagaatgggatcggcgagtcatcatcgttggtacatgaggctgaccaacatgatgacgttgcagaacttgtcgattatgaaggggaggaagacggggagtgtgcacctgggcgagcgatttgtgtggtcaagatgaaattgagtacctttattccccatgattggcttcgtaacaagatagacacactggtactggacatgaacaagttgcttggagagggttatattttcgcaaatttccacattgctcgtctttttgagaatggtatcgctgtccctcccgtaaatcgcaacttcttctaccggtgccttattgcagtcagtaccaacaaatgtaaggggtcgactcttggcgaagacttcgagagtagtcggcttctgttcgacttgttaagagagccggggcaatccaaagttgacattcgggggagcgtgaagaaccagatcattgcagacctgtctattctcatggccacaatggcctctaaccatctttggaccaaccttgagcgacgcataacgacttacttgaagtggaagtacccacagattgcaaagcgcctgcggtcggacatcgtggctgcattgatcaagtgccctacaaagaatctcgacgtcatcttcaagatgagccctcatacaacaaagctgccaaccaagcttccaacatctagacttcgatcggcaaaaagtgcagttgctcttgcgaagaagagggtcggtaggaaggaaccagaaggatcccctttgcgtgttaggttgactaaacttcaagagaggcttgaaaagttgagcgaagcttggctctcctcgaagaaccttagggtggacgcagataacgaaacgcttctttgcacgcgaagtggcattctgtctcaggggggttctacctttaccatccggaaacacttttgcgtctcgggctcacatgaccctgcctctgtaccacaagatattgtcggagaccatcgaagaaaaacgaaaaactaaaaacgaaaaacatcgcacattctcgttgttgccttacaaatctggattcactctgtcgcacattccgatttcgaaaatggcctttttctatatggtcaacgagtgccactttgattcatgcaaggcagacgttgcttccaaaaaccatcaaggaatatgggagcgattcgcaaacctcaagaaagtggagacagtttctcggaagttcggttaccgcattgtgacagacggctttgcagtcagcatcttgatgaataagcctacgtgtctgacatgttcgatgcctgcagacgcgttctctacgcgggcgcatgagtacgtgacaacagacgagggtggcattgtatccttccttgacaatgtggtcgtggctgcggtagacccgggtgttactgatatcgtgactgtaacaggactcaacggaggtaccagatcgtacagctcggcgcaatattatcgcaagggtctgatcttcaagtctcagcgtcaaactgacgtttggaacctcgagacggctgatatcgtcggtggtatcattccggatagagactcttcgagttctgaacagattggtgcgtacgccagattctacatgggtgccgccccaatccttcttgcccatcgtgcttccagggggtaccgaaacctccgctttcgaaggtactgcaagaaacagaaacttattgttgagattgctgacttcgtagctccgagaaagaagagcgctaaggtactcgtcgggtttggtgattggaaaggtctgggggcgacgccaatctctaggcggacttgtggccctctccaagctattcgtttcgagcttcgtagccgagaaaacgtcatcatggaggacatcgatgagttcagaacatctcaacgatgcagctgctgtgagaaccacctttgcaacatggtggcactcactcatcgtaagaagcaagacggtacaggttgggaatgtacagaaggacgcaagcggattcataagattctccactgcaaaagcagtcaaagcggagcgccacgccaacagagcggtggtatgcttcactgcgggaagacttgggaccgcgatgtgaacgcttccagaaacatcctgatgcttacacttcaccaagtctttgggagagagcgtcctctcgcgtttcgccgagacgcgccgagaagttcctcgacaaccccacccccaccccctgatactgatatggggacacagacggttgaacggtttaccaaagaggctactcggaatatcttcgagaacctcttcaaccttctgcaccccccaacgttgcccaaaagcaacgatctgcagtctggatgattataaagtttcccactttatttaagaacaactgtatttaagaacacaacacctgtaaaccatgatcgacgccacaagtaaccgattgagaggggcgaacattatagaattcgcgagcccgaatcttaattcagagcatgtcgtgcaattgttcgatacattcataggggggcctttcacaatcacaacagaggacggagatgaggagattcagcaaagcagcacacgtgtatacgttgctagaacccataaatatgataacatgggtaattgtaacaatggtaattgtaacaagaaatcgatattgcccatccccgttattttggacaatcgagcgtttgcgtccgcttctcccagctcgcgagcgttgtacagtttgttccttgtattcgcctctcttaaacacggcaacgatacagcttccctccgcgaggaaataagaaaacaattcaaaaaggcgttctttgttcatggggcatcatcatccattaaaactaagtcgagcgcgaacgtgcgcaccgtggtccggtgcatgaatggctacctccgaactgcgcccctcgaccaggcaactccctcagatatcgtggtcacattagagcagtgcccctctctcaacgctatccggtaccttccgtccacacatgagtgcatggccgcaaaagcgttggctgtagtcatcgcccatgcatctgtaaacggagaaatagatcatgtgctcccctcacttgacgcagtggcagccatggtgcttcctaacggctcccgtgtcctcctgcccactgccaacaagagcatcgtcatcaaacaaccgggtctgagtacgaaaaaaaatgttatctcttagtattctgtccatcccaactaagtgaatccatactacacatgaatcggcttatatacgacgcatgcgcttactcgacgagtctcggtgagagcacggcccctgtagagtacatgcttgacctctcggcgcacgagcactgcgataagtgccgtgtcgatatcggtatcgtgggcggaacgaacgtttcgcatgtgaacgggacgttggtggacatcgagaacgatctaaaagggatcaaccgccccagcaccaagtgcccaggcttcaacttcctcccgactgccgacggaagcatccagggaaaggaatacatcaagcctgtgtgccaccctcgcatcgacatgtcgtcccagaaccaccttagggtctgtcagttttcaaggtacccagaacgcgtagagtctgctccaccggcgcctgttcaattcacttgtccctcccgaacaaggcattgacatgcaacaactttaagaggaaatttatattttcatgaagtaatcgaaaattatttgagaacaaatgtatgatcatgacaattgtactaatgaaaaatcaaccctccgccacaagtgccaagaccaagaccaagaccaagaccaatacttcattaggaaaggacgaagttgtgtataattcatgggtagttcatgatcacgtcccgaacacacaacctccagaagcgtgtccgttttcgtcgtacgacgaacttaatagcttgttgcttcggtacaataacatagtttgcggttcttgcttgaatcctgcccccctgctcgagataatcgataggaaggattacgacaacctttctgagaagcataggatgttgttgccttatgtcgtgattcaaatgtcatgcggtgattccttggtgcgtggtatcaataggaagaagatcaccgggaacgaaatgattgaaacatctctgaagaagttcatcgagtccaatatgaaatgggtatctaataaggcaaacatccacgtgtccaaggacggtcgcaaaaggatcgatgactacaagggaaaggagtaccagaacgtaattgttgcaaacgcattgcttatgttgttgcttaatgcgttggttacagggaacgaagagattgtcgcgtttgaaaggtttgaggcaatcatgcatgcttgaaaaattcacaccaaaacgtttccacctccacagactgatgttcgtacacacacagaagtttttaacccaattcagcgaccattcttaacgccaattttctaacggagatgtcgtacatttatttatttccatctgatatatgtttcattttacggttccgccaactgtagcatgcaagagcttaaaaatacaacttctatcgcagttccacccttgactaaggcggtattgcaccccgtcctaagggcgttgactgactcgaatcgtctcgactttacgcagcttacggatcgcatgtacttgcaaccgatcgtcacgggtggggtaaaggagctcgatcgagcgatttccaccaagaggtttttttcattatcttcgaacaccgccaataacgtttacttactcattatcggaggcgcattctcattattgcaaaactcctcccctggcgaaatcgttaacaagattcttttcgcaggcgttatgatggcaaccatgcaaatgagcgctattattggaactgagcctaacacaggccgcgacgaagacggattcatctcattcgggacaactaagttttctgaagcgcaatatggtgagtacttaactctaattaataacaccgctgtattgatcattaatgagttccctgtttcggcaaggacactcgaggagtgtgatgaaaaatgcgagaagatcgccatcgacttccactcgagttcatcatctcctctaaaagggtcgcagattaaggcgatgtacttcatagggttgaggccttttgtgagagcattatacgttggtatgttctgcaaagatgacaggcttataaaccagtctacagggcagcctttagtccgtccagactcgactgtgtatgactctcgcacagcagaaatgctcttgatgacagctgccactcaaataatatttattttattgaacgaactcgagaacatagcgagtgatgcgaacatagcggtccaactgtcacccatgcttatgaagacgtttatgaacacgatcgttcatttttacgcgcgccaggacgtcacgacaggtgaccatgccatcatggcgatgtacaaaaaagtcgtcaatatctccaaaaccaatgagaaacttagaagttatgtactgcgcggcaacaatgaactaatggttcgcaaggaggacgcgatgacaatgtaccgcaacatggaattgagcaagaagagaaccagtgcaagtaaatcgtattacatgttttggatcatcactttattggtgtacataatctcagcgttcattgttaatttaaaaggctcgtctatagatgtgtactggatgaatggtatcgtatttgcgttactcgccattggactattctgaactattcaggatttatactcaaaattaagagcctccggaacgactcgatagcctgagatatcagcaccgaggaatcacaattccgctacagaccattttcgcaaccagtaaaaatcgaccgggaggctggaacgcccattacgattgtgtttcatacagctccttcataacgtttcgaaccatgtctggcaacacgggacaagatgcagtgtccctcccatttaatagttctttggagagctcgtccatccacaagtgctcctcatagtccatgtcatctccgcgcatggtctcactcttgtcagggtggatgtgaacgatcacgcgcatgatatctcggtgagtccatgatcgctccctccaattatggcgggcctctggagacaaccagtacttccaccacataatctgcaacggcgtgaccaagccctgggaatcgccatatgataggtaagccgcacatatctcgcttcggttcaacgttgataaggacatcgatggagacattcctagatcggtgtcatggcaccgctcctcccggtcatggtaccgctcctcacggtcatggtaccgctcctcacggtcatggcaccgatcctcccggtcatggcaccgctcctccctgtcatggcaccgctcctccctgtcatggtaccgatcctcccggtcatggcatcgctcctcccagtcatggcaccgatcctccctgtcatggtaccgatcctcccggtcatggcaccgctcctcccggtcatggtaccgctcctcccggtcatggcaccgctcctcccggtcatggcaccaatcctggttatggaaccgctcctcccggtcatggcaccgatcccggtcatggcaccgatcctggtcatggtaccgctcctcctggtcatggaaccgctcctcccggtcatggaaccgatcctggtcatggaaccgatcctggtcatggaaccgatcttttaggtgctcgttctcgcgaactgatgatgagtaatgcgaacgttcactcctcctactagtaccagttgattcttgtcgcctggtgctagtagtgctgcttcggtgaccaccgaatccctgcgcaatacaaacaaatgttgtggtgagagatattacagggattcatccagctcttcggaacaatccagctcttaggtacccacccggtgggttggatagagtttcatagggatgctgcccactctatttacgtcgcgcgctctgtacatgggaccgaatgggagccgagaccccggcttcgaaggactactggttgtgcagttgaatcgcatgttgtaagctcttgattgaggattcgttatctatcttttgcataggttcatgcatttatataatttttgcatgtacttcacattgtagtgctgggaatgcggtgtgtgtacattgtggtcgcgttcatggctcatgtacactcttggaaatgccgttgaattttagtgtacccgttttatgtattgtaagaatctgccttgttgtgctctgacaggttgagttgttccccaattccatctttcatgttggcatacttagtcggttttcctttggagtatactgatgagacatcctcttgattgagagcgcggttgtagtaaatcatgtttccgatgcggttgttcgagataggattcttccctgggaagaggtgtagtcggttcttgttaggtcgcatggcactggcgatcttctttgtcgcatacaacgtgtcgttgatgtatgcacggatgatgatgccctcctcgtgattgctgatagcgacgtggtcttcgaatgtaaacgtcacaagcatccacttgtcctgtcccaatttcatgacgtttctgcggaggctgctgttagacgtgtttgatacggaccggataacgaagcgctcgtctgggtcatgaattgtgttcaactcgacctggaaagaatcgtaggttggtccgaaaagaatacgtggacacttcgtagttaccgtccttttattctctacacgctcattcacaccggtggctacactgaaatctttgtcggtaaagcgaaccattctgtaatcgaagacggtagggtcccccttcaaaataatgtccctgaacttgacgttatgggaatcggtgttgcgcatgttgatccaaaattggtaagtgaactggatgccgcccttgcggttgtaggaaggacgaataggcatgtaattggacgcgtattcgttacttgtcgtgaagaaacggttgtgaagctctgccatcgagatccagccgttaatcatcaacacttctactttgtggtcaacctgcttttgtttcggcatcaacccgtccctgttcgttgcaaacaacgaaatcaggtatattaagtacactacaaatactcctgcgacaatctgtaacgcatctttcaactttttgttcatcttacaaggacgaagttcccatacagttgttttcatatttttttggagatcaccgtgagggaaaaatgttgtgagggacgaacgagtcgatgcacctgaaaggttgttgcgactcgattggacggcgtttgatagacaatatcaaatcgttatctccatgcacaacagatggaatgggacggacatccctcgatgaagtgtctctgaattgtttctgagtagtagacgatggaagattaactgtgtttggtcggatctcgtgccggaaagaggccttcgacttgtcatgtggtagccaactgatgtccattgttttcgtggcgttgacgcgtgacacttcgaaaccgttcatcacgaggtgcctcatagaaaatcggatgcatctctcgatgtcaaacatcgggtaaccaaaaacaacctctggaatttcgaagtgacacgtatacattcctacagatgcgcaccgcttgatccgggaataaacacgttctagaactaccacgaagacttcacgttgtttccgttcacgctccttgctaatggtggtcaaatcccttgcagacacctggttcattacaatgatatcctgcattccgctttaattttatggaacaatacattgaaacacttttttttttatgattaacgaattaacgatgcacagaacgcgtggcttccattgcttgtaaaaaaatcgtgattcattttaaactacttagagccgcagtttaggcagcactcaacaagtccctctatatcatgtctataacatcaactgttggcaccgcgctcaaaaattcaatcctcgctggactatctgtcgtcatcattcactttgtttttaagaacatcgcgacttcccgttcgtcagaacaacaacgcattcctcaacactactaccccgaacgcgacgacaccaattacaatagaagctacatcaccaattacaacagcgacattggagaaaggtcagatgaggaggaggacgtggacatgataaattacatatacggtgacaacaacaaagaacaattcatggaatcgaccccatcatcacatgaaacaacaacacaaataccttccaaaacactgtctgccacaacaaaagcggactcaaaagcatcttcttctccactagggcatgttaatgcgtttgaaggtttcttcgacgatggaatcttggcatcagtgtcttccaccccatgtaaagataacgcgaccgcatcactagacgcattgttcgctcctctgaattaaatcaaatgaagtccttaaacagttgttcaagtacttcatggttgtatcacctgtaacctcgacttcctcgcattcttcttagtttggatgagtgccgcgatgtgacttcttctggcgcataagtacgttttgtcatcgctaatactactaacgttactactattagtagcggtaccggttgtatcattagtagcggtaccggttgtgagaagaatgcggctttcaagggtggctatagaaacgaacgcttggtcttcttgaacgaccggattgcaagaatcacgcgcaatgataatatcccgttgagtaccgatgatgtcctcgcggatgatcttatcaagtgtattggcgatatctccccatgcgaagtctctgacgatgcgttcgcgagcactcgccccgtgcctgcacatgaggtctctgtccccgtagtacctcatgatggcatcggcgaagtcgacaggcgcggagagttcggcctcgccgcccacgccatcgcgagcggtgtccacgtaaatggagatcttgggcttgaccatgagagcgcatgtctcatcgaagaaatgcaggaaaccacccaatgcaggcacgacttgagggattcctatggccgcctgctcaaagttgcagagaccgaatccctccccgtcgcacgtgttgattccgatgtctgcgacgttgtacaggaagttagtctccatgtccgttaacatctgcgggtgcccgggaacgaccaatcgatcgcgaacaacctggggggcgtcttttactccccgcttgagtagctctcgctcgaagagttcgggtatgttccaagcaccggtcagcgccgtaccgactacgagtcggatgggtgcattggggaggcgggcgacgacctcggcgaacgcctggagacatatgtcccaccgcttccgcggctggttgcggttaaggttcaggatgaggaatgagtcccctggcagtccgaaaaaacggcgcgcgaggtctttgggtacgggaaagtatgtattggggttgaagccgtgggggagggagaagcatggaagccgcatcccctgtccgatgatgcagtctcgccatccgggagtgaaagctagcaccgcattcgcattatcattcacgtatgcgaggagatcgcggcgctgtgataggtacacctggtctatatacgcgatcactttgaactcggagcggttgggtgcggcgcacacctctctcaatatggtggtcaggacaatgaggtcgttaaaaatgatgacaacgtccgggcggatgcgtgttacataatcgcgtgcgcaattgaccccgaacccttgcgatcgtgggatttcgtttgctaatgcatcgaacacgatcacgttcgcaggcacgtccttccgatggcctgggtggttgtgcatgttctggaacccgaagatgtgaagctccatatccggagcattccacaccttgctaatctcatagacgaccttgctgtatccgttgaactgattcggatgtgttccgaagatgactaccttcatctttaggtgcgttgttgttgttgtaaatgcccaacaaacaaatatctttgtttcctccgcagtctgtacaacaaacaaaccgaaatacccccctaaacttcagaccaatgt

SEQ ID NO: 240 - DNA, 21560 bp, unidentified
  misc_feature 1..21560: note = Fanzor polypeptide
  source 1..21560: mol_type = other DNA
tgtattccaaatttggttttcttaatcatttgctcgttgggtttgtcactgctcccgattatgatcgggaggactgtgtgtattccgaattctgttttctcaatcattcgctcgttgggtttgacaatgctcccgattatgatcgggaggaccgtgggtattctgagtttggtttttgtcaatcattcgttcgttgggtttgacattgctcccgatcgggaggactatgggtatgccaaatacaagaaaaaaaaaagaaaaaaaaatgccgagtacatgtttcctgaatcattcgctcgttgggtttgtcagtgctcccgattatgatcgggaggactgtgtgtattccgagttttgttttgtcaatcattcgctcgttgggtttgtcaatgctcccgattatgatcgggaggactgtgtgtattccaaatttggttttctcaatcattcgctcgttgggtttgacaatgctcccgattatgatcgggaggactatgggtattctgagtttggtttttctctatatctgaatctgattttgaatctgaatctgaatctcaatcatttgctttaccaacctatttgtcttccgcagggtctacaatgacagtaccgtggaagtaaaactccaatcggacgggaaggatttgggatgcagcgtcatggacgaatagaccaaggagcgccaagtgccaatgaacatcgaagtcgttgttggtggaccagacttctatgttacggctacgcacgctcactggttgaggtttcgcggcgaatgcaggcatatgtgcggagcagatgcattctggtcgacactcacccttgcggaagtcaagacagcccagttgcttgaagtcactagcattcggaggcccatgttaggagccctatcatggacaccagttcacattcaggctcttgggttggtggttgacagtgcgcagcaagcctgtcagggtcggcgagggcgaatttatcgccgacaaagagcttgaggaaactagggcgtgggttgagacatgcgaaggaaagctcatgagcgatttcgaggagtttggtcctagcgacaggaggacgtcacctcgatgtacaccaaaagggccttcacctgacgccggtaagagagcaatcgaacggactgtactgctgcaccgtggctcaggttaaattttcaaatctgacaggtacatttcgaatgttacgtacgcggtgggatgtacaccgttcaaaacaaccattgtgtgctgaccgcacttgccgctttcaatttcaataggatattgcgtaacttctgcactctttacatttcctacagcctccgcgaagaagtcaggaagaggtcagcttcctacaatcaacgaagaggacagatcgccgacaactttgtaaggtcatcgtattcaaattggtatctccttatagcccagctcctgacatgggcctccgaatgctagtgacttcaagcaactgggctgtcttgacttccgcaagggtgagtgtcaaccagaatgctccgcacatatgcctgcattcgccgtgaaacctcaaccagtgagcgtgcgtagccgtaacatagaagtctggtccaccaacaacgacttcgatgttcattggcacttggcgctccttggtccattcgtccatgacgccgcatcccaaatccttcccgtccgattggagtttaacttccactgtactgtcattgtagaccctgcggaagacaaataggttgataaagcaaatgattgagattcagattcagattcaaaatcagattcagatatagagaaaaaccaaactcagaatacccatagtcctcccgatcataatcgggagcagtgtcaaacccaacgagcaaatgattgagaaaaccaaattcggaatacacacagtcctcccgatcataatcgggagcattgacaaacccaacgagcgaatgattgataaaacaaaactcagaatacacacagtcctcccgatcataatcgggagcactgacaaacccatcgagcgaatgattcagaaaacatgtgctcggcatacccatagtcctcccgatcataatcgggagcattgtcaaacccaacgagcgaatgattgagaaaacctaattcggaatacacacagtcctcccgatcataatcgggagcactaacaaacccgacgagcgaatgattcagaaaacatgtactcggcattttttttttttttttttttttgtactcggcataccaatagtcctcccgatcataatcgggagcattgtcaaacccaacgaacgaatgatagagaaaaaccaaactcagaatacccatagtcctcccgatcataatcgggagcagtgtcaaacacaacgagcaaatgattgagaaaaccaaattcggaatacacagagtcctcccgatcataatcgggagcattgtcacacccaacgagcgaatgattgagaaaaccaaatttggaatacacacagtcctcccgatcataatcgggagcactgacaaacccaacgagcgaatgattcagaaaacatgtactcggcattttttttttttttttttttactcggcatacccatagtcctcccgatcataatcgggagcattgtcagacccaacgcacgaatgattgagaatacccaaactcagaatacccacagtcctcccgatcataatcgggagcattgtcaaacccaacgagcgaatgattgagaaaaaacaaactcagaatacccacagtcctcccgatcataatcgggagcattgtcaaacccaacgcgcgaatgattgagaaaaccaaactcggaatacacacagtcctcccgatcatagaaaaatcaatcctaaaacctgtcaaagaaaacttgatccaccgaatgcctagacggaacaggcaaaagggctaaattcttctgggctgtgacatttcatcagtcatgctatgcaagtcaagcaggcctcaactacacatctttgctttacctattgcagtactgggccactaaaacaaacctagtaaataggtaggtggccgaggtgggcaagaacacagtaaaatagaagaactgcaggtgtacatgatccatatgtcagtgtcatgttaagtaccaatcacaacataaacacccaaccacactcccggcaaagattaaccaataaacaaggcaacctgttggcaagcagtaacttggtcaacacaggcacaaggcagctaagtctgggctacaattgcagtctaccactacaatgcaattcataaccaaaccagacgctatggaaatcttggaacggtagctaaggatgcatgccatatgggtatgcagtactgtccgccattactctgacgcaggtgcaagcgggtaaccatcatgcaggtaggcaggcctcaggaaggtgcaggcgggtgcagagctgttcgccagtactccggcgcaggtgctggcccggcgcgtgtcctggtctggtctggcaggtgcaggcgggtaaccgccatgcaggtaggcagacctatccagtgctccgagcgccagtgctcctggctatctgcccagcatccaccagagaaggtgctaatcaggacagtgacagtgaaatgcattgcgcaaagggtgcgagagttagaagcaactcgggggttattcacaaccacccggtgctaatgcagatgcgcagcaaggcgatgcagaaagcgaaaggcaaagcagcagatcatgagaacagagctgaagtgaattcccatagcagtgaaatgcattgcgcaaaaggtgcgagaattaggtgcaactcgggaccatgcagggccatccggtgctaatgcggatgcgcagcaaagcaatgcaggatgcgaaaggcaatttgcgcaaggcatgaaaggaggtgaaagcgcaaggcattaaaagaggtgaaagcgcaaggcatgaagcaaagccttaccgacttatcaaaacagtctttcatgcatgcgcagcaagggggggcccggcaaggggggtcaatcaatgcacatcaaggggtcatgcaaaggggtcaagctgccagagaaggtgctgggcatggcaatcaatgcacagcaaggagtcatgcaaaggggtcaagctgccaatccattgagaaggacaccaaggcagaggctgtgcaatcggatggagactttgtgtattgtgagataaataattatgagcaatgcgttcaagactttgtaaacagctttcaccttcctcttgactgtcctctacaattgattttgtattggaatacttcgaaggaactttttctctctccaaccgagcaaatcaatgttacaattgaaattgaagggaatagtctctttctccggaatgcaacaaaacaatcttacataataaattgtaagatattttcgtaaaatacaccaaaaaagcaaaatcaatcaatttgcgaaaacgatcttacaaaataaattgtaagatattttcgtaaaatacaccaaaaaagcaaaaccaattaatttgcgaaaacgatcttacaatatttatcgtaagatttcagtaaaataaaaaatccgttcggaagcaggaacgcccattaagttgcacgctggccagaagttaagggctagcgtggacgcttctgggggggtgcttgtgcttgccaacgacggtgattcgcgtttcccactgacagtcagtggagatgcaccgtcggacctcgtgcaggcggcgtttggatcctcgatatcgaggccgcctgtagctccgttgccaagttacacgggaatgcgtttggagagcgggggtggggacttggtgattctaggtggcgaggggggtggcgtgatgcaggtgtccgacgttggcgtcgccttggatctgaaccctgcaggcgggcttgtgcgtgtgaacggtgtgccgattcagtcgacgtcggacgggcgccagaagacgaatcgctcggatcttttgggtacatcgtctgcggacattttgcggaggctgcgtccgtgcacgtacacccaccgtggcgtggtggaggcggggttcatagcacaggaggtgttctgcgaggtcccggagatgcgtcacctcatctcactccctagagactttgagatcgatgacgacaacacgcttggcaatgcaccggtcgggtcagtgggtttgaactatgtgggcattatcgcgtacctagtgagcgcgatgcaggagcaagcaaataagatagaggacctccaggcgagaatagccaagtagttcaaggcatgtagagacacatattacgagtattgggactcgtcacggcaggacttgtatcgcagtcaaggttggatactgagaaaaccttacgatcaaaagagaggatgaagataaagatgcagatgattcgcattcggaagagaattttttacctcaagaaagaatttagggaccagacaacaaatttcttggccgctcgctacgatgtgttgttggtacctcaattggatacggcgaagatgacaatcagtgctgaacgggagctgacaaccaaggtttcccgtcagatgctgactttgagccactctgtgctgttcaatcggctgaaggagaagtgtgaagagtacgggattgtgttcttgcatgtgcttcattacacaagtcagacatgccctatgtgggtcatatgtgggattaaaaaaaaaaaactggaaacttggaacaatccagagtacatgacagtcttgtgaacaggccatccgtcaatgaaatcttcaagatcggaatcgtctacgacttttaaagatcatcttggaacaatccagagtaatccaggacagtcttgtgaacaggccatccgtccatgaaatcttcaagatcggaatcgtccacgatgcttcgaaacatccaacatactccgtagctgcgtgagaatcctgaatgctgattccaagccttcacacacaggacaggaggagcgttggccatcgcacagagggaatcgatagcttcgaacgcatggtagccttcggcattgcaatcaatgtagacacaatgcgtcacactatcgtaatccatacacaatgatgcggagttacacacgttttcgatgctcttgcacaaaattaggggcgcaagttgtggagtaaatcctatgtcaaccagcgtctccagcatgtgagagtaatattgatccattgtgaatgaatgtatgtcagttagttctgtcatcataatccaatcaattttttgtacaacaaccaccgaatacaatgcagtacaatacagtacaatacagtacagtacagtacagtacagtacaccgtcctccagagtgtgcagtccgaaaaagaagggcgcatggttcgaggcttgctatggtgcagttccaccatggaagttgtggtaggacgcaaaatattaccattttttttcaaaacaacctataaagagagatgatcacgttttcagaagtatctgttcgttcacttgccacttctaatattgtgaacgccccctaccctcctctgtcgggtatcagagcacagtcaggcacttcaggacttccaaccctatctttcgctaactctcctgacaccgggttgttcaatccaagtgtggggacgctaggtgtggttgccgggggagcagagctggtgcgagtgtcaaacaatgtatctgtgttggcggatatagtggtgtcgtcaaacattatccctgtgaagaacgcgacgcagcacatcgggtcatccaacatgcactggattgacacgttgcacatatcctcgaacacgttgtacgtgggcgacacgctcgtcctcggcattgacgcccagaccttggccatgagcgccggccccggccagggcatctctatcacgaccaccggcgctggcgagacctcgctcgcgtccgaggagggtgtcaacgtgacctcggtcggcggcgtcagcatgcatgtcaccggcatcgacaaggttgtagacatccagtcgactggcgcaggcggcattgtgcagctgggcgcgaccaaagaggtggtcttgaccgcgcccacggtctccacggtctctagcaacttgaccgtcaacggaaccaacttcactgcgggaatccgcgcgaattccggttctgccggagcgccttcgctgtctttctcgaatgcgaccgacaccggtttgttcaatccaagtgtggggacgctaggtgtggttgccgggggagcagagctggtgcgagtttccaacaccgtgagtgtgatgggagatctcgtggtgtcctcgaacattattccttccgcaaacgctacgcagtacatagggtcatcgaccatgcacttcaaggaggcgtggatcgacacgctgcacatatcctcgaacacattgtacatcggggacacagccgtgctcggaacggatgaccagacagtgtccatccgcgcggaccctggtcaaggcatctcgattacgaccacaggcgtgggcgagacctctttggtctccgaaagcggcgtcaacgtggtggccggcggaggagtgaacatgcaggtcaccggactcaataaggttgtggacatccagtcgagcggtgccggcggcaccgtgcaactcggcgcgacaaaggagatggtcattaccacgcccatcaccacggtctcaaacaacctgaccgtgagcggaaacctgaccgtcaacgggtccaatttcacgtgaacacccagaccgtaactgtagaggataacatcatcgtgctcaactccggcgagatcggacccggtgtcacaaagggcgaggcaggtatcaccatagacaggggagacgcgctggactaccagatcctctttagggagtccgacgacaagttcgtcatgggccctcaaggttcccttgtcccaatcgccaccgagaccttcgcggcaaacgctggtaatatatctacaggcgttcttggagtgaccatgggcggcaccggcgtctccgcgagcaccggaaccgggagcaacgtgttgagagataatgctacgatgagcaacttgacgaccataggaggaatgatcagcggtaacggtagcggacttaccgccttgaacacaaacaacatatccagtggaacattaccggttgttagaggaggaacgggggtctccgtcagtaccggaagtggtagaaatgtgctcagtgacaactccacgatgagcaacttgacgaccataggaggaatgatcagcgataacggtagcggacttaccgccttgaacacaaacaacatatccagtggaacattaccggttgttagaggaggaacatgggtctccgtcagtaccggaagtggtagaaatgtgctcagtgacgacgccacgatgagcaacctgaacatcgtaggagggatataccagaacggagtaccatttaaggtgggcggtggctttgatgacggaacggttgggtttccgtccattacattcacgtctgattcaaacaccggtttgtttagacttggtgcggataaaattgggttcagcaccgggggggtgtcgcgtgtaactattttggataacggaaacgttggtttttctacaaacgcacccgtatcaagagtgcatgttgtaggcgatggatatttcaatggcaacgtgatcgctaccagcaacatcatcggtttcagcacaatggagtccgattctaacgtcaagcaccacttcgagcccatcacggacgcgctggacaagatcgacgcgatcggcgcgtacaccttcgagtaccgtggcgacgatagccgcaagaggcacgccggagtcatcgcgcagcaggtgcaacgagtccttccggaagtcgtaagcgtgcacccgcttaaggacactctcacggtcgcttacggcaacttgtcatcgttgctgctggcgggtgtccaggaactgcgcgacgaattgaacaacctaaaagaggaactcaaggaaatccgtgaatcgctcgccccgcacacacaatgaaaggattatagcaatatttaattgtatatcgcttgtaaaaagaacccttatggacgtgggacatactctgtcaatttcttataatgcattggaaaccatacagttgttctcaaataattttgggacactcagtataatttgaatgatatcccctgaaaccaggtacaggtccgtggttcactacaaatattttttgaggagtctcaggaaggtttgtaatatatacaacgtttccaagagctcactacatagatgggtcaatgctgatcaggtgggtaaaagtaagcgtttaaaacgaaaaaggaaagaattgtccatgcttttacgttccacgatatccaataatattgcagagaaccccttcataacatgcaaggatttggtcggtataatttgcaagagttgtaatgtgagattatcgatcagtacggcatcgagacacataaaacaatgtggattttctaggaagaaggcgtttcccacagttctctacggacattcaaaagaaaatgtagaaatgttttgtgacaagtacagagaaagctctaacgttgtttgtatcgacgaagcaggattttacgctggcgaacacagcaaatatggatacagcaagatcggttctagattaactacgaagacaatgagtaacctccgtcgtgtgaagttcactttattactcgctatttcatctcaggcaataatagattatcagttattggagcacaattgtaaaaaagaagatttcattaaattctttaaaactttggtcatcccaaagaacaccacgatcgtcatggataatattcggtttcaccattcttcagaaataaaggatatatccgaatgcaaagggtggaagcttttgtacacccctccttattgccccagagctaatgcgattgaacaaatatttggaagcatgaagagagactacagggcatcatgtccattgacgtcaacctgtaatttcgattacttaatgcaaatatgttgtgttctagaaatgtggaggtataaagacttttcaaaatatatgattaatatgagagattgggttaggaatgttcgagagagcctgtctgcagatccagattacatcaaaacgttttcggggtacaatttgtgatggagaatgggatcggcgagtcatcatcgttggtacatgaggctgaccaacatgatgacattgcagaacttgtcgattatgaaggggaggaagacgaggagtgtgcacctgggcgagcgatttgtgtggtcaagatgaaattgagtacctttattccccatgattggcttcgtaaaaagatagacacactggtactggacatgaacaagttgcttggagagggttatattttcgcaaatttccacattgctcgtctttttgagaatggtatcgctgtccctcctgtaaatcgcaacttcttctaccggtgccttattgcagtcagtaccaacaaatgtaaggggtccactcttggcgaagacttcgagagtagtcggcttctgttcgacttgttaagagagccggggcaatccaaagttgacattcgggggaacgtgaagaaccagatcattgcagacctgtctattctcatggccacaatggcctctaaccatctttggaccaaccttgagcgacgcataacgacttacttgaagtggaagtacccacagattgcaaagcgcctgcggtcggacatcgtggctgcagtgatcaagtgccctacaaagaatctcgacgtcatcttcaagatgagccctcatacaaccaagctgccaaccaagctgccaacagctagacttcgatcggcaaaaagtgcagttgctcttgcgaagaagagggtcggtaggaaagaaccagaaggatcccctttgcgtgttaggttgactaaacttcaagagaggcttgaaaagttgagcgaagcttggctctcctcgaagaaccttagggtggacgcagataacgcgaaacgcttctttgcacgcgacgtggcattctgtctcaggggggttctacctttaccatccggaaacacttttgcgtctcgggctcacatgaccctgcctctgtaccacaagatattgttggagaccatcgaagaaaaacgaaaaacgaaaaacgaaaaacatcgcacattctcgttgttgccttacaaatctggattcactctgtcgcacattccgatttcgaaaatggcctttttctatatggtcaacgagtgccacttcgattcatgcaaggcagacgttgcttccaaaaaccatcaaggaatatgggagcgcttcgcaaacctcaagaaagtggagacagtttctcggaagttcggttaccgcattgtgacaaacggctttgcagtcagcatcttgatgaataagcctacgtgtctgacatgttcgatgcctgcagacgcgttctctacgcgggcgcatgagtatgtgacaacagacgagggtggcattgtatccttccttgacaatgtggtcgtggctgcggtagacccgggtgttactgatatcgtgactgtaacaggactcaacggaggtaccagatcgtacagctcggcgcaatattatcgcaagggtctgatcttcaagtctcagcgtcaaactgacgtttgaaacctcgagacggctgatatcgtcggtggtatcattccggatagagactcttcgagttctgaacagattggtgcgtacgccagattctacatgggtgccgccccaatccttcttgcccatcgtgcttccagggggtaccgaaacctccgctttcgcaggtactgcaagaaacagaaactcattgttgagattgctgactttgtagctccgagagagaagagcgctaaggtactcgtcgggtttggtgattggaaaggtctgggggcgacgccaatctctaggcggacttgtggccctctccaagctattcgtttcgagcttcgtagccgagaaaacgacatcatggaggacatcgatgagttcagaacatctcaacgatgcagctgctgtgagaaccacctttgcaacatggtggcactcactcatcgtaagaagcaagacggtacaagttgggaatgtacagaaggacgcaagcggattcataagattctccactgcaaaagcagtcaaagcggagcgccacgccaacagagcggtggtatgcttcactgcgggaagacttgggaccgcgatgtgaacgcttccaggaacatcctgatgcttacacttcaccaagtctttgggagagagcgtcctctcgcgtttcgccgagacgcgccgagaagttcctcgacaaccccacccccaccccctgatactgacatggggacacagacggttgaacggtttaccaaagaggctactcggaatatctttgagaacctcttcaacctgctgcaccccccaacgttgcccaaaagcaacgatctgcagtctggatgattataaggtgtcccactttatttgagaacaactgtaacaaacattggtgtaaataatacaaacacattatttgtatgcgaagtggtcttaccatcaacatatgctgaagattgtgtactcttcgagaacggaggcacgtcctactgagcttacgtcggtgtgcgggacgtggcgtccggaattcccaaacttcgggttagaggtggatttgtaggaggcacagtaccacatgcaaatatcgtgtacgtcgatgtatacccgatccctgcggacgatttgacgcacgagatagcattcgaattcagaacagatcccacggaaggagtacgtgtctggatagacgggactttgtacggcgaagccacagggtcttttcacagtggtatatggtcgggtagtgggcctggttcattcggaatggttaaagatggtggtcccatgggagagtcgtcgaacccttggccagttaccatcacaaagccgctaaggaggtacgataaccagctcggatggctctctgccatggaggccaatctcggaactcccgactacgtatacagcgggccgtcaacgttcgagtcattgactcttgccacggacaccatgttctcgatggatgttgtcattcccacaaactttgctagcagctgcattttgttcgactacggaggatctgaatacggtctctatataggcgtagtccgatctcaggtggatggaagcacagtaatgcgtgtggttgcaagcaacatttctacagtggacatttcggattttccgagggacggtcgttggcacaatatagcatttagttaacagaagaaggataacgatattgacacgtcacgtgtgtggatagatggggtacttaaggttactagtacagtggaacttggggcctttatatcagggtcagatggaggaggattcggtttgtttaacaacaccgtgaagaatatgcaggacacgacaccatggccttctagtttgcgaacaattcgcatttacctaaacgagaccggctgtctacccttgtttggagctctgagttttgcagacatcgctcacgagtacgggctttcgaccacgcaaccagtcgcgctagacagcttctaccaaaatcgacctgcaatcaccactggaatatgggacacacgaagatccgctcttgcacgtagggcgtttgtaggtcgattggggacaccgaacgttccatcggatggttcattgtccctccttgcattcaggggcggaaggagaaagcctcctgcattggcgcgcgagatagtgaccgtgcctccgcagatgaatgggttcgcggaggacgttgcgacagagctttttgctgcatcatttgcgaataccacacaagcgcagatggaatctgacggatggatattcaatactgataatgtgttgacatttgaaagtacgtttgctcggtctaataggtctggaacaatttcctcgcctccagtgatagatacgctatcgggtgttggatcagtatcgttgacattattcggttcgtctttggaaggagacgagagagtaacgtttcgggtacaagatgtgtcaaacggaaatgtcattgaactcgatagaacaacaatcgagacaacgagtacgacttacaaatacgatctgcgagatctagattccagtgtggtcgatatttacaaccccaagggagttaaactcattgctatcttagccatgggtataaccgacggctatcatcttgaaagttttagtgcgtcgaagattgagaactacgtttgtgccgccagcacaaacagagcagggtggttattagcttggaatgtgttcgaccttaacaatggtaatgtttggcaatcacaggatggcgcatacaacatcagtatccaaccccaggacggttctgctcggttgttacgtaacatgaacggattcaatgacgggattctgggcgaattcatctccttgcgcatcccttggcccatctacttaacctcatacgagatgactggcaactgcagggactgggttgtgtacgggagcgtggatggtaagtcgttcgatgtgctcgacacgcagataggtatcgcgtctgtgtctgtaagtacacagcgtctcatcacacccactgtaagtccaagcgaaaatgcttataacatatttgtagtgaagttcacgaggacggcgagaggtggttggaacagaggagaaatgaatgtcatgaatttcagcggcttccgtgcatgaattgtggaaatgaatgatgcatgcgcaaatcgctgacttggtgtctgcactcgaatacatgtaagtccgatatttctgagaaacaacgtttcggagaaaaaaacatttcggagagcatgacaaataatgaatgggacgcttcgctgaaattgtggagtggtggaggcagggtagcacaggaggtgttcagcgaggtcccggagatgcggcacctcatctcactccctagagactttgagatcgatgacgacaacacgcttggcaatgcgccggtcgggtcagtgggtttgaactatgtgggcattatcgcgtacctagtgagcgcgatgcaggaacaagcaaataagatcgaggacctccaggcgaggatctcacacggcgttgttgtccccggacgtgagtctcgcgagattggaaagcgaggggctcaagcagctgaatgtgggatgaatgctcttgggcgttcattcggggcggaaaaaattgtaatgtaccgttgaaaattatttgagaacaactgtatgtttacttattttcggaaagcaaacgagtcaactgttgcttccttttgtgctttgtgaatgtcgcgtggccacaaagtacatccgatcgtcgtcaaattgaaactgtaccgtcccacgatatttgaatcatgtacctcaccctcctcgtattcggatccggggagaatgactctgcacaatttggggaactcgagatccccgttgggacatgatacacgaggtccgaaccgtaattgtgacacaccctctccccatccatcagtcagctgccccttaacgtaattcaacaacttgacatcgtccacatccatcctcgagggcctccattcgtccggcactttgtttttcccaaaagaaaacagacctcctcctcctcctcgttggtgtttcttccgagtcttcgaaaagctcaagacgatctcgacgaacatgaacccgttcgcaacaggttttaaacgggcgtgcttgaaatcgaccggccacatacccatcgagttcagcagagggacctcttcgatcagatgctcgaaaccgaacgatttccatcgtttttttatggacgcgatcgcttctctcgggacgggggtgggtgtggacaatcccaggttgacgtcgggacggtgacattgcacgtcgtccaacacggcggggaaagtcagcgtaatcattggcgcacacgatcagaatctaaaatacgaagatgttaaaaaatcactgacttgttgtcgcgtttctcttctgcacttgaaggttgcaacaaaatgtccggtccgacttttctgagaaaaatcatttcggagaaaaaaacatttcggagagcatgacaaataatgaatgggacgcttcgctgaaattttcgccgtgttcatcatcgtgatcatcattgtagggtacctccgcggattctacagcgaggtcgtgttcgtgagctcggacgtcgacggtcgcgaatacctgatgcgtcggctgcccgaccgccagaacgcggtgaacctcatggcgcgcatcaactcgaatcttaacaagctcgttcagcatctcgtggccaagtacccgaaaaacccggtcgtgcgccagctgtacaataactacaacccagacgctctctcggagggcggggcggaacttgggtacacatcgtactctgtaaacaagggtgagaagatcgtattgtgtctgcgtcagcgtgaccacgagctagtggaggagaacatcctcatgtatgtcgcgatccacaagctgggtcacctcgcgacggacgaggtgggacacacgcccaagttctggtcgaacttcaagtggatcctgggcgaggcgatgtctatcaggctctacaccaaggtcgactttgacaacgagccacaaaagtattgcgggatcaacatcacctcatccatcgtttgatggtttacagcgttcttgtctacaaaaaatatacaccgaaaaataatgagtcatccggggtacgcgcatgcattgtacacggtcctgtgtgtcgccttcctgatcgcgtggatttccacttacatagtgaggtcgaccaccaccagcacagaagagttgaccttggagaacgtagggatcacgtacgccggtttaaggaatgaccttgggttctcgatggtagagcctctcataatgttagctatcggggcgaccgttctggcagtactgcacgcgtttgtcctcccaacgatcgtaggaaacgataacgaggccatgtttttatgcggtctgaatctcatgtacccgcatttaaagttgtgcctctcgcacttcatccgcaagatctatgatgcttttataatcttggggatggggtgcatgcccataataatgtacacagtcccaatggataagtttgtcatctgcatgctctggagcagcctctacatcgtcattgcatctttcgcgagtagctgatggaccggtcgttgaagagccagttcgcaaaggcgccctggtcgttggggtcggcgacagtgtaaaactgacggaagccggaattacgtttgaacacatcgtgtggctcctgccatttatcgccgtggaagagtttgacaactcgctttcggaccgacggacgcgtgatgtcgcaagggggacgcgtccctcccaccagcactgcgcccatgtcaccgattgcaggattcatgaacgggttctctttcgtgggcgcgcgacagagcctcgccgtctcggggtcacgttcgagaccctcgttgcgcatcatctcgatcgtgttcgttcgctggccaacgtcaaaacggtggaccgcggcggtcagcgcacctgtcaaaacaggaattagcagcgccttgggggagacacagaaaatgcacacggcgatgccgtagtatatggagaatctgaacagtgcgttcagctgctctgtgaggagcatccctggaaggggtacgaaactgtagagtgctttcgtcgtgcccatgaaacttcgtaggtcatcgtgccatatggttgtggttgccgccgcattgccgttcatgttgatatagcaactgaactgctttacatgtacttgacaaaattacttggggaccccatacttgacgggacagctcgggaactgcttggcgatggccacggcgacactggctgtgctattgggtgtatggagatcctcgtcaagtacgacatttagtgtatcggtttcggtttggcttacctcgacggtcgagacgccaggaatggcccttaccatgtccatcttctcctccgtcagcacatttgcgtcgcacaatgtaattgagatagtgatagaggtcattttcacactttttttggcacgcgacaaacagatctccatgcgcactttttgacaaaatattgtggtttgaaggaaagaacacatccgcatggaggctgcgcttctccttatcgtcgcaggcgcagggtacatgctttcaaagcgacgcaaaaaacctggaagggtgccgctagctgttttcccgatgacatcatacacgataaagaagagacccggcacattccacaaatcatcatcattatcaatgcctatctcggttgtcgcgtctgacgcggaggcgcgcgaccgaccatccgttcatgacccgtaccactgcacacgcgtgcaagatgtctacgcacacgaaaaggagctcctcatgcagaacacattcaggtcctcaatgactggcgaccgcatgccagcgacgcacggcaacatggtccctttcttcagagggagcgagcctccaggatcggccacaaaccgaggacacgagatggagaacttcgtgggcgagaaaggctcccaagacttcacatcactaagcggtggaaagcgagaaattcagcaactcttcaggcctacagaggcgagagtggacgtcctgcgtccgcctgtaggcgtcgggggatccgagtaccgcgacgtcgtgcaattgccacgcaatcgcgctaacgaactccctttcgaacaggttcgtgttcaaccgatcccggaggaaaagatgtgcaaaatggggggtctgcgcgcgctaacagtggacgacatgcgtcctctcaagcgtcccaaacagagcttgcctggacagattatccccgggtcgtccacatctactgctacggaccgacctaagcaccaacccatcaacactcagacgcgcccccctcctctcatccgcgagcagaagaccaccgacgactttatgcgcaccggtggcgcggccgggtctcagcccgggtacgacaagattcgcattgtcgaccggcacaccgagcgtgaaacgatgcgttccgcctacctgtgcaagggtgcagctgcccctgtgggcgtgcaccggatggaggaccgaggagggtcccaacgggacctcatctttcgaacccccctgggtgagatgtcgcgagggcctgccacgacgacggtcaagagcgtcactgactacggtcgaagcggtatgtcgtcccctggcaacgcgcgaatggagaccgggtctcgcacgcgccctggaactctcactacggccgtcaaggcgttggtcgcgcctttgcaggatgtgctgcgcacgacgcgtaaggaggagtacctcgattcggcgcctgtggtgaaccttgtaggatctcacggcgttcccaagctcacggtgtacgactcgcaggatgtcacgcgaacgacgctcaaggatgttctcctcgattcggcgcctgtggtgaaccttgtaggatctcacggcgttcccaagctcacggtgtacgactcgcaggatgtcgcgcgaacgacgctcaaggatgttctcctcgattcggcgcctgtggtgaaccttgtaggatctcaaggcgttcccaagctcacggtgtacgactcgcaggatgtcgcgcgaacgacgctcaaggatgttctcctcgattcggcgcctgtggtgaaccttgtaggatctcaaggcgttcccaagctcacggtgtacgactcgcaggatgtcgcgcgaatgacgctcaaggatgttctcctcgattcggcgcctgtggtgaaccttgtaggatctcaaggcgttcccaagctcacggtgtacaactcgcaggatgtcacacgaacgacgcgcaaggaggtgggtatccacgacggacatcagactggcaactttgcgggcggctctgtttcacgccgcggtcctgtggtggatcctgattctggagcgcgccaccgcgccaccgcgctgtcaaccctgacggtcaccaacgtaatttgtatgcgaagaacgttggtggcgttgtttactcggctgatgacgcggcgcccgatgcgactcgtaaggacgttgcggtgggtcaggatcgtggtggtggcttgccaatgatgacatctggacgcggagcttacagtgtttcagtgttggaccctcctcgatcgactatgcgtgagacggccgctgattcgggaacacggttcggtgtgtctcggcttgcagagagttctggtgcgtacgttgtggccaagcccgacagtttagaggcgacgatgcgcagcacgacgactgacgggtctgagtactatggtacttctgagtctgctgtgaccggaccggtttcgcgtgccgacgtcggttcggtggagcccgcgctgtctcgtgaggcgcttgtgatgactgggcgcgaatcctggttgacaggagggggtgtgacgctccagctggggcgcgattcggtgccggcgtagctgagatgggtgttgttggagacgaacgtggcggggtccctgctttgcgtgacggtgttggcagagtaggtacttgaattctagtgtcgctgggggaggtgacatgttgttgccttacaacactgtcgagcctgatcctgagccgcggtacacggtggatcgtttgatgggtgacatagagggcagacgtgcacaacaagaccaccaacaatacaaaatatcgaagtttgtattgtgtttgctgttgttgtagcagttaatgggcgttccagcctccccggtcgttttctactggttgcgaaacatggtctagagcggaattgtgattcctcggtgccaatattacgataaacgcaagaaagagccctgaaccctggcgcaataacttgttataaaaaaattgaatgcttgtggcaaactcattaaagtgcacacaacagctctatctctcacaaatggcacgtattaagcaaatcgctcgtaagtccacgtataacaaggctcccagaaagcagctacccataaaggcgtcgaattatgattcaaacgtacctgccacaggtggcgtgaagaaacctaaccggaaccaccccggcaccgtcgccctgcgcgagatccgcaagtaccagaagtctacggactttctgattagaaagttgcctttccagaggcttgtgcgagagatcgcacaggacttcaagaccgaccttaggttccagtcttcggcggtccttgccctccaggaggcctcagaggcctaccttgttggcctcttcgaggactgcaacttggcggctatccacgctaagagagtgacaataatgcccaaagatattaagctagcaagacgaatccgaggagaacgtgcctaggttaattagttgttgtgtacattttttttgacttcgtagctccgatggagaagagggggcgacatcaatctctacagtcggcggaacagtaaaatgaaagatatatcagatggaaataaatgtacgacatcgccgttagaaaattggcgttaagaatgggcgctgacttatttacgaacatcagtcgtgttctactctgtggaggtggaaacgctttggtgtacatcgaaaacgacgtgaatttgtaagcaaactttttaccaaataggcgactcggatttttttcaacctccccccaaacggaacgatctgcagtctggatgattataaggtg

SEQ ID NO: 241 - DNA, 21296 bp, unidentified
  misc_feature 1..21296: note = Fanzor polypeptide
  source 1..21296: mol_type = other DNA
cagaatgtagtaaaacctcctcacctacacctccaccatccatctcttctacctcctcacctacacctctactatccatctcttctacctcctcacaagcggtagatggatggtagatgaatggtagaggatggatggtagatgatggatggatggatggtagaggatggtagaggtgtaggtgaggaggtagagggtatgggtacagtatgggtactgggtactgggtatgggtactggaaccacccacatataccatgtacaataaatacaaaagtgcataaatcagtgcagtgcagtgcagtgcagtgcatcagcagcagcagcatttgactatcctgtaagctatatccgaccagctcaactcgatatagcatcctgtaagctatatccgaccagctcaactcgacatagcatcctgtaagctatcgaacactcgcgacagtgcaggaaggcagtgcagcagcagcatctaacaactatcctgtaagctagatccgaccatctcaactcgatatagcatcctgtaagctatcgaacactcgcgacagtacaggaaggcagtgcagaagcagcatctaacaactatcctgtaagctagatccgaccagctcaactcgatatagcatcctgtaagctatcgaaaactcgcgacagtgcaggaaggcagtgcagcagcagcatctaacaactatcctgtaagctagatccgaccagctcaactcgatatagcatcctgtaagctatcgaaaactcgcgacagtgcaggaaggcagtgcagcagcagcatctaacaactatcctgtaagctagatccgaccagctcaactcgatatagcatcctgtaagctatcgaaaactcgcgacagtgcaggaaggcagtgcagcagcagcatctaacaactatcctgtaagctagatccgaccagctcaactcgatatagcatcctgtaagctatcgaaaactcgcgacagtgcaggaaggcagtgcagcagcagcatctaacaactatcctgtaagctagatccgaccagctcaactcgacatagcatcctgtaagctatcgaacactcgcgacagtgcaggaaggcagtgcagcagcagcatctaacaactatcctgtaagctagatccgaccagctcaactcgatatagcatcctgtaagctatcgaaaactcgcgacagtgcaggaaggcagtgcagcagcagcatctaacaactatcctgtaagctagatccgaccagctcaactcgacatagcatcctgtaagctatcgaacactcgcgacagtgcaggaaggcagtgcagcagcagcatctaacaactatcctgtaagctagatccgaccaacttcacctggttggttgaacaaacgcgattgatagagctagcaaaagcacttcctgagcaattagcgaacaggcgatgcaactcgtcgcgaaatcctggaagcttccgaatttccaagaattgagtggtaaccagcgaaagatgtggtgcttcctcgctgcaccgagcatataaaccgactaaacccttatcatgtttcagctgaagatcgctacgttccacacattttgcggtatgtctatcctgtgacaggtcacctttcaccgatgcgagcgtttgcggtcagccagctgtaaccaggtcagatccgacacgtgtttctgcgagtcctcagctgaattcccctgccccacaccgtggggtcccgacattattgtcaaggtctgcttgagacgacacgacacgtgtcccccacgatgcgcccatgaaaatacgagtgtaaaccgacatgtcatcagatctgccacgtgtttttcacgcgcctcgaatcttcacacgagtccgcagctgaattccagtgccccactcctcaagaccacgtgtcgtctcaagcaggcttctgcttgacaacactatgggaattatgaagggaggccgcatgcccacggagtggggcagtggaatcttctgcttcccaacagttatagaatttacaggttatattttgggtattcttttatacaatgataatccctattttaaacgtgttcacatgaacacctctgaaaagactctccatcttgggaacaacaattatttcaacaaaaaataagaatcatcaaccaatccctattttaaacgtgttcacatgaacacctctgaaaagactctccatcttgggaacaacaattatttcaacaaaaaataagaatcatcaaccaatcccaaattctgaagcgactgatgttcgtaaacacataagtttttaacacaattcagaaaccattcttaacgccaattttctaacggcgatgtcgtacatttattattacattttttatttatttccatctgatatatgtttcatgtttcattttactgttcagctgactgtagcggttgcaccaattgcgcttttcatatacctccaccgtcgtgacgatgcctatcgtgacgaggcctatcgtgctaaggcccgtgctgacaatgaagctactgcccgtcgtgaggctgaggcccgtgctgacaatgaagctactgcccgtcgtgaggctgaggcccgtgctgacaatgaagctactgcccgtcgtgaggctgaggcccgtgctgacaatgaagctactgcccgtcgtgaggctgaggcccgtgctgatgagtccgaggaccatctcaggcaaaagttgttgtcgttatcgcctgatgacgtcgctgctatgactcctgaacacgtttcggagtatatgacggcgtgtgcctcggttggggtatcagcatttcatttggatcagccggtattaatgggcgttcctgtctcccggccgattttttaaaatttctaatcaggatttagagcctccggaaagactcgctagctttagacatcagcaccgatgaatcacaattccgctccataccatgtttcgcaaccagtcaaaatcggccgggaggcaggaacgctcatttattgtgataaatacatacatgtcacacaatcacccacccccgcagcacatctcctcgcatggtttgtcaaggcagcactgaatcctcggaggagtcctgtgggttactgaatgtgagagggggtgtgggattgcttgaaaatttcacgtttttcagcaaggaactgatgggggacgtggaggttgcaacacgatttgaggagcggcacctccaagatgaagagtccagatagatacatccgcttcttggcactgtttattgcattatgtgctcttgtgtcgggattgtttcagaacgcaacatctcttactggatgggcaacattgggtatttcattgattggttttgcacaagcacttcttgagaagcttccgatatcagaggaagacacaactctacaacaacctttctcgcatacatgaatgatttggacttcataaccaataattttgagaactttccatttccagcaaaaccatgtcacagttaagtcattggtgatggcatctactaggctcaggcttcggacgggtttcgtgtttttttccatcaacacacgtaattctcgttcatattcttcttggaacattttgacctttcaatatcaaggaagatattcctttatattccaactcggaatcatgtctccaccatgaccagcaggaatgatgatgtcaccattaggaatgttatttcagtgatcatcaagaagtgccgccgtgtgagaatggacaaggatgatgctgactgtgtaataatgtaattcgtcactgtttcggcatgacaactctcagattggtttcagaatggggatcgcgggcagattggattgtattggattaatttgatgactcgcttgaatttattcaatatactgtaacattattgaccggtctgactgaaacgcttgggaggggggaagcgaagacacacttttgttgatgcacaattctacagtcggcggaacagtaaaatgaaacatcatcgtccatctgcctccacatgaaaacggcggaaagctgtcgcctcctcctcattgtccatctgactccacatgcaaacggcggaaagctgtcgcctcctcctcgttgtccatctgactccacatgaaaacggcggaaagctgtcgcctcctcctcgttgtccatctgactccaaacacaaacggcggaaacctgtcgcctccttctcgttgtccatctgactccaaacacaaacggcggaaacctgtcgcctccttctcattgtccatctgactccacattcttctgcttgacttgacaaccctgatggatttctgaatggggagcgcgggcaccgcggagcggggcagtggaatcgagctgctgactttatttgagaacaactgtaagcagaagagcgaatgccgcgcggctatttcgctcggcttattctgttccggagtagcaaatgactcaattgatggacagcaacaacttggtcgaaagttcagaccttacaaatgatcaaagtgcaccgcaaatcataaaacttacattattcatgacacctgatcaatggggtcgattatcgaaatggagcgcaccacttgtgatccaataaattgatcaacaaaaaataagaatcatcaaccaatccctattttaaacgtgttcacatgaacacctctgaaaagactctccatctctggaacaacaattatttcaaaaaaaaataagaatcatcaaccaatccctattttaaacgtgttcacatgaacacctctgaaaagactctccatctctggaacaacaattatttcaacaaaaaataagaatcatcaaccaatccctattttaaacgtgttcacatgaacacctctgaaaagactctccatctctggaacaacaattatttcaacaaaaaataagaatcatcaaccaatccctattttaaacgtgttcacatgaacacctctgaaaagactctccatcttggaacaacaattatttgaacaaaaaataagaatcatcaaccaatccctattttaaacgtgttcacatgaacacctctgaaaagactctccatcttgggaacaacaattatttcaacaaaaaataagaatcatcaaccaatccctattttaaacgtttcacatgaacacctctgaaaagactctccatcttgggaacaacaattatttcaacaaaaaataagaatcatcaaccaatccctattttaaacgtgttcacatgaacacctctgaaaagactctccatcttgggaacaacaattatttcaacaaaaaaataagaatcatcaaccaatccctattttaacggtgtcacatgaacacctctgaaaagactctccatcttgggaacacaattatttcaacaaaaaaataagaatcatcaaccaatccctattttaaacgtgttcacatgaacacctctgaaaagacctctccatcttgggaacaacaattatttcaacaaaaaataagaatcatcaaccaatccctattttaaacgtgttcacatgaacacctctgaaaagactctccatcttgggaacaacaattatttcaacaaaaaaataagaatcatcaaccaatccctattttaaacgtgttcacatgaacacctctgaaaagactctccatctctggaacaacaattatttcaaacaaaaaaataagaatcatcaaccaatccctagttaaacgtgttcacaatgaacacctctgaaaagactctccatcttgggaacaacaattatttcaacaaaaaaataagaatcatcaaccaatccctattttaaacgtgttcacatgaacacctctgaaaagactctccatctctggaacaacaattatttcaacaaaaaaataagaatctcattgacacaagccatcattataaatttggatattttaacgtttgccggacggacggtgtgcatgcgacagttttccacagttttgcctgtctccctcgagccatgaaaacaacctctacgccccctcactcatctgccttgccaggcagaacactgctgcctgaaattccctcttctgctcgggtgtcatgttgcgccagacgttggtcaatccatgagggttgatcaacaaaatgctcagggcgttgctggcaaacaccccagacagcccaccgaagtagaacccggatgctggcagcaacaggctggcaataagcttcaacaccgtgggtgcagtatcatccgatatctgcatttcctcttttacactctctattacaacacgggaaaacaccacccacgcatcctccattgatgctgtctgtaacgggggcgtgtgttggcggtcatacgcttcacgcttgtcaggatcactcagcgctccgtaagccgcgcacaacattttgaaacgctcctgagcagcatcccgttggctgtcaggagatgttgcccatttgtccggatgccatttcagagctgcttgtcggtatgctcgccgaatctcctctgtcgttgcagtgtctgctgccacccccaacaattcatagtggctgctgaccatgatggcctgcgttgggcatttattgatgtataataatgcccctccttcaaaccatttttcgaaggattctggagcacgcatgattggtgtgatgtacatgattcactgcatacatctctcccaaaattatttgagaacaattgtatagattggcgcgtctgtctccgctgcatacatctctgtccactcttagaagtgcttaatagctgataatgtataaacaagatgacctcgctgaggtattccagagcattggtgtgtacagcgctgtcattgttgttgtgtctttggctttagcttattggttgcgcaccggtttccgtggcagcaaccaatgtcctactacgaaagcaagcaaagataatcaacatacagtcttcgtgtacggcacaagataataaataatattgcggtgtaacctacagtcggcggaacagtaaaatgaaacatcccaataaacggtataatgcgtcgacagacattatagtgtacgagtggatggtcctacaaaatggcccgtccagcaaagaaacctcctttcatgacgcattgcacatcaacaaaagaccccgtgttcttttgggccacggtaccggggaagagtcgatcgcttaagtgaggctggtctctgaaaggctgaggaaggaaaaagtcccgtatactggtagccagccaatgtgaaacaggccatatgcgttgcatgacatacaaggcatgcggtggcaaccccatgtcttctgtccgctggatacctacctcctgcgcaaaactgtagtagtctgtgtagctgccatgggcacgcggaagttgaaagaactgagacgagccaccacaaacactgttcaaagtcaagaggtcatcatgttccttcatcaacattgccactgcatctttgcaagggtcctgaatttgcttcaacaccacccctccgcgaccttcactgacaaacacggttgcgaagctgcccattcctatgcccttaaaactactgattgttgccagatccatcgcccttgatataatgagcagaggaagaagaacttcatacaaacgctccaatgcttgtgtgtgaaatgattccgccgtttgcatgtggagtcagatggacaatgagaaagaaggcgacagacgccgatgcactgaagctggattggaataaagatcagaggatacctgtaacaaacacttgggtaatcatttttggagacctgctgtaacgtctacctatctatcctatcggacagtataaccagagtgcatctcttgcacataatgcaccggtcaccagatgccaactttgaggaatgacgtgttgcagcacatgacaggcacatgcatgtgttgtcatccatctttcttgcttgatcatgatcccaagtcgtgcgactggtgtgacatcgaggcgagcaaatgggagctgattgcgaatgtagcagcacttcatggtaaattagagtgtctcgtcaatgcatggcatcatggacaatgtttcatcaattcataccgtgtcgcccttcatgcagctgcacgtgggcaaatggcttgtctttcattcttgtttgatcagtgcggagcagcccatgctatgcatattcatgaacatgtggagaatgatgtgcttatggggctgagcaatgttgcagcattggggggaaatgttgaatgtctcatcctggtacatagagaaggatcccctatgcatccttctctgtcaacctgggctttacacatttgtgccaattgcgattgcacatgcaagggtggacatgctgcatgctcacgttatgcatccacatcatgcacatcatgcacatcatgcacatggtagaaatcgaaccctgtctgatgagaatgataccatgtttacatcatgcacatcatgcacatggtagaaatcgaaccctgtctgatgagaatgataccatgtttacatcatgcacatcatccacatcatgcacatggtagaaatcgaaccctgtctgatgagaatgataccatgtttatttttcacaagtataaaaactcaagactatgtctagtatattgctttgcgcaccctatctcttctgtgtaaaacagaaacaatggataacttcaagaagttggatacaagcatgtatgcgtgtttcacagtttcaggcagtacgtggaatggcaaaaaaaatattttacatggaacggtggtattcgataatgaggacgacgccaataaatgtttagaaatactcgacctgtacaaagagacattctacttcaggcgtacatcgaacgtgatgaataagactatgttcacgtttgacggcacgacaatccacctattatctggtgccaaaattgagtacgaccagaatgcttctcgattgaagaagattgtagagatagaaaagacgtacacggcaaacgcgtgggaatacatggatccaatattgattatggacgattacgtaaggctattcgggtatcttccgctcaggaaaagggcattctggagctgcttgctgttatgtttttcgtgcagttgtatacagttgttcttaaataattttgggacactcagtataatttgaatgatatcccctgaaaccaggtacaggtccgtggttcactacaaatattttttgaggagtctcaggaaggtttgtaatatatacaacgtgtccaagagctcactacatagatgggtcaatgctgatcaggtgggtaaaagtaagcgtttaaaacgaaaaaggaaagaattgtccatgcttttacgttccacgatatccaataatattgcagagaaccccttcataacatgcaaggatttggtctgtataatttgcaagagttgtaatgtgagattatcgatcagtactgcatcgagacacataaaacaatgtggattttctaggaagaaggcgtttcccacagttctctacggacattcaaaagaaaatgtagaaatgttttgtgacaagtacagagaaagctctaacgttgtttgtatcgacgaagcaggattttacgctggagaacacagcaaatatggatacagcaagatcggttctcgattaactacgaagacaatgagtaacctccgtcgtgtgaagttcactttattactcgctatttcatctcagggaataatagattatcagttattggagcacaattgtaaaaaagaagatttcattaaattctttaaaactttggtcatcccaaagaaaaccacgatcgtcatggataatattcggtttcaccattcttcagaaatcaaggatatatccgaatgcaaagggtggaagcttttgtacacccctccttattgccccagagctaatgcgattgaacaaatatttggaagcatgaagagagactacagggcatcatgtccattgacgacaacctgtaatttcgattacttaatgcaaatatgttgtgttctagaaatgtggaggtataaagacttgtcaaaatatatgattaatacgagagattgggttaggaatgttcgagatagcctgtctgcagatccagattacatcaaaacgttttcggggtacaatttgtgatggagaatgggatcggcgagtcatcatcgttggtacatgaggctgaccaacatgatgacgttgcagaacttgtcgattatgaaggggaggaagactgtgcacctgggcgagcgatttgtgtggtcaagatgaaattgagtacctttattccccatgattggcttcgtaacaagatagacacactggtactggacatgaacaagttgcttggagagggttatattttcgcaaatttccacattgctcgtctttttgagaatggtatcgctgtccctcctgtaaatcgcaacttcttctaccggtgcattattgcagtcagtaccaacaaatgtaatgggtcgactcttggagaagacttcgagagtagtcggcttctgttcgacttgttaagagagccggggcaatccaaagttgacattcgggggagagtgaagaaccagatcattgcagacctgtctattctcatggccacaatggcctctaaccatctttggaccaaccttgagcgacgcataacgacttacttgaagtggaagtacccacagattgcaaagcgcctgcggtcggacatcgtggctgcattgatcaagtgccctacaaagaatctcgacgacatcttcaagatgagccctcatacaacaaagctgccaaccaagcttccaacatctagacttcgatcggcaaaaagtgcagttgctcttgcgaagaagagggtcggtaggaaggaaccagaaggatcccctttgcgtgttaggttgactaaacttcaagagaggcgtaaaaagttgagcgaagcttggctctcctcgaagaaccttagggtggacgcagataacgcgaaacgcttctttgcacgcgaagtggcattctgtctcaggggggttctacctttaccatccggaaacactttagcgtctcgggctcacatgaccctgcctctgtaccacaagatattgtcggagaccatcgaagaaaaacggaaaactaaaaacgaaaaacatcgcacattctcgttgttgccttacaaatctggattcactctgtcgcacattccgatttcgaaaatggcctttttctatatggtcaacgagtgccactttgattcatgcaaggcagacgttgcttccaaaaaccatcaaggaatatgggagcgcttcgcaaacctcaagaaagtgggagacagtttctcggaagttcggttaccgcattgtgacagacggctttgcagtcagcatcttgatgaataagcctacgtgtctgacatgttcgatgcctgcagacgcgttctctacgcgggcgcatgagtacgtgacaacagacgagggtggcattgtatccttccttgacaatgtggtcgtggctgcggtagacccgggtgttactgatatcgtgactgtaacaggactcaacggaggtaccagatcgtacagctcggcgcaatattatcgcaagggtctgatcttcaagtctcagcgtcaaactgacgtttggaacctcgagacggctgatatcgtcggtggtatcattccggatagagactcttcgagttctgaacagattggtgcgtacgccagattctacatgggtgccgccccaatccttcttgcccatcgtgcttccagggggtaccgaaacctccgctttcgaaggtactgcaagaaacagaaacttattgttgagattgctgacttcgtagctccgagaaagaagagcgctaaggtactcgtcgggtttggtgattggaaaggtctgggggcgacgccaatctctaggcggacttgtggccctctccaagctattcgtttcgagcttcgtagccgagaaaacgtcatcatggaggacatcgatgagttcagaacatctcaacgatgcagctgctgtgagaaccacctttgcaacatggtggcactcactcatcgtaagaagcaagacggtacaggttgggaatgtacagaaggacgcaagcggattcataagattctccactgcaaaagcagtcaaagcggagcgccacgccaacagagcggtggtatgcttcactgcgggaagacttgggaccgcgatgtgaacgcttccagaaacatcctgatgcttacacttcaccaagtctttgggagagagcgtcctctcgcgtttcgccgagacgcgccgagaagttcctcgacaaccccaccccccccccctgatactgatatggggacacagacggttgaacggtttaccaaagaggctactcggaatatcttcgagaacctcttcaaccttctgcaccccccaacgttgcccaaaagcaacgatctgcagtctggatgattataaggtgtcccactttatttgagaacaactgtagtattctgtatcgatccatgctattacgaagctaaatctcatcgcacgtaggtgagctcatgcacccaacgtttttccatttccaagcctgcttatacacacggctttcgtttgaatacatgcggttgcgtaagacccgccgccgtgcgtgtgtgaggatgcggtcgttcgctgccaactttgaggcatgacgtgttgcagcaggagtcagttatcattaaaaaataccgctttgaatacatgacagtcacatgtacattccgtcgactgtaatggtctctcgacatcgttccgccgactgtaatggtctctcggcatcgttccgccgactgtaatggtctctcgacatcgttccgccgactgtaatggtctctctctgtgagtcgactcgacatgttccgacgtgatgcgagaggtcggtcaccatgtgactcgcactcaattctttgacaggaccaccgcatcttattgtgtacctggttcctgacaggtatgcgcaactcttttcatgtcagtactccaccaattggggatatctgtcactgccccacactctgccagtttaatggcaaaacttgaagaccactccccgagcaggaacgtctttttcaaaacacacatgtactgccatggtgtgtagtaaggatgtaagctatcgtcacatttgtgacagggtgtattcagctcctttgtatcagttcggtctagcaagttgtcgagagctttcatggaatcggtcatccccccccatgcatctgaatgttgaaccaggatccccttttgttccgactctttgtatgccctcaccagtgcatcttccacgcacctaattccaatacccatgttgctgtagataagtccatcaagcgtgtgctcttgtgatgcgttgccacttgctatgttcttcaaatagttcttgatttcgcttagctgtaataaagccattttccctcaccacatactattttccacctgaaggaaacgtagtgtggcaagtgcccaagttgagccttacgacccgactgcgacaaccgaagaagaaatccatggcatgtggcatcagagcagagcagttaagagttggcaagatcaaccaacaaaagagggtagggtgtggggagatcatcccattgcatttggtcctgctttggctggactgtatcatgacaccccgttgaacaattttacacatcattccatccattgtacgtcaacgaagcgagtccttccagaggcgatatgtcgtccacgtcggttttcgaaatgtagaggtgaaccaacgaagtgagtcctgccagcggtgatatgtcgtccacgtcggttttcgaaatgtccaggtgcaccaatgaagtgagtcctgccagtggtgatatgtcttccacgtcggtgcccttcatgttcaggtgaatcaacgaagcgagtcctgccagtggtgatatgtcttccacgtcggtgcccttcatgtccaggtgaatcaacaaagcgagtcctgccagtggtgatatgtctttcacacgtgtgcccttcatgttcaggtgaatcaacgaagcgagtcctgccagcggcgatatgtcgagcaccttgctccggcgacaagacgaaatggagccggacatcggtactcggtcttcgaccacacatgtgtacgccatgttcagatgaaccaacgaagtgaggccggacagtactgatatagagggtacacgtgtgccctccatgttcaggtgaagcaacgcagtgataccggacaccggtgagatgtcttcgagcttgtatttgagatgcgaaatgtcgaggtgaatcaacgaattgagggcggacagagatgataggtattccacttcggtgccctccatgttgaggtgaatcaacgaagtgagtcctgccagcggtgataggtcctgttcgcccacccgtgtgtacgccatgttcagatgaaccaactcggtgagtccggaaagcgttgatatgtcttctagtctgtttccgatatgcgaaatgttgaggtgaaccaacgcattgagtcctgaaatcgatgataatgggtgttcgtccacgtacgtgaggtgcgaaatatctaggtgaatcaacgaagtgagaccggacagcgatgatatgtcggtcacaagtgtgtgcgaaatgtctaggtgcgtcaacgaagtgagtccggaaagcggtgataatacactcgacggaatactaaaatgaaaccgttttcttgaggtacggcacaccttacggtgtaaccaaatggtgtagcaacccacggggcagtggaacaccaatacgattttgaatcaacaaattgcaggatgttaacgagaatatcgtggttcttttttagatcacggctctccatcctgcagactccgtatcgttcttttgtcggtactttcgagagtgtccattgaaggaccagccgcacttaagcgatcgactcttccccggtaccgtggcccaaaagaacacggggtctttgttgatgtgcaatgcgtcatgaaaggaggtttctttgctggacgggccattttgtaggaccatccactcgtacactataatgtctgtcgacgccttataccgtttattgggatgtttcattttactgttccgccgactgtaggtcttcgtccacgtaggtgtgcgccatgttcaggtgcgtcaacgaagtgagtccgtacagtggcgatatgtcggtcacgtaggtgttcgatatgtccaggtgaaccaacgaagtgaggccggacagcggcgatatgtcttggatcttgtcttcgatagccgacattgattggtagggtacgtctttcccccgattgataccgattttcaactctttgagcctgcaaatgcgtgataatgcgtattccaaactgttataatgtcttaagtggatccttgtgacacaccggggtgcggcgcatctccactgtttgcaaacgagaggcacttgtttgaggtgggattcgttcgaaatcgcattggctataatgatctccaatacatcttcattgatttcgtcaaaggaactcatttgtttgtgaagtgtgctgtgctgatggttgtttatactgaagaatggttgtttacacttcattcgaggacgagaatccgccaccgcatccgtgtgtcattaatggacggacggtgtggatgcgacagtttgtacgtgtacagtcagagacagaatttgtgtgacacccttaacggtgacccttgaacctaattgattgggtaggtcagctaaaggttttgtatcaaggtcccaatccttcgtgtccttcatcccgtatttcagcatttaagctggcccagaggataacaattgtaagctgctaactgaccaggtgggttttttattgcactcacatttccttatacccataatcaacttttcaaaataaaaggtgtcccacaatcaaatgtccctagctgtatgatgacttgacaggtttctgcaactaaattctcctgacccactccgcgagggcagagatcccccctatcgattacaccatccctctcaaagtttttcgtttaatcaggtgacgttccaggtccgtctcttgctgtaggagaaggaccaggtccgtgtccgtctcttctcttaggtgacgttccaggtccattcccgtggccgggatggccgcagagacgtgctcttcgacgaacatagccaaggcgtcgtcgttcgcgttcaagtacatcgcactggtcttctttaacgaatcgggcatatcgaacttgtaagcgtatgcaaacgcgtgtagaagggtgcgtaggaactccatgcgcatcgctccgtcgtctgccttgaatgcctctacaagccctgcgtctcgtgggaagaggaattttgcggcgtccgcctcatccgcgtccacaaacctactgatgtagtcgagttttcgtatccgtcgttggactcccttgtcagaaccgtcgactatcggcggggagttgcacatgatgtgtatattgtgttgcgggcggaagtgtacgatgtcgctggagtgcaagaggcggtgggtgatgccttccccaccggtcttgtgttgcgagcggatgaagcttacgatgtcgctggagtgaaatgcaccggtggtgatggcttccccaccggtcgtcatatccttgaggactccggaatttaagacttcgtcgtggtttggctctgtgcaatacataatgcggacccccttccacgtcgcaaactctggcatcgggcgacctggatcgttgcgttgcttgcttgtcagaatttccacgccgaattttcggatgtagtcgcccaatgcgatctccatgacttcgaagaacttggtcttcccgttagaggcggacgcgttggcgccggcgtgtatgtgaaagagctcttgtccgctgtctccgtacagctgtctagcaaatgtgtggatgaggtattctcgttggtatatatctgggtgcatcgtgtcccagtatttcctcacgcggtctgctgattccgcgcacactgcgccattgtaatcgaatcccacggacatccggatgcccttgacggaagacgccgtttttgaggtcccacacgccgttgttgaaccctaagaggtttgggtcggcgtcgagtttcttcatgaagtccgggtcgtaaaagcactcgagcatctcttgcagtacgttattcttgaaggtcgcgtcctggaggcgcgcggtgatgtgcgctaggtcggcggagtcgtcctttgtgctctcatcgtttctctgcatgtcgtaatcgctttgggacgctctctccctgttcatagcgataatgaagtgctctagaacaacggtggacagctcgtgcttgacgtggatcgcgtcgacgtccgtcttccatcgcccgtcgaatacgtaccataatagctttccgttcgtgctcttggcggcagcgatgcggtttccaattatttttttcgcgatgcgcgcgatctcgttatgactcccgttgcacgcgaggatcatttgtatgaccatgacttttaataaagctaagaaattggaaaagttataataaactcagttccaacagttctcttctacagtcggcggaacagtaaaatgaaacatatatcagatggaaataaatgtacgacatcgccgttagaaaattggcgttaagaatggtcgctgacttgggagcggaattgtgattccatggtgcttatgtctcaagctagctagtctttccgtacaagtaggtgtaccgtacactccaggaggcggtttcattttagtattccgtcgagtgtattgtttaagtatagtttgtgtttttctggttgtgaagaggataataaggttagttaagaggtgaaaggggctccgccgcttgttgaataatacaatccgttgtttgccgatggactgtctgtacatggacatatcgtgacccgaaagggcagcgctgcggcggtgtgaggtccgtgcgcagaagacgaagttttcaagagctccagcatccggagagctgtacatggacatctcttgtcacgaaagggcagctgcggcgtgaggtcagtgctcagaagacgaagtttcacgagctcgagcatacggcagacactctcagggcacaggaggtagttcctctcctcctaagttctctttcccttgacctgcacccgcttgttcacgctcaccatatccagacccacggcgttcaggatcatcttcacagccttggacacctttcgcaggtcccacccgtcgcgaacgccgcacgatgcatggctgaacagcctagcggtgttgttcacatcatgttgtagccgcagaacatctgtgttcccttgagcttttcgtcgaacaccgtcatcagatttgggatgatggtcgtagtgtcgaatggggaagaagcagctcagggcacataatagatattccttctctcgctcattctcgcgttccttctctcgctcaacaacggcaaagctgggggggtctggaggcacgtcctcggtgccgcaatcaaggctgtcgtattctgagacagacttgatagacatgtcgacgccacctgtccccacgtactgtaatacgacatcggccatctcctgaaagacggcacctgaatcacctgcgtcaagttggtagtactcgtacccaacgtcgcgacggggcttgactctagggtctcctcgaaggtaccggatcaggacagtctcagactccacacaagcaagcggattaagtacgtggatttcgaagatcatctttgagttcttcgggtactgagaaagtcgcttaccaaagggcttcgacgtccagccaaccttgacgacgatctcatttttctgaatgaacttgttctcaaccaacgcgtacacgaccaacttgtgcgccatgatctctgtagagctgctcctgtacaattcgttgtgaagaaaggatctgtgaagaagaaggacttcgttgcatttattgaatcattgagtttgttcaataattcagtagcaataatggacaatgccagtatccataagaaattggtcctcagtcaccccgtcaatatttgttacacacatccttacagtccagaattcaatgctattgagctatgcttcgctaaggtgaagagagactttcgtcgtttgaactacataccgaatgaaacaaagacgcacgtgtctgatatgatttccttagcataaacagcaaaagattaatatcattgaatggataaagcaaaaatgggggaaaaatgtggataaactgttgacgtgtatgctatcacgacatctgtgctactttggtgatgtaccctccgaaagtttcctactttttttttcattttctgcgagatgaaagaaatagatgtttttacctagaatcgcgaaaacgatcttcttgaagcacccttctacctgttcgatctcggcaaacatgatctcggcaacgtgtttaggtggacacccgaacgccccgcatccccaagctcctaatacgatgctgtcatgtccgtacttgtgagctacactcaatacgagtctcaccttttcgcgaaacaattgactgtctttctctgagaacctgttgtccaccagctgtggcatggaaatgcacggacatgccaagaaggatgccgatttagaaaacttcaggaactcgaatccgtctctctcgcactccctgatgatgtcgacgtcgaacgatacaacggcttccctttctccgatcgggtaaaacgacctcgagagatgacgatggtagttcgtcctccggaacaacgactcttcctgcatcccacctccacaagacacgcaccccccaggattatgtatgtccgccatgttcaagacgagcgggtgcataccttgctctataaggtctagggtcgcatctaatgtgtccatgtctatgacacggatatcggtccgcatcgtatatttcgtgcgatcaaactcgaaggaaggatcgtacgaaactttcaaagaagcacgaggagggacatgatcctcgaatatccgaatgttttcgtgccacacacgtactctccttttaaaatcctccatacctgtttgtaagaaagatcttcttatacgaactattcggccgtgttcactcatatcagtatcagggggtggtggggttttcgaggaacttatcggcgaaacgcgagaggtcggtcgctctgtgactcgactcgacaggtgccgccttgatgcggtagtgggtgtgtcccactttatttgagaacaactgtaacaacattacaattttatggtgtaaatggaataatagatctttcagtgagaacaactgtaacaacatgcgagaacacgttcgcccattttcatttgagcgcgtagcattcagcgatacaggaaagataccatcctatatacgcatcagtaaatccaaaatacccggagcagggaggggcctctttgctatccgttcgctacccactggaacaccactcacagagtacccaggacctgtcatcaacgaatcgaatgtgtcctcgcgtacacgatcggaaaagcgaaaaagtaaacgtgtacatgcgtacgcatttgagatcgcgtgcaccccaaacgttctcacgctccaaccagacccattcgatctgagcaagggagtggcacatatcgcaaacgatgccatccatccagaagtgacgggattctcaaacaactgcgaattcatacagaagaagaagggggagacggaagaagtatacctatgcacctcaaggaaagtgaagcggggagaagaattgttcgtggactacttgatgccatactggattaacggaaagcatccgcactctgcaatgtccaaatggctgaaaaaggcccgcagaattcaatacacattgaaagccatgggtgtgcgtctcgagcaatacatgggaggcgatgaatacgaaatagtagaccctgacctacgcgtattctgtggagaatgcgaacctacaaagataagagtgatcaaatgctgtccttcagaatccatgtacacatgctcagaatgcaagaattgcatcatttacatgtaaaaatgaattgtccatgcttttcgtgtcctctacccatttcgtgtaaagagaccctgtcgtaccagtatgtatattcggattttctcatggagacgtcggtggtcctcgtcccgggccgtcgctaccgcatccgtatccacccgaacctgatgtccggcttctcgcccgaggtcctccaccacccgctgctctgggacagggtcatgcggtacgagggcatcgacgacgcgttccccggcaagtcctgtggcaagtcctgtggcaagtcctgtggcaagtcctgcggcaacacgagccgcatcttcaccgacggcttggataccctgtcattcgtgggagtcgacccccactgcgtcgactaccaggcggtcatggc

SEQ ID NO: 242 - DNA, 21224 bp, unidentified
  misc_feature 1..21224: note = Fanzor polypeptide
  source 1..21224: mol_type = other DNA
tttggtcaagattgctatgtgtgtgtccgggagggaggaaatggacgtacacctcctcaaaccagttcatctcaaccagcaaggacaagtatgcgaacatgaaagcgttcttgttgtcctttgccgcgttgtccatttgcaagaagcaatacggtggaagctgcccctcttcttcaaggacccggttgaagaaatgttggaagcatgatatagtcagattgatggactgcgagtagaatggcaaagcccaataaccaatgaagcctcttccctgggagaataatcctgagttaacatagaaggaaacatgaagtcagaatattagcattattttgttaagtaatcatttcaagttttaaatactgtgtatgtaccgattatgatcgggaggacatgtcctacgtgcgctgtatttgtactcacacatgatgcgtgtctttagaagatcacctcctgcagtcttctttgtatgtgagaagtggcgtgactgaggaagattagtcttcttgttgtccattgcatcagcggatacgtgcaagaagagcttcggatactgttcagacagtttttcacagatgtcatacctacgccttgactggttttaggattgctttccccctacttttcttctccacgggaatatttgtctggcttactccttatgacttgtgttgtggaatcccaggaattctgaaatgttatgatacagcagtgtagtaggtgacttcaagcgaatagggtcgttgggtttgtcaatgctcccgattatgattgggagaattgtgtgtattccgagtttggttttctcaatcattcgctcgttgggtttgacaatgctcccgattatgatcggaggactgtgggtattctgagtttggtttttctcaatcattcgctcgttgggtttgacaatgctcccgattatgatcaagaggactgtgggtattctgagtttgttttttctcaatcattcgttcgttgggtttgacaatgctcccgaatatgatagggaggactatgggtatgccgagtacaaaaaaaaaaaaaaaaaaaaaaaatgctgagtacatgttttctgaatcattcgctcgttgggtttgtcactgctcccgattatgatcgggaggaatgtgtgtattccgaatttggttttctcaatcattcgctcgttgggtttgacaatgctcccgattttgatcgggaggactctgtgtattccgaatttggttttctcaatcattcgctcgttgggtttgtcaatgctcctgattatgatcgggaggaccgtgggtattctgagtttgttttttctcaatcattcgttcgttgggtttgacaatgctcccgattatgatcgggaggactatgggtatgccgagtacaaaaaaaaaaaaaaaaaaaaaatgccgagtacatgtttcctgaatcattcgctcgttgggtttgtcagtgctcccgattatgatcgggaggactgtgtgtattccgagttttgttttctcaatcattcgctcattgggtttgtcactgcacccaattaggatcgggaggactctgtgtattccgaatttggttttctcaatcattcgctcgttgggtttgacaatgctcccgattatgatcgggaggactctgtgtattccgaattttgttttctcaatcattcgctcgttgggtttgccaatgctcccgattatgatcgggaggaccgtgggtattctgagtttggttttttttatatctgaatctgattttgaatctgaatctgaactcaatcatattctttaccgacctatttgtctttcgcagggtctacaatgacagtaccgtggaagtaaaactccaatcggacgggaaggatttgggatgcagcgtcatggacgaatagaccaaggagcaccaagtgccaatgaacatcgaagtcgttgttggtggaccagacttctatgttacggctacgcacgctcactggttgaggtttcgcggcgaatgcaggcatatgtgcggagcagatgcattctggttgacactcacccttgcggaagtcaagacagcccagttgcttgaagtcactagcattcggaggcccatgttaggagccttatcatggataacagttcacattcaggctcttgggttggtagttgacaatgcgcagcaagcctgtcagggtcggcgagggcgaatttatcgccgacaaagagcttgaggaaactagggcgtgggttgagacatgcgaaggaaagctcatgagcgatttcgaggagtttggtcctagcgacaggaggacgtcacctcgatgtacaccaaaagggccttcacctgacgccggtaagagagcaatcgaacggactgtactgctgcaccgtggctcaggttaaattttcaaatctgacaggtacatttcgaatgttacgtacgcggtgggatgtacaccgttcgaaacaaccattgtgtgctgaccgcacttgccgctttcaatttcgataggatattgcgtaacttctgcactctttacatttcctacagcctccgcgaagaagtcaggaaaggcgcgacgaggtcagcttcctacaatcaacgaagaggacagatcgccgacaactttgtaaggtcatcgtattcaaattggtatctccttatagcccagctcctgacatgggcctccgaatgctagtgacttcaagcaactgggctgtcttgacttccgcaagggtgagtgtcgaccagaatgctccgcacatatgcctgcattcgccgtgaaacctcaaccagtgagcgtgcgtagccgtaacatagaagtctggtccaccaacaacgacttcgatgttcattggcatttggcgctccttggtccattcgtccatgacgccgcatcccaaatccttcccgtccgattggagtttaacttccactgtactgtcattgtagaccctgcggaagacaaataggttgggaaagcaaatgattgagattcagattcagattcaaaatcagattcagatatagagaaaaaccaaactcagaatacccatagtcctcccgatcataatcgggagcattgtcaaacccaacgagcaaatgattgagaaaaccgaattcggaatacacacagtcctcccgatcataatcgggagcattgacaaacccaacgagcaaatgattgagaaaacaaaactcggaatacacacagtcctcccgatcataatcgggagcactgacaaacccatcgagcgaatgattcagaaaacatgtgctcggcatacccatagtcctcccgatcataatcgggagcattgtaaaacccaacgagtgaatgattgagaaaaccaaattcggaatacacacagtcctcccgatcataatcgggagcactgacaaacccaacgtgcgaatgattcagaaaacatgtactcggcatttttttttttttttttttactcggcatacccatagtcctcccgatcataatcgggagcattgtcagacccaacgaacgaatgattgagaataaccaaactcagaatacccacagtcctcccgatcataatcgggagcattgtcaaacccaacgagcaaatgattgagaaaaccaaattcggaatatacacagtcatcccgatcataatcgggagcactgacaaacccaatgagcgaatgattcagaaaacatgtactcggcatttttttttattttttttgtactcggcatacccatagtcctccctatcataatcgggagcattgtcattcctaacgagcgaatgattgagaaaaatcaaactcagaataaccacagtcctcccgatcataatcgggaacaatgacaaacccaacgatcgaatgattgagaaaaccaaattcggaatacacagagtcctcccgatcataatcgggagcattgtcaaacccaacgagcgaatgattgagaaaaccaaattcggaatacacacagtcctcccgatcataatcaggagcacttacaaacctaacgagcgaatgattcagaaaacatgtactcggcatttttttttttttttttttggctcggcatacccaaagtcttccctatcgtaatcaagagcattgtcaaacccaacgaacgaatgattgagaaaaaccaaactcagaatacccacagtcctcccgatcataatcgggagcattgtcaaacccaacgagcgaatgattgagaaaactaaattcggaatacacatagtcctcccgatcataatcgggagcattgtcaaacccaacgagcaaatgattgagaaaaccaaattcggaatatacacagtccccccgatcataattgggagcactgacaaacccatcgagcgaatgattcagaaaacatgtgctcggcatacccatagtcctcccgatcataatcgggagcattgtcaaacccaacgagcgaatgattgagaaaaccaaattcggaatacacacagtcctcccgatcataatcgggagcacttacaaacctaacgagcgaatgattcagaaaacatgtactcggcatttttttttttttttttttgactcggcatacccaaagtcttcccaatcgtaatcgggagcattgtcaaacccaacgaacgaatgattgagaaaaccaaactcagaatacccacagtcctcccgatcataatcgggagcattgacaaacccaacgagcgaatgattgagaaaccaaattcggaatacacagtcctcccgatcataattgggagcattgtcaaacccaacgagcgaatgattgagaaaactaaattcggaatacacccagtcctcccgatcataatcgggagcactgacaaacctaacgagcgaatgattcagaaaacatgtactcggcattttttttttttttttttttgtactcggcatacccataatcctctctatcataatcgggagcattgtcaaacccaacgagcgaatgattgagaaaaaccaaactcagaatacccacagtcctcttgatcataatcggaagcattgtcaaacccaacgcgcgaatgattgagaaaaccaaactcggaatacacacagtcctcccgatcataaaaaaatcaatcctaaaacctgtcaaagaaaatttgatccaccgaatgcctagacggaacaggcaaaagggctaaattcttctgggctgtgacatttcatcagtcatgctatgcaagtcaagcaggcctcaactacacatctttgctttacctattgcagtactgggccactaaaacaaacctagtaaataggtaggttgccgaggtgggcaagaacacagtaaaatagaagaactgcaggtgtacatgatccatatgtcagtgtcatgtaaagtaccaatcacaacataaacacccaaccacactcccggcaaagattaaccaataaacaaggcaacctgttggcaagcagtaacttggtcaacacaggcacaaggcagctaagtctgggctacaattgcagtctaccactacaatgcaattcataaccaaaccagacgctatggaaatcttggaacggtagctaaggatgcatgccatatgggtatgcagtactgtccgccattactctgacgcaggtgcaagcgggtaaccatcatgcaggtaggcaggcctcaggaaggtgcaggcgggtgcagagctgttcgccagtactccggcgcaggtgctggcccggcgcgtgtcctggtctggtctggcaggtgcaggcgggtaaccgccatgcaggtaggcagacctatccagtgctccgagcgccagtgctcctggctatctgcccagcatccaccagagaaggtgctaggcaggacagtgacagtgaaatgcattgcgcaaagggtgcgagaattagaagcaactcgggggttattcacaaccacccggtgctaatgcagatgcgcagcaaggcgatgcagaaagcaaaaggcaaagcagcagatcatgagaacagagctgaagtgaattcccatggcagtgaaatgcattgcgcaaaaggtgcgagaattaggtgcaactcgggaccatgcagggccacccggtgctaatgcggatgcgcagcaaagcaatgcaggatgcgaaaggcaatttgcgcaaggcatgaaaggaggtgaaagcgcaaggcatgaaaagaggtgaaagcgcaaggcatgaagcaaagccttaccgacttatcaaaacagtctttcatgcatgcgcagcaagggggggcccggcaaggggggtcaatcaatgcacatcaaggggtcatgcaaaggggtcaagctgccaggtcatgcaaaggggtcaagctgccagagaaggtgctgggcatggcaatcaatgcacagcaatgagtcatgcaaaggggtcaagctgccaatccattgagaaggacaccaaggcagaggctgtgcaatcggatggagacaatgtagacattgctaaggaggaggagatggaggagaaggaagatggggatgggggcatggaggaggagattctagtgcagcgattgtacaggcgctgttgttacccaacaagttagcattggccctctttctacaacgtgatagcctgtcataagtactaagttgtactttcgaactgttgagttgtgagttgtgagaaaaataattatgagcaatgcgttcaagactttgtaaacagctttcaccttcctcttgactgtcctctacaattgattttgtattggaatacttcgaaggaactttctctctctccaaacgagcaaatcaatgttacaattgaaattgaagggaatagtctttttctccggaatgcaacaaaacaatcttacataataaattgtaagatattttcgtaaaatacaccaaaaagcaaaatcaatcaatttgcgaaaacgatcttacaaaataaattgtaagatatattcgtaaaatacaccaaaaaagcaaaaccaattaatttgcgaaaacgatcttacaatatttatcgtaagatttcagtaaaataaaaaaaacgttcggaagcaggaacgcccattaattgggacttatggtcccggacagctcctagggttgcattcgtgttagatacattggttagtacgtaagaaatgcagagaattggtcttggcgtccatgtacacgatggaggacgcacttccatagctcatgtcaaatccacgtgtgaagatcagctttggcaatgatgttatgtcgaatgagcttgtgtacagccagaaactgtatgtgaacttgatgccgttctttgatgaagggatcttggtcgagctgtacacgaacggctttgacaaactcccacccgcgtacaacttgaacgtttttttgagtatttcttggctgatgaggtccttgcgtgtgatgcggcgagcgatgtagatcaacaggagagtgcttagtataatgatcaaaataccgaatagtatcatctggttcgcttgggttccgtagagaccggtcttcaacttggacatcaaaagcccaaggctccatgccataggatcggccttgctaaccataggatcggccttgctaaccttcggtctctgttgagaatttgacattcggtgtatttattaacagaataataacatgaaacatttttcttaaacgatgaatcttggggcttttctcggaacacgacaatacacgataattccaaaacgttgcccgagcacaacacagttcatattaaaaaaatgtcccagtttatttaagaacaaatctgtcgcagtagcatgtcctcctcgtcgtatagcgagatatcatcttttgatagtcacacaggttacctactgttgccttttactcaggcgtctccgtgtcacaattccacacggtggaacttcgcaagtgacaacgcattcgaaacccctgcccccttcaccaagcaatttggtggtccggtctatgaagcattctcagaacgacgtcgtgatgtccgatgggcgccagttcaccgactaccgtccccacgacgtcactcaactacaggggcgtaagacgatgtcctccacgcaagagttcggacagatgcggcctcgcgaaggtgaggccattcgcgagaaggagcgcttatcggcgcatagaaacgttcaggccacctgcaagttcggtcctaatgatatcgggactatggtccctgagcaagacgttttcgtatgcaacaagatcggttgcgagcgcgtggacacgccttactcatgtttgggtatcgggacggggcgtcgaggaggctaagattttttaaatttttatttgaaggactgctacatccttgttgaatgcgcgacacgtccttgcacgttcgccagtgcatcgtgggtatggggttcacgaaattattggggtcgtactctgcatcccctgagcaccttggggtctgccatttgggcgcgctttgttcggggctctcgttttttctaggaggcaggaacaccgtctggtcgagtgggaccgatactagaggttggtgattgtcctttgtgaggatagtggtatcgatgccagactcgaactcttggatggcgtgttcttgagggttgcggcacagccactgccacctgttccaactggttcccctaagggtgcttgcggggttattcaaacgtgtgtcttgcacgtcgagaacgactgacgagcagtcgggggatgtgcgatactcggcacattccggtgtacctttctggaattgccatgcgggcgacctggatgccttccttgtgatgccaaggagttcggagtcgatgtccaccatgagccggttcccgcattctgtgtgcccggacgtgcccatgaccatgcgagcgtccctcgcgaagcagggggtgcagtgcgtcgccggagtctcaagttggtatgatccgggtcctcgggactgtcctaggtctacgcggtaggctccttcgtcgtacttgagatggttgaatgacgacagtagcggatgctgtctgcgttgtgccttgtcaaaaaagtcggacgaagggcatactgaggcagccatgatgatatgtttagaagaacaaaatatttttttttgcatgttcacgctccatgttcttcttgcaattaatgggcgttcctgcctcccggaggattttttgaaatttctactcagaatttagagcctacggaacgactcgctagcctgagatatcagcaacgaggaatcacaattccgctccagaccatgttttgaaaccagtcaaaatccgccgtgaggcaggaacgcccattaattgtacacgtgttccatggacaataaatacatgggcggtcttaaaaatatacacaaattgcagcacaaacaattataaaaaaaacaatatattctttgttattgaacaataaagggaagctttaagcggatgtaggcaaagaagagtcaacatcagacaacaaacaatggacgttgtacgcagaacaattatcaacataccatcgtctttcttccgctgaaaaattatctgcatccgcaacagtaatagactgcaaaatacgcttcaacatcttagtcagggtagcgttattcgccttcaacactgcaagcttttttgtatatttaatatgagatgataagatactgatagtctcgcgttgagattctgcaatactatctctagattctgcaatatccttgctagattctacaatcgccttgatagattcatagtatacactcggacaagggaattatgttacataatagtggttccgataccgacataagagtgtatacagttgttctcaaatatttttgggaaaatcggtatcaaataaaggatatatctgaatgcaaagggtggaagcttttgtacacacctccttattgcccaagagctaatgcgattgaacaaatatttggaagcatgaagagagactacagggtatcatgtccattgacgtcaacctgtaatttcgattacttcatgcaaatatgttgcgttctagaaatgtggaggtataaagacttgtcaaaatatatgattaatacgagagattgggttaggaatgttcgagagagcctgtctgcagatccagattacatcaaaacgttttcggggtacaatttgtgatggagaatgaggtctgcgagtcatcatcgttggtacatgaggctgaccaacatgatgacgttgcagaacttgtcgattatgatggggaggaagacgaggagtgtgcacctgggcgagcgatttgtgtggtcaagatgaaattgagtacctttattccccatgattggctccgtagaaagatagacacactggtactggacatgaacaagttgcttggagagggttatattttcgcaaatttccacattgctcgtctttttgagaatggtatagctgtccctcctgtaaatcgcaacttcttctaccggtgccttcttgcagtcagtaccaacaaatgtatgggatcgaatcttggcgaagacttcgagaatagtcgtcttctgttcgacctgttaagagagcaggggcaatccaaagttgacattcgggggagagtgaataaccagatcgttgcagacctgtctattctcatggccaccatggcctctaaccacctctggaccaaccttgagcggcgaataacgacgtacttgaagtggaagtacccaaagattgccaagcgcctgcggtcggacatcgtggctgcagtgatcaagtgccctacaaagaatctcgacgtcatcttcaagatgagccctcatacaaccaagctgccaaccaagctcccaacagctcgacttcgctcggcaaagagcgcagttgctcttgcgaaggagagggtcggtaggaaggaaccagaaggatcccctttgcgagttaggttgactaaacttcaagcgaggcttgaaaagttgagcgaagcttggctctcctccaagaaccttagggtggacgaagataacgcgaaacgcttctctgcacgcgaagtggccttctgtctcaggggggttctccctttaccatccggaaagacttttgcttctcgggctcacatgacccttcctctgtaccacaatatattgtcggagaccattgcatctgagaacgataaacttcgcacattctcgttgttgccttacaaatctggattcactctgtcgcacattccaatttcgaaaatggcctttttctatatggtcaatgagtgccacttcgattcatgcaaggcagacgttgcttccaaaaaccatcaagtaaaatggagcgattcgcaaatctgaagatagtggagacagtttctaggaagttcggctaccgcattgtgacagacggctttgcagtcagtatcttgatgaataagcctacatgtctaacatgttcgatgcctggagacgcgttgtctacgcgggcgcatgagtatatgacaacagatgagggtggcattttatccttccgtgataatgtggtcgtggctgcagtagaccctggtgtgactgatatcgtgacggtaacaggactcgacggaagtaccaattcgtatagctcggcgcaatattatcgcaagggtctgatcttcaaatctcagcgtcaaactgacgtttggaacctcaaaacggctgatatcttcggtgatgtcattccggatatagactctccgatgtctcaacatattggggcgtacgcaagattctacatgggtgccgccccaattcttcttgcccatcgtgcttcgagggggtaccgaaacctccgctttcgcaggtactgcaagaaacagaaactcattgttgagattgctgacttcgtagctccgagggagaagagcacgaaggtactcgtcggttttggtgattggaaaggtctgggggcgacaccaatctctaggcggacttgtggccctctccaagctattcgtttcgagcttcgtagccgcgaaaacgttatcatggaggacgtcgatgagttcagaacatctcaacgatgcagctgctgtgagacccgactttgcaacatggttgcactcactcatcgtaagaagcaagacggtacttgggaatgtacggaaggacgcaagcggattcacaagattctccactgcaaaagcagtcaaagcggagcgccacgccaacagagcggcggtaggctccactgcgggaagacttgggaccgcgacgtgatcgcttccaagaacatcctgatgcttacactccaccaagtctttgggagagagagacctctcgcgtttcgccgagacgcgccgagaggttccccgaaaaaaaccccaatacctgatactgatatggggacacagacggttgaacggtttaccacagaggcgactcggaatatcttcgagaacctcttcaacctgctgcaccccccaacgttgcccaaacgcaacgatctgcagtttggatgattataaggtatgtcccccttttttttgagaacaactgtacccatctctgcttaaaactaataaaaatatataaaggattccgacgcgggttacacgggtttagggaaatttctatggaactggaacgtaaaagcatggacaattctttcctttttcgttttaaacgcttacttttaccagcctgatcagcattgacccatctgtgtagtgagcccttggacactttgtatatattacaaaccttcctcagactcctcaaaaaaaaaattgtagtgaaccacggacctgtatctggtttcaggggatatcattcaaattatacagagtgtcccaaaattatttgagaacaactgtatacaattctgtatttattctttccgctcgaccaggagtgtgtccaggtccctcttctctctggggtccacaaacgttgtctggggaaccgtgtaagcggcatggtaatcgaacatttcgtgaggggcatccacgctgaaatccacattgccatcacttgaaatattcgaaagttgcaacatgagatctctaacgatgaacggacgaaattcggaaatgtctccagtcccaatgtcaccttgatcatcgttatcaccttgatcatcgttatcaccttgatcatcgttataaccttgatcatcgttatcaccttgatcatctccataccctcccgggagtgcaagcgacgtagtcagtgtttgttcttgcctccacgttaaaggcttcgttgtcgaatgggatgtccatttgttgatgttgacaattatttgagacgaagcattctttgataatatcctcaaatttcactatggattccattcgtgtttctgaaagggcgacgttccgcatacctgcgcggacaacatcgtacgatcgttgaagagtgatcatgtcttcggtattcccccccttgtccgggtggcatagcaagctaagttcgaaatatcgcttgcgtatttccgccaacgaatcggagccgccgctgcataactgttccttagggataccaaaaagggcgtatgggtccacgatggaagttgtcggttccaatgacatgttgaaagaatgaatgaataaagagtgtaaataaatggaacaataaagtttcaatgaaagagacgttagggaagaaactatcggtgcacttactaacatctatctggtttcatggacggatttctcaaacaagtggctgatctcagtgccacagagcacatcgaagtcttcaatattctgaagcactgccccacgacgcgatacatgcagaatgcgaacggaactttcgtggatatggccagtattccccaggacgttatgggatccattacacgtttcgtcgagcactgtcatcagaataagggtatgatggacgactacaacaaccgccttgcggaatgccgcctgaaccaagacttcgatcgccttcctaaatacgaggcaattgttaacctgcctatgcgttcgaattcagacacacatatcgacgcaatcaaggaatccaataagaacgaacgcaagggtgacggtgacgatgatgttgaagacgactctgaagatgtcgacgactctaaagacgtagatgaagctgatgatctcaacgacgatgtcgatgtcgatgtcgatgtcgatgtcgatgtcgatgatgttgatgttgatgtcgatgtcgatgtcgatgttgatgtcgatgtcgatgtcgatgtcgatgtcgatgtcgatgttgacgttgatgtcgaggaagatgataatgatgatgctgttgatgttgatgtcgatgtcgatgttgatgttgatgtcgaggaagatgtcgatgtcgaggaagatgatgatggtgtagttgattcaaagtctgtcgatactccgtccattgttgtggataaagatgtgtctaatgattcacgcttggatgaggcacctcaagttgcatcgatgttgcagaccgtcactcgaaggatgaccacaagcaagtttcaccttgccaagaagaggctcacgcgtaagaagaccggtcgtgtggagatgtcggaatttctcgaacccgaggagtacgacatgtcttcatgatcgtacttttaagaacgtctacggtgtcgtgtgatttaatgcgtctgttgcgttcacaaagagtctggtccaagtgtaacaatcatgattgatcttactcaagttcgatgtctcacattcgggggcgtcgggttcttaggagggttgcaaatcggatgcatcaagtattttgaagaggcgggaatcataaatcagatagacaccttcgtagggtcttcttcaggatccattgtgtctctcggtgtaatattggggttgtctagccatgacatgatttgtgtgttcaaaaacatgcagttaccagaacttaattgtatagaccaagtattcgaggcgaggggatttgacgatggttctttcctattttccatggtacaagacattctctcctacaggtcatttccttgtaacactacattcgccgaattgcgtacgcgtactgggaaagaccttgttgtaaatgtggtcaacttgacatacaacattatggattctttctcatttgattctcaccccgacagggaggtccgcttggcgattcgcatgtcgtgcgctttgcccatcattttcacaccagtgacatttgagggaaagatttacattgacgggtgttgctaccagggagtgcacgttcctaagcatgtagaggagaaactgaggcggggtgattccggtaagaacctcatactacgtatcaataatatcatgaatataccggatgagaaatacggtgacgacttcatctccttcatcattcgagtggccaactcgttcgcgcttttcgcataccgtgaaatggacaacttactctcacatgaggtatccgcatctaccacaattattgtcgatctcaacatggaacccggatttttcttagaggatatcgtcacgtttgacaggaacgatgtagaatcccttgtcgctagaggttatgatactatccgtagaaacattgcccccctcacgacgattgaagattcagaaggcaaggtggaaaacgacgaatgtgacagctagacttatcattatgataccgacatatatctttcgttcccctcctatgaacgagtgaacgatcgccctgctataagcagggataccttttgttcctgatatcgacactttgtgagaggaagagacaatatcctcgattatgaatcgaatagtctctaccaactttactagaatcacatgcaagggttgttgtacaaaagaacgcttcgacagatctgtaaatcttgcattattgacgactctgtttacattgtcaatcactcgttcctccttcagcatcaactcgctgaaaacgtcacctcccggaacggaaaatttggaaggtgaatcatttgcattcaaaagactagagaaggaatacggacctgccactggcccatctacaatcaatgatcctacagtcttactgttcctattagtagtagagttattcgacggaggagcaccttctgaattcctttgtttagattggtttgatgtttttgaagcatcatcagtatcaccgacaagcacccttacgccatcatattcctttttagcgttcatatcggttgaataaacaaagaagatgaccggtttgtcacttgtacttctttacacataagtaatttttttgagtttttacaaccaaatcacctccacatttaatgtccgttgtattcttccacgtctactactcctccgtcttcttccacgtctactactccttcgtcttcttcaggtactactactccttcgtcttcttcaggtactactactccttcgtcttcttcaggtacaggtactccttcgtcttcttcaggtactactactttttcaggtactccttcttcttcttcttcaacttcttcttcgtcttcttcttcttcttcaacaccgtccgactctggatttgatatttctccttcatttgtttcttctcccacgttcattccatctgagggatcatctgtttgatattgttctgtctctgcaagaagtctctggaacgcacctagtatctggacattggtttcgttagctgtcttcagttcagttataatcgatgctaacagttcgagttgttgcgatgaatcactttccatattattccacttttctttttatgcattttttttattctcgaattgggacggaaaccgcgataaatggggtttcctgcctcggcggacttttttttatcagaataaacgactcgcgagctacagatatcagcgccttttttctgaatcaaccattccgctccaggaccatgtttccggaaccccacaaaatgacatgacaaaaacaatgacaagacttcacccccccccccatgacatggcccaacaatgacatgacagacccgaaccaatcacgacgcaacaagacataacatgacacacacccaattcttacaccccaacgacaattttctaaaaggcgatgtcgtacatttattcaatactgtacacaggggttgttttttcagtgtagtgtattctatgggagggcagaacacttgcagggaacttacagtcaacggaatactaaaatgaaaccgcttcgtgtacggccaccaccttacggtttgtaaccttaattggtaggtagaccaggcagtggaaacacaatacgattttgacgcaccaaaattgaaggatgttaacgagaatatcgtggttcttttttagatcgcggctctccatcctgcagactccgtatcgttcttttgtcggtactttcgagagtgtccattgaaggaccagccgcacttaagcgatcgcctcttccccggtaccgtggcccaaaagaacacggggtctttgttgatgtgcaatgcgtcatgaaaggaggtttctttgctggacgggccattttgtaggaccatccactcgtacactataacgtctgtcgacgccttataccgtttattgggatgtttcattttactgttccgccgactgtagggtttccttgcggattgcggattaaaatgaaacataagtaaattgggagtaaattggggcattgagttcttctgtcgtgaagctttttcggatctgtgacagttggatggtcgcgtccgatatagtcatgatatcgtcggtgttttttgaggcatgtaataccggagtttctttgtgggggtcgaatgaccccatcggcatttgtccgatagtgacgagatttctgacgaaccccgatagcttgtttatgacttttttgctggtgattgtcgagtgatccgaattgcggcgatggacaagtttcctaggctgtagagtcgctgttggagagcggaaaaagtccacgcaggtagactgttgagtagggtaagccgcaagcccatccaagtttgtttctgcttgtggcgtttgttgcgtgtgttttggtttccctttgagagggcttttcccatgatttgcggtatagtgcggcgtgagtcttgggggagagttcatgcttatggggctttggaagtaggaaaaaaaaacgaagctatcgaaggtttgtgctgaaaacgaaaatggtagggacggtaagattggttaccacagacaggtctaaacgagttcagcgcgacgtgattcagcgaaatttggcaccatggtaatcgtagggtctgccaagcgccacaatgatagatccgtctggcagcgttcattccataggatgttgttcaacttgacatcctccgtggtggacgaatcccgtacaatgaaaacaagtatagagtgtgtctagaaaaggttatcgctacatcgaggaaattcgccacctaggcgtgagcttctttatgaactctgtttgaccctaaattcacctgtgaaccgcctcagaacggatagatttcttatgtaggggtatgatactgttatatgtaggtgtcctccacgtgcatggacataaatgcgtctacaggttttgttggtctagccatgactccggtttgaagtttaatatgttccaagatgttccattccggctattgctctttttggatgagtgtaaggcaggatttcgtgtactttgttttctcttgacggacggtcttcgatcccacaaggtttagtgaggggataggactgagacaatcgcgtcgaggttctaaggcgcaggtctattaaggaggtttttgaagttccttttgacgacttctttggatagggtacgcatgtgtcagtgcttctgaggggaatgttgtacctaaaccgacaacagttcatctgtgtgtagttgaacgtggccacgaaacgaatacggtctccctccggatgatgcaacaatcattttttaaggcgttcgatctcgcaaatgcccgttggaaaaatcccttcgctaattaatatattcctttgctatttatttggatgtttcattcgtaagatttaaaaaaaaatcatgaaatcaatgagaacagacggaccagtggttaaagggaggggaagatcaaatctgttgatcgctttcgctatatgttgatatctttcaaacctccttacagttttgagacgatcatgcgaagcgtaaaggatatcgcctaattactacgggattgccgggagatcttgaaagaagcaagatggcaaaaaactgagggaggggggggggggataggggggcgaagccgatgaattcaaggaaaagaccggggacatcttcaaaaaggtggttccaaacaagttcagtaagtgggaccccatttgctgtgagacacgccttgccggacatgttgcactccaaccatcgtatagaggcaagcggtactagttttgggaatgtccggaaggacgcaagcggattccacagattctccactgccaaaaaagcagttcaaagcggaggagcccatgcccacccaagagcggcggtaggtccaactgcggaaggactttggggaccgcgatgtgaacgcttccatgaacattccttgaatgcttacacttccacaagtctttgggagggagaaacgtactctcgcgtttcgccggagcgctccgagaagctctcgaaaatacacctgaatactgatttgggggcacagacggttgaaatgtttccaaagagaggcgactcggaatattttcgagaaaacctcttcaacttgctgccccccccccccccctacgtttcttaaagcaaacgatcagcaggtcgatgatataaggtggtgtaccacttttttgagaacaaatgaaattataaggggtggtgtcccattattttgaggaacaagaagtgtaaaaagacacagggtcatctcattttgggtttaacattgggtttgtatgaatggggatcccgtacatgtttttctcactgcggaggcattatccttcttgtgttcgcgatgggtttgcgctccctgaccgagacgatcacgtgtaatcgatttaacgcggtagtccacgacgctcttttagttttcccaaaaaccacacccgagcaggtcgtccaacattcgatggatcgacttggaatatctgtatgtagtaccagtccaagcaaacgttcgttgttagtctctgtagatggcacagctctctaggaagatggcagcagatgcacaaccagcggaaaatcgtaggtttgtggcacggaattgacacgcgacgggaggacactgggatggagatacgaacaaccatccccagaaccgagatgaaacggacattgacgtgccacatatctctggccacccctcatgcaccacctcgccgggtctccaaggggttcttggcgcggtttgcgggcaaacatgcccttctgtcgaggtggttctgttccaccggaacctgcgatttcaggggagggtgagcagaagatcttagggaatatcaacgccttcgtactgggattcgccattcggctatacgtgttgtgcacggttggacgcggacctcatcctaatgtcggtgcttctcctcattggaacgcgatggagttgtaccgtgagactcccggtggtgtggaggtgactgcattccttaacttgcgatcgctccgcactcggtggagcgcaaaaaacattaaacgtccctgacttcgtcgtaatctgtctattgctggaaacgagtcaggcagggcattcggttgagtgctttagctcgtttgttaacagtatagggagaagaagacgagcaccagcacgagcgagcgaggggggatgcttggtacaatgagcagtgcagcgagaacgtacacgcactgtcgaagaagaaccggttactagtagcagtgtagttactaatggttccggtttgtatgctgggattgatatgcaggagggggggggagaaaggtaccctttggagaatcctcagggagcggccatagtcgcttcgtgcaccaacgccgcaatgcgatgtttcttggagtcgacgtactacagcttattttgtggggcctgtgcagtgcagtggtacgatgcgcgtattcacgatggtgttctgcgtgggacttggtggaaacggcgtaccttggtgaccaaaaagctgtctagtgtgggtgggacgtaccgtatgattacgcggccctctcgacttggacatccaaacactttctgagcgagtcgacccggcattataatcaggaactcgatgaccacttctctacacttggaccgcacactaagaggtttcgtcatcccgtgtacaaggcggctctaacaatgggggattgacgcggttgataggatcaactattctcttctcattctaccgcgtctcgccccttggcgccgcgggggacgtataaggtgttcggcgcccgtccacccgatccg

SEQ ID NO: 243 - DNA, 9125 bp, unidentified
  misc_feature 1..9125: note = Fanzor polypeptide
  variation 2355: note = n is any nucleotide
  variation 2507: note = n is any nucleotide
  variation 3573: note = n is any nucleotide
  variation 3584: note = n is any nucleotide
  variation 3586..3587: note = n is any nucleotide
  variation 3676: note = n is any nucleotide
  variation 3701: note = n is any nucleotide
  variation 3731: note = n is any nucleotide
  variation 3738: note = n is any nucleotide
  variation 3740: note = n is any nucleotide
  variation 3743: note = n is any nucleotide
  variation 3755: note = n is any nucleotide
  variation 3764: note = n is any nucleotide
  variation 4814: note = n is any nucleotide
  variation 4824: note = n is any nucleotide
  variation 5069: note = n is any nucleotide
  variation 5076: note = n is any nucleotide
  variation 5120: note = n is any nucleotide
  variation 5230: note = n is any nucleotide
  variation 5232: note = n is any nucleotide
  variation 5283..5284: note = n is any nucleotide
  variation 5290: note = n is any nucleotide
  variation 5323: note = n is any nucleotide
  variation 5343: note = n is any nucleotide
  variation 5360: note = n is any nucleotide
  variation 5387: note = n is any nucleotide
  variation 5397: note = n is any nucleotide
  variation 5415: note = n is any nucleotide
  variation 5469..5470: note = n is any nucleotide
  variation 5482..5483: note = n is any nucleotide
  variation 5528: note = n is any nucleotide
  variation 5554: note = n is any nucleotide
  variation 5564: note = n is any nucleotide
  variation 5632: note = n is any nucleotide
  variation 5663: note = n is any nucleotide
  variation 5766: note = n is any nucleotide
  variation 5784: note = n is any nucleotide
  variation 5863: note = n is any nucleotide
  variation 5869: note = n is any nucleotide
  variation 5872: note = n is any nucleotide
  variation 5886: note = n is any nucleotide
  variation 5921: note = n is any nucleotide
  variation 5924: note = n is any nucleotide
  variation 5959: note = n is any nucleotide
  variation 5974: note = n is any nucleotide
  variation 6032: note = n is any nucleotide
  variation 6077: note = n is any nucleotide
  variation 6102: note = n is any nucleotide
  variation 6131..6132: note = n is any nucleotide
  variation 6141: note = n is any nucleotide
  variation 6247: note = n is any nucleotide
  variation 6631: note = n is any nucleotide
  variation 6645: note = n is any nucleotide
  variation 6978: note = n is any nucleotide
  variation 6993: note = n is any nucleotide
  variation 7011: note = n is any nucleotide
  source 1..9125: mol_type = other DNA
aggtctttagcagaaccgacaaaaggcaaattgtgtgaactgcagctggttttggagcctaacctccatctccaacccacgatttcaactgtgtaggatgccaggaacccaccaaagcgaggcaaataaactgttcaggttgaaaacatgtgagctgttcctctgctactaaatcacagctataccgttgataaaacggagtcacgtcgttcatttcgggttcaagtccagctacgcaactcatggaggcatcaagtgaggcggtttctgaatgggatgacgctcgaggccacttaattcgacaacagcaggccttcgccgataccaaaagaacgcgtacttgatgcgtgtttggagcgaagcctctcagacaaatcaagttgtgttggctgctacgattgctcagtatttctacgccgagttacctcctcaacatcacttccgcgttccgttcaacttcaacgcactatccagcgctgattgtgtatctaagtttcgttttggcaaagctcaaatcgagtccctcgtgagcctcttcgcgctagatgcgataaggactcgtgaacgcacggcagcgaatggagttgaaggcttgtgtattgtcctgtacaagttggcaatcccgttgcgctggaaagatctcgaatcgttttttgggcgaactgaaagcggtctttcaaacttgtttcttcatgtgttggatcacctggagtccaagtttgcagaccttttatacttcaatcatgaatacgcagcaaaccatgtacaaacgtacgcggatgctgtgttcgatgctggtgggtcaatgcaaaacatgtgggcgtttgtagatggaaccgtacgaggaatttgcaggcctaaagctcgcaacagtcaacgtgatggaaaatatcgaagccagaaatccgtttacaacgggcacaaacgcaaacatgctctaagataccagacactatcaactcctgacgggctcattacccatgtgtatggaccttttcctgggcgaaaccatgatattaagttgttcaaggactcgcgaattgctaacgtcattcgcggtgatgctcggttcaagccctatcgcatctacggtgaccaagcgtatgggaacgattctgtgctttcgagcccattcacaggggctgtggcgaacctttcgcgagaacaaaagttagtcaacaagagcatgagtaaggtgcgcgtgtctgttgaatggggatacggacaagttgtcaattattggactgcactggacttgaaacgacaagcccgctcgggtacccagcctgttggatcgatgtaccgcgtggcgattttgctaactaattgtttgacttgcgccaatggaggcaatacgatcagtgactacttcaggcttccaccaccaagtcttgaggagtacttgaaaggcagttaaattcattgataaacttatgtcttttataggagtttcctacttcttgtcactactattgagtgacttgctgaaaatcgtgacgcattgcaatatcagctgtctgtttcgctcctcagcttcttcacgtgccctgttaaggcgttcctcggtgcgctcacgagatctttctcgctctcgctcaaatgctaggcgattttcgtgttgctctctttcgaatgctagtcgttctgcatgctgctgctgctgctgcaattgcatttgtcgatcaaactgctcgcagcgcatctcagcgtcgagccgaatacgtttctcttgcctgtcaacttccaactgaaaaacactttttcggcgtcctgctggaactttgcctggagttgatattgagctaactgacggagtagacgccaccgaagcagtgccatcgtcgctatctgaagaagcatcgcttgatagtatgttttccccccgacgagctcggcgcgtaatagcgtctgacacaatttgagaagcgcagagattagtttgagcttcttcagcttgcttcttttccttgttcgactgtttttgggccttgaaatccttttctagagacacatactgccctactaggccaggtaaggagtcatagtgactctgttcgttggtagcatttcttgcctcctcgataccactgcctaaagctgcacgaagctcacccgccgaccagtttttcttcaacagtcgcacgcgatcctgtacctgtttatcgactagactaaccttgacagcagcactcacacacttcgcgacttgaacccatactgcagcagcctctccgtatttggcggtgtatggtttctgcttgatagcctcgcgcatgagctccttgtcaatgtcctcagagaaacgaaataccatcgcgcttctttcactaattcgttgaagtaacaatcctaaantgaacccctgccagatggccacaaatgcttcactcctcggttgtgctaaagataaattcaaacctggtgaagctcaccatctgctgcggttgtgatgcaaacccactaggttctgctaagaacctctaatgaggcctgctaataatagaacncagctctgattacgggtgtgctcgtttcgagttagacaatttgtcgttcttgtcgccgaaccgatcgaagcgaaaacaagattaacgcgtcctgctgtaggggggaagggctacaatgtgaaatagtagaaatattatacaaagtcgtgctgcgcccgaagaaccactgacatttggtcaatcttgctgtataaaaagatgaaagtagatttttttatagtcctgtctaaaacgaagttgtcttgccggcagaatacaaatgccttcttataaccttcgaatgatgatgtaagttcccggaggatagattatctaactgtctgtcgtccaggtcgactcctattgtattacataatgcgggagaacttgactaggtaaaaaaatacagttgcactcaaataaccaaagcgaatgcttagaggttgtagtgctcgttgttgctattaagcggcacaagagtgctaactcaaacgcatgctgcgtgggctttcgacttctttattttaccctttcgaatacgataacaatagtgctagcaacgctacaatcacggacgcactgagaaaaaaacgattactttttctcagtggcgcatcgacgccaactacgaactactaatgatcctatgtggagggaggctatcgaccgcgggtccactgaggtcgaagtcctctacaatgcggtcgtgacgacaatacattttatttcacacaagctgcagtttcggctaatcattcgaaaattcatatctgttaacacacgaaataacataatgatatttctccatgcagtaacaaggcttacttcatcaagtgctgctgcggtaagtgtaagtaatctccgtttttatttatgtattcttgggcgaccgtttacgtgtttctattatcgcttttgcctcaactcgcctccttttgtagatcttataaaagagcagacaacaccgtatccatactagtcgttggtgaacgaagcgcttgaatgcggtattgatgtagtatatgccattttttcttcacacgacaccaggggtcataagagctcttggaactagaatacatttggntgccgcgacgntnntataattccacatttttatgtgattaccgggtattctgttcgtagtaatcggatttcttgctttgatttgcgtgtggtgtgtgacaagncctcttctactgaaagggtgtgtgnggggggaggggggcaaaaaagatattactnactggcncnttntgcgtgaggacncgagcagantacgaacatcagtgattaggtgcacatttataggaatataactagggctgtgcgagggctgggatagccaacagttattaaagaggctaaaggtcgcgaacagctcataccggtaaaggtatatgaaacggcggttaccagcttcagtttttcggcttcagttaccgtcgagcgaattaacctgatttgggctgtcccagcagcacagagttactgctatcccagaatgaatactggtaagcaagaagagccggtccagagtaaattatgggccggtctactatttcatttgatatgacttaatcttttctccgacggtcttcattggttgcgactaggttttggcacaatgatttttcgcacgaagcgtgcacagtgagtggataggcataaattttacaataagtcgtcaagcacgtgatcgaaggtcgagcccaatcacacgctttctacgtgacgcacagtaggagaatatttgcaaaaataagtctaatctcagttccaactgctacagttaaggacgacgaagctgttggtcagcggtttggcgaatctgacgaatggtttggtccagtcgaaattgaaatccggcgggtcaaaacggcgaacctgctgaacaggctcaagagatcgtgcttaaatacgcgttctcaaaacttgctaatcgtgttgggtttctggggttgcaaccccagtgtcgtgacctaaagtgtcggatttgacctattttattggttaccgaaaacgtaaatgatctattccaaaataataactgacatggagaagttcttgtaacttaagacggagatcctccagcgaatggtgaccgagattcgaatctaccaccccaatgccggcatcagcgcagcaacgaaagcttctacaagaggagcacagccaaacggagtaattagtaagaaggcgaagcaaggctgagaaacactagcaagtactgataaaatattgtctatcatttctaaagtatctgaactcatgttgaagtctcccatgttcaaccggagtcatggaagacttggcacttcgtcacantatagctcgnagcgccctacgaaagatctatcacttgtcatttggcgagatgcctcgcaagcgcaaaaaaaaaaaaaacaaaaaaccacagcaacaactacacagtatgtgtaccagtgcctcagtcgcaagttgaatcaagtctgtggtctggatttcctgcgcaaagagctctagcgaacgaccatcgttctccgccaggtggggctcattggatggaaggtcgggggaatgtatatcctccgcagccttgancagggcnaaccgcttcccgaactcaacgcaatgtttttctaccgatgctgngctgcttccctgggctcgactgagaaacgagatcggtacaagacgaaccccaaataccccgacctccacaagactttcttaatgtactgggaacttcgacaacagcttcnancccacgtggcaccgtcgctggggtattgcggtgccatgataaacgaaatgnncacganaatggcggttaatactgccaacatgttggctcnacacttccgtcggcgactgnaccaatacgttagattncggtacgcgaaagaaggaaagattcanctgagcttcnacaaaaccaagaaacttnttgatagctgctatcgtgtccaagaagttcaggagtttgacacaaatggcaatnnaacagctactannaaaatgtggggtgcttgggataaatggcgaacttcagaagagcgngagttacgtgagtggctcggtatggngccttggcantggacaattcgtgagaatctaggttactttgtgacgaaggtgtacgacatgctttcgtggatggaggnttttgtggagaaacacccaaagacaagaggngctcatctctactcgttactaccacaatcgagctctttcataccatctcacgttacactgaacgcgacgactttgtacgagctcttttgtcgcatttacgatnatccggtggcgaaaaaangtcgtgaatggcgatctgggactggaatgcagaactaaggcagctcgtgctacctggacactaaatcgcgaagttattntccgcnagnttttcaacgtaacngagttggagaccagaacccgcaagttcggtaaccnagncacgacggatggctatgcagcttcggtactactcnagcgcgaaatgcctnccacagaacccacagacaccaatacggctccaaggaaaaggaggaagactagcaaaantcgattaacgaatgttgtggagaaagatgccttggatttggcacntgacaagttaccggaaggctacacnccagacattttcattgggatcgatcctgnngttagaatnctggtcacggctgcgtcgactggatatcttccacagcaacggcaaggccgacagtgcaaacaccgccacagacgtcgtcgctttcgcaaaaaagattcgaggaagngcattgcgaagaaccaacacggacacggtcagcgagttatcggcgtcagcacagctgagtactatcacctggccaagctcaataagaagcgcgtatgggacctcaacttgaggaagacagaacctgcgtacgttttgatattgaaggaaatgccaagttttaatacttctcagctgacaacattcatggatcgactccagtactttgtgaagcacgtgggctttctcgtctcgtattcgaccaaaacttcgtttcgaaagtggagattcttaaccacaagttcgaagatgcgggcgttgactgcgattaccaagcgacttgttccgatccggagtgcgcaggtctgcatcgcatttggtgattggagctgccaggacggtctcngtggaaaccctagngctccagtacaggcactcaagaaagaactggaacagcgagcgacagtttgcccatggacgagtttcgcacctgtaagctgtgctccggctgccacaagcacctcctttcagctcggctattgacaaaggtgaaagaccgatagaccgagaagatctcgattgtcttggagacgtcttgtgcttcaagaacagtcgatgcaaggcacacttctggaatcgagacgttaatgcagcgagaaatatactagagttactcaagtgcaggctttcaggcctggggagactggcagctttcgagcggtgactgcgagaccaagatcgtgattggaaagnccatttcttagaaanatgctgcactcgaagggngtgggctttttgtctggggacatgggggagcatccactcacacggtgtggaggcgcacaactgcttcgacacaagaatccgatacaagatagcgattacgtaccacgagttgtatgtagccagcttgtaacttaatggttaaatcatagaccccgaatgtctgcgaattcgacacacctgcactgtaatttgcaaagctgatgtaaaacagcatttaaatggcccagaggcttcctgctgtagtttatgtgcaaatacaagcacattcttcaagggccggatcatggtgatcccgtagaatccgggtagcagccaaacgtgaccctcatgttctccacaaccgatagccttgtcattacaacagtcggtcatctagataaaaacggtaaatatcagccatccctcctgtataaatggttgattgagacctctcgatatatcaagtatactcgatactaatctccctggttctcgaagatctcggaggagcttgagaacgtttggtatatcggtgaaagcatctacagaagacgacaattttgaagacagggcgtttggttcggcacagattaatgaggtacttaagacagggacaaagaatctaaagaaggtcgcggctagcgcaaggctcatgtttacaaaggcatgtgatgaagcagaggaagcttagtacttagaagtaaaattgaaaagtgaattgttttcttgttaactactctattgtagctaagcgtcacacgcaggcacggagagtattgctacgaggcttgaagaggctcagcatacgtattggttgcttcataaaaacagcgcggatgacgttatcaagctgcttaatctgaataaggaaggcgacaacgtgctctgaatctctttgtggagcattggctgcatacataaagaaggtaaacgaccagaacccagacgaagcgatattctctgtgttgaagacacactatgacagtgacgaaatactagcaaagactctcgttggggctaagatggactacagaatggttacaaccgctgcgaaattggagaacatgcaactctcgagatggcggaatgatgatagaaccacggaaactgtcttcaacctgctgcggttaaaccaggaaggaggcgggttattgataagcaggttgctagacacgtagatatcttacgcaactttgatgaaggaagacccgaacaaaatcttgctggtaaaattggcgactcgctaccaagacgagaaatcgctaacgcagatgctaacttccaacgcagaaggatatcaatactcgatcaactgcctataatttattgcaagcacagatggatcagtggaaaatcagtcgcaagacagctgaggaagttgttacgctcctaaaactgactaaagatggcagcaacttcctgaacagccccgtcttgaaagcttgggtatctttggtagagaagttgaaggaggacccgtacgagttaatgttttccaagctgatgaagttttataatgctcataaactggccctacttctacgctggtcatcggtgcttgacataacgggaacaacgagtaagctcgaggagtttcaatgtaaattttggaaggaaagcggcaaaagcgctgatgatattttcgaacgtttgcggctgaatcagaaatctgacggctttttaaacaacccagtgtcgcgtatttgggagatctacgtgagaagattagatgtggaaaccaaataaagaattgttcttgaaattgaaagaaagctacagtgatgaaggactggcaaagatgctcatagctgctaagaaagattccagtacgacctacatcgctgaacgtttggaggacgtacacctccagtactttcaggaaaatggcaagacaacagaagatgttcataaatttcttcgattggacgaggaaggtaaaaacgctcgtgaatccgccgtcttcagcacgtgggcatcttacgtggctaaatccagacaaggcaatgttcttgatcctacagaagaaatacggcaacaaacgtttggcggaaatggctagtcaggcagaggatggcagtactacaaacagcggagtcaggaagagatttggagaagtcaacagatgatagcggatg

SEQ ID NO: 244 - DNA, 16174 bp, Phytophthora sp.
  source 1..16174: mol_type = other DNA
gatgcgataaggactcgtgaacgcacggcagcgaatggagttgaaggcttgtgtattgtcctgtacaagttggcaatccgttgcgctggaaagatctcgaatcgttttttgggcgaactgaaagcgtctttcaaacttgtttcttcatgtgttggatcacctggagtccaagtttgcagaccttttatacttcaatcatgaatacgcagcaaaccatgtacaaacgtacgcggatgctgtgttcgatgctggtgggtcaatgcaaaacatgtggcgtttgtagatggaaccgtacgaggaatttgcaggcctaaagctcgcaacagtcaacgtgatggaaaatatcgaagccagaaatccgtttacaacggcacaacgcaaacatgctctaagataccagacactatcaactcctgacgggctcattacccatgtgtatggaccttttcctgggcgaaaccatgatattaagttgttcaaggactcgcgaattgctaacgtcattcgcggtgatgctcggttcaagccctatcgcatctacggtgaccaagcgtatgggaacgattctgtgctttcgagcccattcacaggggctgtggcgaacctttcgcgagaacaaaagttagtcaacaagagcatgagtaaggtgcgcgtgtctgttgaatggggatacggacaagttgtcaattattggactgcactggacttgaaacgacaagcccgctcgggtacccagcctgttggatcgatgtaccgcgtggcgattttgctaactaattgtttgacttgcgccaatggaggcaatacgatcagtgactacttcaggcttccaccaccaagtcttgaggagtacttgaaaggcagttaaattcattgataaacttatgtcttttataggagtttcctacttcttgtcactactattgagtgacttgctgaaaatcgtgacgcattgcaatatcagctgtctgtttcgctcctcagcttcttcacgtgccctgttaaggcgttcctcggtgcgctcacgagatctttctcgctctcgctcaaatgctaggcgattttcgtgttgctctctttcgaatgctagtcgttctgcatgctgctgctgctgctgcaattgcatttgtcgatcaaactgctcgcagcgcatctcagcgtcgagccgaatacgtttctcttgcctgtcaacttccaactgaaaaacactttttcggcgtcctgctggaactttgcctggagttgatattgagctaactgacggagtagacgccaccgaagcagtgccatcgtcgctatctgaagaagcatcgcttgatagtatgttttcccccgacgagctcggcgcgtaatagcgtctgacacaatttgagaagcgcagagattagtttgagcttcttcagcttgcttcttttccttgttcgactgtttttgggccttgaaatccttttctagagacacatactgccctactaggccaggtaaggagtcatagtgactctgttcgttggtagcatttcttgcctcctcgataccactgcctaaagctgcacgaagctcacccgccgaccagtttttcttcaacagtcgcacgcgatcctgtacctgtttatcgactagactaaccttgacagcagcactcacacacttcgcgacttgaacccatactgcagcagcctctccgtatttggcggtgtatggtttctgcttgatagcctcgcgcatgagctccttgtcaatgtcctcagagaaacgaaataccatcgcgcttctttcactaattcgttgaagtaacaatcctaaactgaacccctgccagatggccacaaatgcttcactcctcggttgtgctaaagataaattcaaacctggtgaagctcaccatctgctgcggttgtgatgcaaacccactaggttctgctaagaacctctaatgaggcctgctaataatagaacccagctctgattacgggtgtgctcgtttcgagttagacaatttgtcgttcttgtcgccgaaccgatcgaagcgaaaacaagattaacgcgtcctgctgtagggggaagggctacaatgtgaaatagtagaaatattatacaaagtcgtgctgcgcccgaagaaccactgacatttggtcaatcttgctgtataaaaagatgaaagtagatttttttatagtcctgtctaaaacgaagttgtcttgccggcagaatacaaatgccttcttataaccttcgaatgatgatgtaagttcccggaggatagattatctaactgtctgtcgtccaggtcgactcctattgtattacataatgcgggagaacttgactaggtaaaaaaatacagttgcactcaaataaccaaagcgaatgcttagaggttgtagtgctcgttgttgctattaagcggcacaagagtgctaactcaaacgcatgctgcgtgggctttcgacttctttattttaccctttcgaatacgataacaatagtgctagcaacgctacaatcacggacgcactgagaaaaaaacgattactttttctcagtggcgcatcgacgccaactacgaactactaatgatcctatgtggagggaggctatcgaccgcgggtccactgaggtcgaagtcctctacaatgcggtcgtgacgacaatacattttatttcacacaagctgcagtttcggctaatcattcgaaaattcatatctgttaacacacgaaataacataatgatatttctccatgcagtaacaaggcttacttcatcaagtgctgctgcggtaagtgtaagtaatctccgtttttatttatgtattcttgggcgaccgtttacgtgtttctattatcgcttttgcctcaactcgcctccttttgtagatcttataaaagagcagacaacaccgtatccatactagtcgttggtgaacgaagcgcttgaatgcggtattgatgtagtatatgccattttttcttcacacgacacaggggtcataagagctcttggaactagaatactttggttgccgcgacgttgttaaattccatttttatgtgattacggtatctgttcgtagtaatcgatttcttgctgatttgcgtgtgtgtgtgaagactcttcactgaaggggggggggggggggcaaaagatatacttactgcgctttgtgcgtgagactcgagcagattacgaacatcgtgatagtgcacatttataggaataactagggctgtgcgagggctgggatagccaacagttattaaagaggctaaaggtcgcgaacagctcataccggtaaaggtatatgaaacggcggttaccagcttcagtttttcggcttcagttaccgtcgagcgaattaacctgatttgggctgtccagcagcacagagttactgctatcccagaatgaatactggtaagcaagaagagccggtccagagtaaattatgggccggtctactatttcatttgatatgacttaatcttttctccgacggtcttcattggttgcgactaggttttggcacaatgatttttcgcacgaagcgtgcacagtgagtggataggcataaattttacaataagtcgtcaagcacgtgatcgaaggtcgagcccaatcacacgctttctacgtgacgcacagtaggagaatatttgcaaaaataagtctaatctcagttccaactgctacagttaaggacgacgaagctgttggtcagcggtttggcgaatctgacgaatggtttggtccagtcgaaattgaaatccggcgggtcaaaacggcgaacctgctgaacaggctcaagagatcgtgcttaaatacgcgttctcaaaacttgctaatcgtgttgggtttctggggttgcaaccccagtgtcgtgacctaaagtgtcggatttgacctattttattggttaccgaaaacgtaaatgatctattccaaaataataactgacatggagaagttcttgtaacttaagacggagatcctccagcgaatggtgaccgagattcgaatctaccaccccaatgccggcatcagcgcagcaacgaaagcttctacaagaggagcacagccaaacggagtaattagtaagaaggcgaagcaaggctgagaaacactagcaagtactgataaaatattgtctatcatttctaaagtatctgaactcatgttgaagtctcccatgttcaaccggagtcatggaagacttggcacttcgtcacagtatagctcgtagcgccctacgaaagatctatcacttgtcatttggcgagatgcctcgcaagcgcaaaaaaaaaaacaaaaaaccacagcaacaactacacagtatgtgtaccagtgcctcagtcgcaagttgaatcaagtctgtggtctggatttcctgcgcaaagagctctagcgaacgaccatcgttctccgccaggtggggctcattggatggaaggtcgggggaatgtatatcctccgcagccttgaccagggcaaaccgcttcccgaactcaacgcaatgtttttctaccgatgctgtgctgcttccctgggctcgactgagaaacgagatcggtacaagacgaaccccaaataccccgacctccacaagactttcttaatgtactgggaacttcgacaacagcttcgagcccacgtggcaccgtcgctggggtattgcggtgccatgataaacgaaatgatcacgaaaatggcggttaatactgccaacatgttggctcgacacttccgtcggcgactgtaccaatacgttagattacggtacgcgaaagaaggaaagattcagctgagcttctacaaaaccaagaaacttattgatagctgctatcgtgtccaagaagttcaggagtttgacacaaatggcaatttaacagctactatgaaaatgtggggtgcttgggataaatggcgaacttcagaagagcgcgagttacgtgagtggctcggtatggcgccttggcattggacaattcgtgagaatctggttactttgtgacgaaggtgtacgacatgctttcgtggatggaggatttgtggagaaacacccaaagacaagaggggctcatctctactcgttactaccacaatcgagctctttcataccatctcacgttacactgaacgcgacgactttgtacgagctcttttgtcgcatttacgataatccggtggcgaaaaaaagtcgtgaatggcgatctgggactggaatgcagaactaaggcagctcgtgctacctggacactaaatcgcgaagttattatccgctagcttttcaacgtaacggagttggagaccagaacccgcaagttcggtaaccgagacacgacggatggctatgcagcttcggtactactcgagcgcgaaatgcctaccacagaacccacagacaccaatacggctccaaggaaaaggaggaagactagcaaaaatcgattaacgaatgttgtggagaaagatgccttggatttggcacgtgacaagttaccggaaggctacacaccagacattttcattgggatcgatcctgacgttagaatactggtcacggctgcgtcgactggatatcttccacagcaacggcaaggccgacagtgcaaacaccgccacagacgtcgtcgctttcgcaaaaaagattcgaggaagtgcattgcgaagaaccaacacggacacggtcagcgagttatcggcgtcagcacagctgagtactatcacctggccaagctcaataagaagcgcgtatgggacctcaacttgaggaagacagaacctgcgtacgttttgatattgaaggaaatgccaagttttaatacttctcagctgacaacattcatggatcgactccagtactttgtgaagcacgtgggctttctcgtctcgtattcgaccaaaacttcgtttcgaaagtggagattcttaaccacaagttcgaagatgcgggcgttgactgcgattaccaagcgacttgttccgatccggagtgcgcaggtctgcatcgcatttggtgattggagctgccaggacggtctctgtggaaaccctagcgctccagtacaggcactcaagaaagaactggaacagcgagcgacagtttgcccatggacgagtttcgcacctgtaagctgtgctccggctgccacaagcacctcctttcagctcggctattgacaaaggtgaaagaccgatagaccgagaagatctcgattgtcttggagacgtcttgtgcttcaagaacagtcgatgcaaggcacacttctggaatcgagacgttaatgcagcgagaaatatactagagttactcaagtgcaggctttcaggcctggggagactggcagctttcgagcggtgactgcgagaccaagatcgtgattggaaagtccatttcttagaaacatgctgcactcgaagggtgtgggctttttgtctggggacatggggagcatccactcacacggtgtggaggcgcacaactgcttcgacacaagaatccgatacaagatagcgattacgtaccacgagttgtatgtagccagcttgtaacttaatggttaaatcatagaccccgaatgtctgcgaattcgacacacctgcactgtaatttgcaaagctgatgtaaaacagcatttaaatggcccagaggcttcctgctgtagtttatgtgcaaatacaagcacattcttcaagggccggatcatggtgatcccgtagaatccgggtagcagccaaacgtgaccctcatgttctccacaaccgatagccttgtcattacaacagtcggtcatctagataaaaacggtaaatatcagccatccctcctgtataaatggttgattgagacctctcgatatatcaagtatactcgatactaatctccctggttctcgaagatctcggaggagcttgagaacgtttggtatatcggtgaaagcatctacagaagacgacaattttgaagacagggcgtttggttcggcacagattaatgaggtacttaagacagggacaaagaatctaaagaaggtcgcggctagcgcaaggctcatgtttacaaaggcatgtgatgaagcagaggaagcttagtacttagaagtaaaattgaaaagtgaattgttttcttgttaactactctattgtagctaagcgtcacacgcaggcacggagagtattgctacgaggcttgaagaggctcagcatacgtattggttgcttcataaaaacagcgcggatgacgttatcaagctgcttaatctgaataaggaaggcgacaacgtgctctgaatctctttgtggagcattggctgcatacataaagaaggtaaacgaccagaacccagacgaagcgatattctctgtgttgaagacacactatgacagtgacgaaatactagcaaagactctcgttggggctaagatggactacagaatggttacaaccgctgcgaaattggagaacatgcaactctcgagatggcggaatgatgatagaaccacggaaactgtcttcaacctgctgcggttaaaccaggaaggaggcgggttattgataagcaggttgctagacacgtagatatcttacgcaactttgatgaaggaagacccgaacaaaatcttgctggtaaaattggcgactcgctaccaagacgagaaatcgctaacgcagatgctaacttccaacgcagaaggatatcaatactcgatcaactgcctataatttattgcaagcacagatggatcagtggaaaatcagtcgcaagacagctgaggaagttgttacgctcctaaaactgactaaagatggcagcaacttcctgaacagccccgtcttgaaagcttgggtatctttggtagagaagttgaaggaggacccgtacgagttaatgttttccaagctgatgaagttttataatgctcataaactggccctacttctacgctggtcatcggtgcttgacataacgggaacaacgagtaagctcgaggagtttcaatgtaaattttggaaggaaagcggcaaaagcgctgatgatattttcgaacgtttgcggctgaatcagaaatctgacggctttttaaacaacccagtgtcgcgtatttgggagatctacgtgagaagattagatgtggaaaccaaataaagaattgttcttgaaattgaaagaaagctacagtgatgaaggactggcaaagatgctcatagctgctaagaaagattccagtacgacctacatcgctgaacgtttggaggacgtacacctccagtactttcaggaaaatggcaagacaacagaagatgttcataaatttcttcgattggacgaggaaggtaaaaacgctcgtgaatccgccgtcttcagcacgtgggcatcttacgtggctaaatccagacaaggcaatgttcttgatcctacagaagaaatacggcaacaaacgtttggcggaaatggctagtcaggcagaggatggcagtactacaaacagcggagtcaggaagagatttggagaagtcaacagatgatagcggatggcgtcttcaatctcctaaagttgaaagaagaaaggaacctacttgtctctccagcttttagcacctggagcccctacgtgacaaaactgaacaactcgaaggaggaaccgaatgacttggcgattatcgtttatttggaaagacccttggcggctttggtctggcgcggatgcttgatagatcgcagcagagccctaaccgacaagtacaagaggatgccgagaagttgcagacgctgcagctcaagcattggatgaatcatcactcggacacgattcgaatgctaaattacggcaacatgttggatgaaacggacacgaggatctctatcgtttataaaaaaaatttccaggctaaaaacaagaagtagcacactcctgttacttggattctacgacgcgaagagcgtcacgatgtacagtcaggagtaagatcacgagattatgcagataccgatcaatataaaaaacgttacatgtacatgatatatttgagacctgacacaaaagctgctaagaggttccgtggcaaacaatacttacaatgtctttcaaatctcagttttgtcctttataccaaaattcactggcgtactgcctaaagagaacacgagttggcagcgcattgacactacaccaactcgcattcgcggcttcatccctttctgaacgtgacattcaagtttaaacttttaaaagtaggatcgcagtgttcattggccattttcgtgtaatagcaacaacaactgacggttgactgacagcaagtagtatgccatcgtcctcaagcgtgacacaattggtccgttttaatattaggtcggctgactagttggtttgcaccaagttaaatatcagatcttcaccgatcaacaaagttttcacagctgtcggcgctatggcccatgcggatttgcatctttgccgagagagcagcatttttggggaaagtgacgcttttcccgtgaacatcaatcttttaatatcaaacgcaacaactagctaaatgcaaaacgactcgctatttcgagcctctccgggccgcccaatcagaactccgcgctatgctgtgtcagggcatcttcacctgcgtccgcttccccgcctagatcggatagcgtagaagccttttcttggatcggtacgtctcttgagcaagcttacgcttctttttagcttcaagccaagctcgatcaaccttttttgagctcgtctgtaccattcaccattctgcagttgtagagggcaatgcgagatatgggcgttcgtaaggcctacgcacaaagatatcgtcataaagccctcgagacaaacgatatttgtcggcgtatttcgccaaagctcattgagccgcccaaagtagttctcaacaatcacacgatcatgcgcagtccggtcattgtttgcttggtctgctcgtctcagatactttccttttttcggtatgataccgcgcaagaagggagcaatgtcttgatatcgtttgtctgctaacagaacccgttcatctggaaatgcttctagaaggggaccgtcgtctggaagactctcattgcctgcaactttctcattttgctgtgatggaatgccgtgttgctcttgaagatcgtgatgtcgtgtgttgccgcaggcacatgctcgccgcaattaattgcgaagccacgaccgatacctccacctttagcccatacagaagatgcttcccgctgcagtgctgccgcctggtcgccagctctgttgaaacgtgacatcttctgcatacatggcactcggaaaatgctcaaatgtgttacccctgttcgtgcgttgcgcattgttgcctcgtcgcaacgatcctgaacttggtcgacgtaaatcttaggagctagaattttgatgaacttcgtaactacgtccatgaaggtagtggtagtcaatcgaaagcgattggcgttggagtcccatgttctcccctctttgagcatcacgagcgtcctgaagaaggcgtcctttggcttaatttcggagtgcttgcctcgaccaacgttgtaattcattcgtacatggtcacgaacagtgagccacagtgcgttgaactctcgtagcgaaaagttagtcatagcgtggatcgcgccagaaccaccaatctcacgaaacgggtccattagaggcgtgtcggtttcatcggtgtcgacttcatgcagtggtgcgttggggaaatgactgaggtcttcctctcggtcaatgcgacgttcttctagctctgaaagtatagattcaacacgatcccgggcagattggcgcgtaccgcgtggttgtgctggcattgctggcttttgactttgttttgtatgtggactcgggaaagactgagaaactcgggaaatgtgctaccttctcgccgggaatctttcgcttacgggagagactagtcaaatcaaaggtgggcttctcttccggacatgatgaatcacaacatgattaagtagggttccccaaacaacaaagtgcatcgccagccattgtgattaccagcgggaccacatgtgttcccgccgggttatcccagttatgccaatttttcagtcaactcgccaagtggcctattgcttctgagttatctggtggctgaagctgcgaccgacaaagcagacttcatacgtaagctttttaacagtaaaataaacaatcggatctccgagcaggaataaaggccatggctgacgccacgcaccggaagttgtgagccgcttacactgtctttgtgttgaatggtactaggcatccaatcaatatattagtgacgactataagcctttcaatacttcaggcatccaaacaatccttgaaggttgctactgtattctcaaaagaagagagcacaagtggagcggctgagcgcaattgacagaagtgtcctgttcataatgtactactgaagctattattaataatactacgtactattgaaacaacagcaataatatacggtaatggcgcatgaatactattattcttcatctcctcaatagcagtaaattagcggttcccgttgaccagtcacttacaaacccaagatattactccctctcacccgccccgccccccccccccccccaatcgtaaaatggaatacatttgcagtcaaatattcctattctggggttcttaactatgaaaaagtcataactgcacagtacatccgaagaaatctagcaaagacttttggtgcatgtggccttgctttcttccaagttcttcgcggagcgtgcgctgcatttctcgcaatccgctcaccgatctatccgatacgccagtcgcacctccacaaactagaagcttcgcgcgacccacatgagatgctctttaatttcttctggctcaaggtcctcctcatttcacgtacgacgctccatatcgtcctcgtccagattttctgcgccgttctcagtgccatctacagccaattcttggtcactaactccaccgaagtcttcatgtgtgggatcttctgcagctgtgttctcgtctggcgggttcagcagctcgtccacggacattgggtccttaacgtgcagacgaggtaacatcgtcgcaagcacagcggacattgcatcgtcttcgtctggatcatcgaagacgcaattgtagtactttaaatgcccggtgtgcttccagcatcttgcgaagagggaaggtgaaaaaaacaaattgtttccactactggatgcggtgcactgttccaaaccaaatgtactcggaatgtgacggggtcacacagcaccttgcgctgaggaagtaggcttccaagagtatacaaacgctaagtgaacgaccgttcatgtgtccctggcctgaggggacgaagtactcacttaagggtacgattaagactgaatgtatttataggtaagcttagcttggtttctaatagaaactataagtcacctatagtaaagctatgtagatatgcaatgattggctcctagagcccctggtaccatgtaccaggcattacaagagtgactggtcactcttcatgtaacttgggtacacttggggtttgtacccagttacatatttccccacttaggttcggtttaccgaccaatcacaaaagggagacagagtcacagactctcattcccgagtcgaaaggggttcgacaagctgcggggacgaggctgtggcccatttcacagttggagcctttgagcaaaaacgcccgtcttctcggttaccacatcatgctcgcgatactgcgaagagcggtgcgaaatcacccgccaaggctgctgcccgaaaggcgcacgccaagagctctaagcgtcatagcaagagctcggcactcaaggaggctactaaggtagcctccgaggcggttgatgcctcgggtgactcgactgcgagcaagcggcaaagctcacgccggagtcggtcgccctcaatgtccccagacgaccgtccgaacccacggttcgcgtgccgtgagcacagtcctggttctgaggacgaggccaaggcccggagcttccgcagtgtgtctgggagctccgtgggatggcacactccagtgcccagcgataacagctttgacagcttgcacttgctcgctagtgatcacgatgatcacgactcaaagacgcctgagcgctctgagagccctgccgacgaggctaagagctcgcccaatgctggcggcgacgagggaggcaaacctccgaagaacctctcgctcaccgagagccttgagcgtgctcaggctactaaagctgcagccactgaggccaagcactctaagaagcgcatggcttctaggtctccactccgcgaggggaaggagaccgatccgtactacacgatcttcgactcctcggacgaagaggaggagggtgccatcaacgagccccgggagatcacaaatgatctcgaccggcagcaggagttgttccaagctgcccggcaaaagcctgggggttcggaggcgacgcctgtcggccagggagcttctatcaacttgagaggttattggcctcccgaggagagctttggagccgacctcttcttggcggagctcaaggctcctcgtgggcttattggtggccacacttctaagggcgcttacgagcgtgccctggtccagaaggaacagttgttcgcggacaacgtggaggcggcccggtgcctgcttctcgcgcagcaccagatacctctgaaggacttcacgacttgtcattagtagcccgagaaccggggtggtctttacccctgggttctacccgagaactgtccgagctggagctcgtgcgaggacatgttctgggcgtgggttgagactctcaagtgctcacccgcggagttacaggaactccgagaagatcggctgctgtccaaaatcctggaccagcgcgatcttcgcattcgatttttccacttggtcagcaagcgacagctgccaagggacaccgagaagcgcgcggcttctagcgctcatgatgagcgcgggtacggagtgtcatcaacgttcataccccgttcgggcaagaagcccggactacttacgaagctgccgccgcttctgttcccagatcgcgacagccttcgggcagtctgcctggagccgttcaatcggctccatgagttctcggagtgggcacaacccctccacttcacacatccacttcgcaaggagctagctcttacctcgaagccgccgctcctggagtacccgctccacgtggtagtggacctctccgttccggggagccactctcgtccgagtgctcaacctgcgggtccgtcgcagggccctgaggttgaccgcctccgtcaacgtgttctcgtgcttgagattgcactaggccttgggactggcggtgatgctgccgcctaggccgggaatcagggcgttctcgctcgacttgcggaacgcctgggtcggttgcagcgagaggtccctgacgtgcatgggcgggtggaccttctcgtccgatcttgacgaggccttccgccagattcgacgtgttgagagtctgcaaccacgtccggagccgcccttggcgcgctcccagccgtacgcctatggtgcgtacccggcgtactcggcgtatgcccctggggtccgttcgtacggggcccctccggcgtacgatcttgattgtggccttgatgtccagcgcgagccttggacgcacgcctctgcgacgacgtctgaggccgctcctcgcttcgaggagctggaccaaggtgggtctgcgagtcagcaaccccctgcggatcatggtaccgcttaagacgtccgacatagaacgtcgggtgcgtcgtcattgactttggtaggtcgatggtgtacgacgcaccatgtctggcaaggactgtaaacggtccgatgaagcgatgcttcaacttgttactgccgacagagctgacagtgtcaagcggtaggtttctagtgtctagtaacacaaattcaccaactttaaacacatttaagtttcctcttccatgtttgtctgagtactccttttgtctgtcctgggccgctgccatggcatcgcggaccctgctgatcacatcagcttggtgtccataaaggactccacttgtttccgcagagaaaccggtctcacatctgagacctgggaggaaaggctttccgagcctctccccacttaaaatagaggacgtggtgtctcctcgaagagtgagggcactctggggtggcggaagccgttcaggtagaacggtaaaccccgtagacgcgtgtaccgcgttgttgagcgcaaactcaacaactgggagctgtgtcgaccacgtatgtggggctccagcgcatacactgcgcagagtgtcttcgagcactcgattgacgcgctccgtctggccgtccgtctgcggatggtcggcagtggacatctgcagacgagttccaagcaatgggaacagcgtcttccagaacgcagcggtgaaccgcgggtctcgatccgagacaatggtctcaggcagacgtgatagcggaacacgccatcgacgaacagccgtgctgtctgttcgcctgtgaccgtaacgggcaccggagcaagatgcaccatcttgctcagccgacacacgaacaccacaatcccggtgttgccgtgtctcggcgggaagtccaaagatgaagtcaagactcatcgacttccaacagtcagcaggtacgggcaggctctgtaagagtgccctgcggtttcacccgctgacacgtttcatgtcttcacatactggcgacccacttgtacatgtggtccaccagaaggcctgagaaaccgacaaaaaggtcttctcacggcccaagtggccactggagggcgcatcgtgcgcctccgcgaggatatcaaactttagatcctcattgttgggtacgaccacccgtgaaggatcactaggctccacccggaaatagaggaggccatccctcaactcatatcggtggagccgggaacgctgccgaggcgaaagccagtcggactttgcgttcgttcctgctgctaggaacctgacgataggcgcaatagcctcatcgtcccgatacgcctcgcgtatccgatcataaagatccgttgtcacccgtgtgatgtgggccaactcatagtccggacgccgcgacagggcgtcggcaagcacg

SEQ ID NO: 245 - DNA, 20894 bp, Phytophthora sp.
  variation 17468..17529: note = n is any nucleotide
  variation 18364..18943: note = n is any nucleotide
  source 1..20894: mol_type = other DNA
gaaacactgctaccttggaggttaaagggagagtaaaactgtttggttaggggaggtctttgattggctaaaactcgaacaaaacgtgctgcctatgggccgattgcacagccaatcaagtcgcaaagtggttgttaagcacgcatgcgtccgaaaaacgcttcggttgagaacgggccttagacacgacgtctatcttcatcagactcgaacattatggatgatcaaccctaataatccagatattcttgagctcgaacaaaaaaaactatagaaagttagtatatgctcgttccatactccggagtaagtgcacggttttgtctcttacaacccactcaccagccagtttccaagcagcctcggagatcggaactagatgatactgtcggcatgactgctactgactagcgagactaacggcgaatcataacacatacacttgcaataacaaacgaacactcatgctacgttcattttgctttaggatagatccgaccttacgtaccttctcgtttctgccacaatagccgctggtcataggtcgaaacaaagcggtgatagctcaccacttcgtttcttagatctcccactggtatatgcactctgtttacccaagcgacgtcgtcctcatcacacaccatcgttcgtaacacagaaaacggcggaaaagcgactcataaaatgaaatgcgcggcggatactcttgaaaattcaaaaccgtccacgctggcgattgccgtcaacggcaatgaaccaacaccgtcgcacgtttacacgaagtacatctcgcccttcatggattggtgcaagtcgtacatacgcgtgtccgtttccggtgcagtctcactgaagcccgagacagttgaggcagtgtcactaccttccgccaggaagaaccgcgcacggaacgccacgagatgcgaatagtaggccgacggcaccatggagacggagcgagtgcatcgcgcaaacgtgtaacacagtttgtaagtgagcgtctgcaattcatccgccgtaaagccgatctcattcagcagcacgtggtagtgcgtggggcgactggtgccttgcagtccagcgtggctcatcaagtaaaaatcgttctcaatcgggtgacagatagcagtgtcgacaacagttcccgccttgacattgccactgcgatcagcatctctcggagtgtcagggaacagacgggtattgtggcgcttctggacaataacgaacgtgatcgggggtagataaccgacctccagcgtctggcaagcttcacggatggccgtgacttcgtaattcagcaccatgtggaactgtccttcactcactccatcgcgatagaagacaatgcggtccggtttgccacgcgtctggcggtagaactgcttcatcagttccactaccatatctttaaggttcataatctgctcgacacggtggccttgtgcacggatcgccgatgcatgtcggatgaaattcgggtccatagacgccgtaacagcagcgacagaggggcgactcttgtccatgggacttgggtgcgtgacatcggcaccaaagataatggtacgcgacgccgatacacgcggcaatgggccactgataatgccatttttcccacccaacttggtgttcaccttcatcagaatattggcgatatactgagggttgcacttctggatatgcttcgacagcatgcactgtgacagaatacccataccagcttcactgtcggacatcagcttcaactctccataagcgtgtgcatccattctcggattgatcatccagatgatctgcgccggggtcttgaacgtctggttggcagcattcactgcggcctggaacattccacgcactgagtcctctcggcgctgcttcaacaggatcggaggcaatttaggcggacatcgcatgcccaactgacccatctgtgtcatcacagccttgaagaatttctcaatactggcctggttacagtatctcgcgtctgccatactgataacagcccacgacttgagttgagccggcgtattaaactttttgccgcgcatgttccacgctccgtcacgtggagtttcagtagctcgtccactgtactcgatcgtaggcggtggcaactgacgaccggtagtctccaccatacgaggctccacatccagtccaaaggctctgagcgtcgggtccgtgctgaatcctgcctcacggaacttctgctcgatcgagcgcttgcgctgatccggcggcgtgcacgtaaacttgatcatattggccacctggttgtccgtgaccttacgaggacatttctgtcccgccatgatgtggcaaacctccatgggcagataattcttgttctgtggggcgccaacatggagacacggcagcttcggatggcgcagacgcaggttgtacgtcttttggaagtactgcacaatagacatgcgttgtccctcgtcgttctcaaagaacgtttgctctgcgctgttcttggtgagcccgttaacgcggtagctgcgtcgcactcctgggcgatgagtgatgttcactttgactccacgaatggctttactgaacgcagagtgttggtgtttagccagtgaaggtggcaggtttctcaaggacagagactcacagaggaaatccagtacgtccatctcctttacgaaggcggtggctgccaagtccaagttgaccacaagtcgattctgcgtggctctcaagctctggaagtagccgaaccagagctcagctccttctccgagagatttggcgccattgccactgaacaagtttcgtccaactacagtgaatctctgcgatgctgagtgacgcagagccacgtccagcgcttgcagtgcgtcgtacggcgtgtagttcaagcgtccagcaaagagctcgtccagttgctgcatgcggatagccacagggtcggcttccctcacagtggccgagaactccctggctctgcctccatcatcaggtagtgtaagaccactgaactcctggagctggaacggcagccgacgaggagcgtatatgttcttacgggcgtcagagacaaccataaagtctgggaattggcgcttgagctcggctaagagcgcggccatgatcttgttggctagcgtcttaggtgggccgtcgttgccgaagctccggccgctctcggccatcataacgtcgtagtgaaacacgtcgccagccaacttgaagttgaccttgaagtggttagcgtgcagttttacagctcttccagccgtgccgaagcccgggcgaggggggaaatgcgtgtttacgagtggctgcaacaggcgaggctcatccggaatgcgcgctttctcctccagctccagagcgagcgacgagacgctgggggttgcagccgacgctgcagctggcgccggtggcggcgcgacggcgcgtgaggttggcggaggaccaggagcggggacagcagtagcggggccgccgcatccgcggcctctggcgccgccctggccacggcttcgacgcggacggccgataacgggctcggaatcttgctgcttgttgcgccgtcccagcattttgaagaatgagatgcggagcgacagggagggattttccctctcaaaaacggattcgcgctacttcacaagattgcagcttaaaagcttagaactattatactaaattgctgaaggctctgcattatatttcccccctgcaagatactttgggttgacggtgggaaagatctgaaagacaaacgagccgctggtcagaacgcggctgtttgcttttttgttttcagccaggctaatcacttgtagctgatttggcacgactgaagagcttttgtggtgccctggctgcatctttcccaacactgcgtcgggtctgtctgatttttcaatcatcggctgggaacgggataatatctccaatctctaaccggtttctccctagaagaatttctacaagcgaagcagttccgacaagtgtcgacactaagtagttaaaaaagactagattgtctatggtaatatggatacattcatttatacttacttatattaaactaaagacaatcatcatccctccattgacttgcctcctgctccctctaataagcaaatatagggggaaacggacaaaaatcctcagttaatagaggtctttagcagaaccgacaaaaggcaaattgtgtgaactgcagctggttttggagcctaacctccatctccaacccacgatttcaactgtgtaggatgccaggaacccaccaaagcgaggcaaataaactgttcaggttgaaaacatgtgagctgttcctctgctactaaatcacagctataccgttgataaaacggagtcacgtcgttcatttcgggttcaagtccagctacgcaactcatggaggcatcaagtgaggcggtttctgaatgggatgacgctcgaggccacttaattcgacaacagcaggccttcgccgataccaaaagaacgcgtacttgatgcgtgtttggagcgaagcctctcagacaaatcaagttgtgttggctgctacgattgctcagtatttctacgccgagttacctcctcaacatcacttccgcgttccgttcaacttcaacgcactatccagcgctgattgtgtatctaagtttcgttttggcaaagctcaaatcgagtccctcgtgagcctcttcgcgctagatgcgataaggactcgtgaacgcacggcagcgaatggagttgaaggcttgtgtattgtcctgtacaagttggcaatcccgttgcgctggaaagatctcgaatcgttttttgggcgaactgaaagcggtctttcaaacttgtttcttcatgtgttggatcacctggagtccaagtttgcagaccttttatacttcaatcatgaatacgcagcaaaccatgtacaaacgtacgcggatgctgtgttcgatgctggtgggtcaatgcaaaacatgtgggcgtttgtagatggaaccgtacgaggaatttgcaggcctaaagctcgcaacagtcaacgtgatggaaaatatcgaagccagaaatccgtttacaacgggcacaaacgcaaacatgctctaagataccagacactatcaactcctgacgggctcattacccatgtgtatggaccttttcctgggcgaaaccatgatattaagttgttcaaggactcgcgaattgctaacgtcattcgcggtgatgctcggttcaagccctatcgcatctacggtgaccaagcgtatgggaacgattctgtgctttcgagcccattcacaggggctgtggcgaacctttcgcgagaacaaaagttagtcaacaagagcatgagtaaggtgcgcgtgtctgttgaatggggatacggacaagttgtcaattattggactgcactggacttgaaacgacaagcccgctcgggtacccagcctgttggatcgatgtaccgcgtggcgattttgctaactaattgtttgacttgcgccaatggaggcaatacgatcagtgactacttcaggcttccaccaccaagtcttgaggagtacttgaaaggcagttaaattcattgataaacttatgtcttttataggagtttcctacttcttgtcactactattgagtgacttgctgaaaatcgtgacgcattgcaatatcagctgtctgtttcgctcctcagcttcttcacgtgccctgttaaggcgttcctcggtgcgctcacgagatctttctcgctctcgctcaaatgctaggcgattttcgtgttgctctctttcgaatgctagtcgttctgcatgctgctgctgctgctgcaattgcatttgtcgatcaaactgctcgcagcgcatctcagcgtcgagccgaatacgtttctcttgcctgtcaacttccaactgaaaaacactttttcggcgtcctgctggaactttgcctggagttgatattgagctaactgacggagtagacgccaccgaagcagtgccatcgtcgctatctgaagaagcatcgcttgatagtatgttttccccccgacgagctcggcgcgtaatagcgtctgacacaatttgagaagcgcagagattagtttgagcttcttcagcttgcttcttttccttgttcgactgtttttgggccttgaaatccttttctagagacacatactgccctactaggccaggtaaggagtcatagtgactctgttcgttggtagcatttcttgcctcctcgataccactgcctaaagctgcacgaagctcacccgccgaccagtttttcttcaacagtcgcacgcgatcctgtacctgtttatcgactagactaaccttgacagcagcactcacacacttcgcgacttgaacccatactgcagcagcctctccgtatttggcggtgtatggtttctgcttgatagcctcgcgcatgagctccttgtcaatgtcctcagagaaacgaaataccatcgcgcttctttcactaattcgttgaagtaacaatcctaaaatgaacccctgccagatggccacaaatgcttcactcctcggttgtgctaaagataaattcaaacctggtgaagctcaccatctgctgcggttgtgatgcaaacccactaggttctgctaagaacctctaatgaggcctgctaataatagaacgcagctctgattacgggtgtgctcgtttcgagttagacaatttgtcgttcttgtcgccgaaccgatcgaagcgaaaacaagattaacgcgtcctgctgtaggggggaagggctacaatgtgaaatagtagaaatattatacaaagtcgtgctgcgcccgaagaaccactgacatttggtcaatcttgctgtataaaaagatgaaagtagatttttttatagtcctgtctaaaacgaagttgtcttgccggcagaatacaaatgccttcttataaccttcgaatgatgatgtaagttcccggaggatagattatctaactgtctgtcgtccaggtcgactcctattgtattacataatgcgggagaacttgactaggtaaaaaaatacagttgcactcaaataaccaaagcgaatgcttagaggttgtagtgctcgttgttgctattaagcggcacaagagtgctaactcaaacgcatgctgcgtgggctttcgacttctttattttaccctttcgaatacgataacaatagtgctagcaacgctacaatcacggacgcactgagaaaaaaacgattactttttctcagtggcgcatcgacgccaactacgaactactaatgatcctatgtggagggaggctatcgaccgcgggtccactgaggtcgaagtcctctacaatgcggtcgtgacgacaatacattttatttcacacaagctgcagtttcggctaatcattcgaaaattcatatctgttaacacacgaaataacataatgatatttctccatgcagtaacaaggcttacttcatcaagtgctgctgcggtaagtgtaagtaatctccgtttttatttatgtattcttgggcgaccgtttacgtgtttctattatcgcttttgcctcaactcgcctccttttgtagatcttataaaagagcagacaacaccgtatccatactagtcgttggtgaacgaagcgcttgaatgcggtattgatgtagtatatgccattttttcttcacacgacacaggggtcataagagctcttggaactagaatactttggttgccgcgacgttgttaaattccatttttatgtgattacggtatctgttcgtagtaatcgatttcttgctgatttgcgtgtgtgtgtgaagactcttcactgaagggggggggggggcaaaagatattctttgctctgtgcgcgagactcgagcagattacgaacatacgaacatcgtgatagtgcacatttataggaataactagggctgtgcgagggctgggatagccaacagttattaaagaggctaaaggtcgcgaacagctcataccggtaaaggtatatgaaacggcggttaccagcttcagtttttcggcttcagttaccgtcgagcgaattaacctgatttgggctgtcccaagcagcacagagttactgctatcccagaaaatgaatactggtaagcaagaagagccggtccagagtaaattatgggccggtctactatttcatttgatatgacttaatcttttctccgacggtcttcattggttgcgactaggttttggcacaatgatttttcgcacgaagcgtgcacagtgagtggataggcataaattttacaataagtcgtcaagcacgtgatcgaaggtcgagcccaatcacacgctttctacgtgacgcacagtaggagaatatttgcaaaaataagtctaatctcagttccaactgctacagttaaggacgacgaagctgttggtcagcggtttggcgaatctgacgaatggtttggtccagtcgaaattgaaatccggcgggtcaaaacggcgaacctgctgaacaggctcaagagatcgtgcttaaatacgcgttctcaaaacttgctaatcgtgttgggtttctggggttgcaaccccagtgtcgtgacctaaagtgtcggatttgacctattttattggttaccgaaaacgtaaatgatctattccaaaataataactgacatggagaagttcttgtaacttaagacggagatcctccagcgaatggtgaccgagattcgaatctaccaccccaatgccggcatcagcgcagcaacgaaagcttctacaagaggagcacagccaaacggagtaattagtaagaaggcgaagcaaggctgagaaacactagcaagtactgataaaatattgtctatcatttctaaagtatctgaactcatgttgaagtctcccatgttcaaccggagtcatggaagacttggcacttcgtcacagtatagctcgtagcgccctacgaaagatctatcacttgtcatttggcgagatgcctcgcaagcgcaaaaaaaaaaacaaaaaaccacagcaacaactacacagtatgtgtaccagtgcctcagtcgcaagttgaatcaagtctgtggtctggatttcctgcgcaaagagctctagcgaacgaccatcgttctccgccaggtggggctcattggatggaaggtcgggggaatgtatatcctccgcagccttgaccagggcaaaccgcttcccgaactcaacgcaatgtttttctaccgatgctgtgctgcttccctgggctcgactgagaaacgagatcggtacaagacgaaccccaaataccccgacctccacaagactttcttaatgtactgggaacttcgacaacagcttcgagcccacgtggcaccgtcgctggggtattgcggtgccatgataaacgaaatgatcacgaaaatggcggttaatactgccaacatgttggctcgacacttccgtcggcgactgtaccaatacgttagattacggtacgcgaaagaaggaaagattcagctgagcttctacaaaaccaagaaacttattgatagctgctatcgtgtccaagaagttcaggagtttgacacaaatggcaatttaacagctactatgaaaatgtggggtgcttgggataaatggcgaacttcagaagagcgcgagttacgtgagtggctcggtatggcgccttggcattggacaattcgtgagaatctggttactttgtgacgaaggtgtacgacatgctttcgtggatggaggatttgtggagaaacacccaaagacaagaggggctcatctctactcgttactaccacaatcgagctctttcataccatctcacgttacactgaacgcgacgacgacgactttgtacgagccgagctcttttgtcgcatttacgataatccggtggcgaaaaaaagtcgtgaatggcgatctgggactggaatgcagaactaaggcagctcgtgctacctggacactaaatcgcgaagttattatccgctagcttttcaacgtaacggagttggagaccagaacccgcaagttcggtaaccgagacacgacggatggctatgcagcttcggtactactcgagcgcgaaatgcctaccacagaacccacagacaccaatacggctccaaggaaaaggaggaagactagcaaaaatcgattaacgaatgttgtggagaaagatgccttggatttggcacgtgacaagttaccggaaggctacacaccagacattttcattgggatcgatcctgacgttagaatactggtcacggctgcgtcgactggatatcttccacagcaacggcaaggccgacagtgcaaacaccgccacagacgtcgtcgctttcgcaaaaaagattcgaggaagtgcattgcgaagaaccaacacggacacggtcagcgagttatcggcgtcagcacagctgagtactatcacctggccaagctcaataagaagcgcgtatgggacctcaacttgaggaagacagaacctgcgtacgttttgatattgaaggaaatgccaagttttaatacttctcagctgacaacattcatggatcgactccagtactttgtgaagcacgtgggctttctcgtctcgtattcgaccaaaacttcgtttcgaaagtggagattcttaaccacaagttcgaagatgcgggcgttgactgcgattaccaagcgacttgttccgatccggagtgcgcaggtctgcatcgcatttggtgattggagctgccaggacggtctctgtggaaaccctagcgctccagtacaggcactcaagaaagaactggaacagcgagcgacagtttgcccatggacgagtttcgcacctgtaagctgtgctccggctgccacaagcacctcctttcagctcggctattgacaaaggtgaaagaccgatagaccgagaagatctcgattgtcttggagacgtcttgtgcttcaagaacagtcgatgcaaggcacacttctggaatcgagacgttaatgcagcgagaaatatactagagttactcaagtgcaggctttcaggcctggggagactggcagctttcgagcggtgactgcgagaccaagatcgtgattggaaagtccatttcttagaaacatgctgcactcgaagggtgtgggctttttgtctggggacatgggggagcatccactcacacggtgtggaggcgcacaactgcttcgacacaagaatccgatacaagatagcgattacgtaccacgagttgtatgtagccagcttgtaacttaatggttaaatcatagaccccgaatgtctgcgaattcgacacacctgcactgtaatttgcaaagctgatgtaaaacagcatttaaatggcccagaggcttcctgctgtagtttatgtgcaaatacaagcacattcttcaagggccggatcatggtgatcccgtagaatccgggtagcagccaaacgtgaccctcatgttctccacaaccgatagccttgtcattacaacagtcggtcatctagataaaaacggtaaatatcagccatccctcctgtataaatggttgattgagacctctcgatatatcaagtatactcgatactaatctccctggttctcgaagatctcggaggagcttgagaacgtttggtatatcggtgaaagcatctacagaagacgacaattttgaagacagggcgtttggttcggcacagattaatgaggtacttaagacagggacaaagaatctaaagaaggtcgcggctagcgcaaggctcatgtttacaaaggcatgtgatgaagcagaggaagcttagtacttagaagtaaaattgaaaagtgaattgttttcttgttaactactctattgtagctaagcgtcacacggatgaccttgtcgtggtcgtaaacatgtacgtgaacatgtatgacctcgacaagtccgttaacgtaaaagtaaacctcgaggtcaaactaacggagtaatccgttacaggacaaccaaccggcgacagacaagctgttcacgaggtttaaagttaatacggcacaagagaatctctttgcgactaaaagagttcgggaagtggtcgaccggagtggtcaaaaacttcaaaaagaactaagaagcggcggatgttgccgtgatatcaacgctgatgagtcgtttggatgatgatgtgttgttggcaaataatctgatgctggcgaggcgaacgcaggcacggagagtattgctacgaggcttgaagaggctcagcatacgtattggttgcttcataaaaacagcgcggatgacgttatcaagctgcttaatctgaataaggaaggcgacaacgtgctctgaatctctttgtggagcattggctgcatacataaagaaggtaaacgaccagaacccagacgaagcgatattctctgtgttgaagacacactatgacagtgacgaaatactagcaaagactctcgttggggctaagatggactacagaatggttacaaccgctgcgaaattggagaacatgcaactctcgagatggcggaatgatgatagaaccacggaaactgtcttcaacctgctgcggttaaaccaggaaggaggcgggttattgataagcaggttgctagacacgtagatatcttacgcaactttgatgaaggaagacccgaacaaaatcttgctggtaaaattggcgactcgctaccaagacgagaaatcgctaacgcagatgctaacttccaacgcagaaggatatcaatactcgatcaactgcctataatttattgcaagcacagatggatcagtggaaaatcagtcgcaagacagctgaggaagttgttacgctcctaaaactgactaaagatggcagcaacttcctgaacagccccgtcttgaaagcttgggtatctttggtagagaagttgaaggaggacccgtacgagttaatgttttccaagctgatgaagttttataatgctcataaactggccctacttctacgctggtcatcggtgcttgacataacgggaacaacgagtaagctcgaggagtttcaatgtaaattttggaaggaaagcggcaaaagcgctgatgatattttcgaacgtttgcggctgaatcagaaatctgacggctttttaaacaacccagtgtcgcgtatttgggagatctacgtgagaagattagatgtggaaaccaaataaagaattgttcttgaaattgaaagaaagctacagtgatgaaggactggcaaagatgctcatagctgctaagaaagattccagtacgacctacatcgctgaacgtttggaggacgtacacctccagtactttcaggaaaatggcaagacaacagaagatgttcataaatttcttcgattggacgaggaaggtaaaaacgctcgtgaatccgccgtcttcagcacgtgggcatcttacgtggctaaatccagacaaggcaatgttcttgatcctacagaagaaatacggcaacaaacgtttggcggaaatggctagtcaggcagaggatggcagtactacaaacagcggagtcaggaagagatttggagaagtcaacagatgatagcggatggcgtcttcaatctcctaaagttgaaagaagaaaggaacctacttgtctctccagcttttagcacctggagcccctacgtgacaaaactgaacaactcgaaggaggaaccgaatgacttggcgattatcgtttatttggaaagacccttggcggctttggtctggcgcggatgcttgatagatcgcagcagagccctaaccgacaagtacaagaggatgccgagaagttgcagacgctgcagctcaagcattggatgaatcatcactcggacacgattcgaatgctaaattacggcaacatgttggatgaaacggacacgaggatctctatcgtttataaaaaaaatttccaggctaaaaacaagaagtagcacactcctgttacttggattctacgacgcgaagagcgtcacgatgtacagtcaggagtaagatcacgagattatgcagataccgatcaatataaaaaacgttacatgtacatgatatatttgagacctgacacaaaagctgctaagaggttccgtggcaaacaatacttacaatgtctttcaaatctcagttttgtcctttataccaaaattcactggcgtactgcctaaagagaacacgagttggcagcgcattgacactacaccaactcgcattcgcggcttcatccctttctgaacgtgacattcaagtttaaacttttaaaagtaggatcgcagtgttcattggccattttcgtgtaatagcaacaacaactgacggttgactgacagcaagtagtatgccatcgtcctcaagcgtgacacaattggtccgttttaatattaggtcggctgactagttggtttgcaccaagttaaatatcagatcttcaccgatcaacaaagttttcacagctgtcggcgctatggcccatgcggatttgcatctttgccgagagagcagcatttttgggggaaagtgacgcttttcccgtgaacatcaatcttttaatatcaaacgcaacaactagctaaatgcaaaacgactcgctatttcgagcctctccgggccgcccaatcagaactccgcgctatgctgtgtcagggcatcttcacctgcgtccgcttccccgcctagatcggatagcgtagaagccttttcttggatcggtacgtctcttgagcaagcttacgcttcttttttagcttcaagccaagctcgatcaaccttttttgagctcgtctgtaccattcaccattctgcagttgtagagggcaatgcgagatatgggcgttcgtaaggcctacgcacaaagatatcgtcataaagccctcgagacaaacgatatttgtcggcgtatttcgccaaagctcattgagccgcccaaagtagttctcaacaatcacacgatcatgcgcagtccggtcattgtttgcttggtctgctcgtctcagatactttccttttttcggtatgataccgcgcaagaagggagcaatgtcttgatatcgtttgtctgctaacagaacccgttcatctggaaatgcttctagaaggggaccgtcgtctggaagactctcattgcctgcaactttctcattttgctgtgatggaatgccgtgttgctcttgaagatcgtgatgtcgtgtgttgccgcaggcacatgctcgccgcaattaattgcgaagccacgaccgatacctccacctttagcccatacagaagatgcttcccgctgcagtgctgccgcctggtcgccagctctgttgaaacgtgacatcttctgcatacatggcactcggaaaatgctcaaatgtgttaccccctgttcgtgcgttgcgcattgttgcctcgtcgcaacgatcctgaacttggtcgacgtaaatcttaggagctagaattttgatgaacttcgtaactacgtccatgaaggtagtggtagtcaatcgaaagcgattggcgttggagtcccatgttctcccctctttgagcatcacgagcgtcctgaagaaggcgtcctttggcttaatttcggagtgcttgcctcgaccaacgttgtaattcattcgtacatggtcacgaacagtgagccacagtgcgttgaactctcgtagcgaaaagttagtcatagcgtggatcgcgccagaaccaccaatctcacgaaacgggtccattagaggcgtgtcggtttcatcggtgtcgacttcatgcagtggtgcgttggggaaatgactgaggtcttcctctcggtcaatgcgacgttcttctagctctgaaagtatagattcaacacgatcccgggcagattggcgcgtaccgcgtggttgtgctggcattgctggcttttgactttgttttgtatgtggactcgggaaagactgagaaactcgggaaatgtgctaccttctcgccgggaatctttcgcttacgggagagactagtcaaatcaaaggtgggcttctcttccggacatgatgaatcacaacatgattaagtagggttcccccaaacaacaaagtgcatcgccagccattgtgattaccagcgggaccacatgtgttcccgccgggttatcccagttatgccaatttttcagtcaactcgccaagtggcctattgcttctgagttatctggtggctgaagctgcgaccgacaaagcagacttcatacgtaagctttttaacagtaaaataaacaatcggatctccgagcaggaataaaggcccatggctgacgccacgcaccggaagttgtgagccgcttacactgtctttgtgttgaatggtactaggcatccaatcaatatattagtgacgactataagcctttcaatacttcaggcatccaaacaatccttgaaggttgctactgtattctcaaaagaagagagcacaagtggagcggctgagcgcaattgacagaagtgtcctgttcataatgtactactgaagctattattaataatactacgtactattgaaacaacagcaataatatacggtaatggcgcatgaatactattattcttcatctcctcaatagcagtaaattagcggttcccgttgaccagtcacttacaaacccaagatattactccctctcacccgccccccgccggttcttaactatgaaaaagtcataactgcacagtacatccgaagaaatctagcaaagacttttggtgcatgtggccttgctttcttccaagttcttcgcggagcgtgcgctgcatttctcgcaatccgctcaccgatctatccgatacgccagtcgcacctccacaaactagaagcttcgcgcgacccacatgagatgctctttaatttcttctggctcaaggtcctcctcatttcacgtacgacgctccatatcgtcctcgtccagattttctgcgccgttctcagtgccatctacagccaattcttggtcactaactccaccgaagtcttcatgtgtgggatcttctgcagctgtgttctcgtctggcgggttcagcagctcgtccacggacattgggtccttaacgtgcagacgaggtaacatcgtcgcaagcacagcggacattgcatcgtcttcgtctggatcatcgaagacgcaattgtagtactttaaatgcccggtgtgcttcccagcatcttgcgaagaggggaaggtgaaaaaaacaaattgtttccactactggatgcggtgcactgttccaaaccaaatgtactcggaatgtgacggggtcacacagcaccttgcgctgaggaagtaggcttccaagagtatacaaacgctaagtgaacgaccgttcatgtgtccctggcctgaggggacgaagtactcacttaagggtacgattaagactgaatgtatttataggtaagcttagcttggtttctaatagaaactataagtcacctatannnnnnnnnnnnnnnnnnnnnnnnnnnnnnnnnnnnnnnnnnnnnnnnnnnnnnnnnnnnnncattacaagagtgactggtcactccttcatgtaacttgggtacacttggggtttgtacccagttacatatttccccacttaggttcggtttaccgaccaatcacaaaagggagacagagtcacagactctcattccccgagtcgaaaggggttcgacaagctgcggggacgaggctgtggcccatttcacagttggagccttttgagcgaaaacgcccgtcttctcggttaccacatcatgcctcgcgatactgccaagagcggtgcgaaatcacccgccaaggctgctgcccgaaaggcgcacgccaagagctctaagcgtcatagcaagagctcggcactcaaggaggctactaaggtagcctccgaggcggttgagttgatgtgactcgactgcgagcaagcggcaaagctcacgccggagtcggtcgccctcaatgtccccagacgaccgtccgaacccacggttcgcgtgccgtgagcacagtcctggttctgaggacgaggccaaggcccggagcttccgcagctgggaggggatggcacactccagtgcccagcgataacagctttgacagcttgcacttgctcgctagtgatcacgatgatcacgactcaaagacgcctgagcgctctgagagccctgccgacgaggctaagagctcgcccaatgctggcggcgacgagggaggcaaacctccgaagaacctctcgctcaccgagagccttgagcgtgctcaggctactaaagctgcagccactgaggccaagcactctaagaagcgcatggcttctaggtctccactccgcgaggggaaggagaccgatccgtacnnnnnnnnnnnnnnnnnnnnnnnnnnnnnnnnnnnnnnnnnnnnnnnnnnnnnnnnnnnnnnnnnnnnnnnnnnnnnnnnnnnnnnnnnnnnnnnnnnnnnnnnnnnnnnnnnnnnnnnnnnnnnnnnnnnnnnnnnnnnnnnnnnnnnnnnnnnnnnnnnnnnnnnnnnnnnnnnnnnnnnnnnnnnnnnnnnnnnnnnnnnnnnnnnnnnnnnnnnnnnnnnnnnnnnnnnnnnnnnnnnnnnnnnnnnnnnnnnnnnnnnnnnnnnnnnnnnnnnnnnnnnnnnnnnnnnnnnnnnnnnnnnnnnnnnnnnnnnnnnnnnnnnnnnnnnnnnnnnnnnnnnnnnnnnnnnnnnnnnnnnnnnnnnnnnnnnnnnnnnnnnnnnnnnnnnnnnnnnnnnnnnnnnnnnnnnnnnnnnnnnnnnnnnnnnnnnnnnnnnnnnnnnnnnnnnnnnnnnnnnnnnnnnnnnnnnnnnnnnnnnnnnnnnnnnnnnnnnnnnnnnnnnnnnnnnnnnnnnnnnnnnnnnnnnnnnnnnnnnnnnnnnnnnnnnnnnnnnnnnnnnnnnnnnnnnnnnnnnnncgaggacatgttctgggcgtgggttgagactctcaagtactcacccacggagttacaggaactccgagaagatcggctgctgtccaaaatcctggaccagcgcgatcttcgcattcgatttttccacttggtcagcaagcgacagctgccaagggacaccgagaagcgcgcggcttctagcgctcatgatgagcgcgggtacggagtgtcatcaacgttcataccccgttcgggcaagaagccccggactacttacgaagctgccgccgcttctgttcccagatcgcgacagccttcgggcagtctgcctggagccgttcaatcggctcccacgagttctcggagtgggaataacccctccacaaggagctagctcttacctcgaagccgccgctcctggagtacccgctccacgtggtagtggacctctccgttccggggagccactctcgtccgagtgctcaacctgcgggtccgtcgcagggccctgaggttgaccgcctccgtcaacgtgttctcgtgcttgagattgcactaggccttgggactggcggtgatgctgccgcctaggccgggaatcagggcgttctcgctcgacttgcggaacgcctgggtcggttgcagcgagaggtccctgacgtgcatgggcgggtggaccttctcgtccgatcttgacgaggccttccgccagattcgacgtgttgagagtcttcaaccacgtccggagccgcccttggcgcgctcccagccgtacgcgtatggtgcgtacccggcttactcggcgtatacgcctggggttcgttcgtacggggccccttcggcgtacgattttgatcgcggccatgctgtccagcgcgaggcttggacacacgcctctgtgccgacgtctgaggccgctcctcgcttcgaggagctggaccaaggtgggtctgcgagtcagcaaccccctgcggatcatggtaccgctaacgacgtccgacataaaacgtcgggtgcgtcgtcattgactttggtaggtcgatggtgtacgacgcaccatgtctggcaaggactgtaaacggtccgatgaagcgatgcttcaacttgttactgccgacagagctgacagtgtcaagcggtaggtttctagtgtctagtaacacaaattcaccaactttaaacacatttaagtttcctcttccatgtttgtctgagtactccttttgtctgtcctgggccgctgccatggcatcgcggaccctgctgatcacaatcagcttggtgtccataaaggactccacttgtttccgcagtgaaaccggtctcacatctgagacctgggaggaaaggactttccgagcctctcccccacttaaaatagaggacgtggagtctcctcgaagagtgagcggcactctggggtgcgtccgtctgcggatggtcggcagtggacatctgcagacgagttccaagcaatgggaacagcgtcttccagaacgcagcggtgaaccgcgggtctcgatccgagacaatggtctcaggcagaccgtgatagcggaacacgccatcgacgaacagccgtgctgtctgttcgcctgtgaccgtaacgggcaccggagcaagatgcaccatcttgctcagccgacacacgaacaccacaatcccggtgttgccgtgtctgtcggcgggaagtccaaagatgaagtcaagactcatcgacttccaacagtcagcaggtacgggcaggctctgtaacggagccgaagcgtgccctgcgggtttcacccgctgacatgtttcgcatgtcttcacatacttggcgacccacttgtacatgtgggtccaccagaaggcctgagaaaccgacaaaaaggtcttctcacggcccaagtggccactggagggcgcatcgtgcgcctccgcgaggatatcaaactttagatcctcgttgttgggtacgaccacccgtgaa

SEQ ID NO: 246 - DNA, 11963 bp, unidentified
  misc_feature 1..11963: note = Fanzor polypeptide
  source 1..11963: mol_type = other DNA
acaaagtcgtgctgcgcccgaagaaccactgaaatttggtcaatcttgctgtataaaaagatgaaagtagatttttttatagtcctgtctaaaacgaagttgtcttgccggcagaacacaaatgccttcttataaccttcgaatgatgatgtaagttcccggaggatagattatctaactgtctgtcgtccaggtcgagtcctattgtattacataatgcgggagaacttgactaggtaaaaaaaatacagttgcactcaaataaccaaagcgaatgcttagaggttgtagtgctcgttgttgctattaagcggcacaagagtgctaactcaaacgcatgctgcgtgagctttcgacttctttattttaccctttcgaatacgataacaatagtgctagcaacgctacgatcacggacgcactgagaaaaaacgattactttttctcagtggcgcatcgacgccaactacgaactactaatgatcctatgtggagggaggctatcgaccgcgggtccactgaggtcgaagtcctctacgatgcggtcgtgacgacaatacattttatttcacacaagctgcagtttcggctaatcattcgaaaattcatatctgttaacacacgaaataacataatgatatttctccatgcagtaacaaggcttacttcatcaagtgctgctgcggtaagtgtaagtaatctccgtttttatttatgtattcttgggcgaccgtttacgtgtttctattatcgcttttgcctcaactcgcctccttttgtagatcttataaaagagcagacaacaccgtatccatactagtcgttggtgaacgaagcgcttgaatgcggtattgatgtagtatatgccattttttcttcacacgacacaggggtcataagagctcttggaactagaatactttggttgccgcgacgttgttaaattccatttttatgtgattacggtatctgttcgtagtaatcgatttcttcactgaagggggggggcaaaagatatacttactgcgctttgtgcgtgagactcgagcagattacgaacatcgtgatagtgcacatttataggaataactagggctgtgcgagggctgggatagccaacagttattaaagaggctaaaggtcgcgaacagctcataccggtaaaggtatatgaaacggcggttaccggcttcagtttttcggcttcagttaccgtcgagcgaattaacctgatttgggctgtcccagcagcacagagttactgctatcccagaatgaatactggtaagcaagaagagccggtccagagtaaattatgggccggtctactatttcatttgatatgacttaatcttttctccgacggtcttcattggttgcgactaggttttggcacaatgatttttcgcacgaagcgtgcacagtgagtggataggcataaattttacaataagtcgtcaagcacgtgatcgaaggtcgagcccaatcacacgctttctacgtgacgcacagtaggagaatatttgcaaaaataagtctaatctcagttccaactgctacagttaaggacgacgaagctgttggtcagcggtttggcgaatctgacgaatggtttggtcctgtcgaaattgaaatccggcgggtcaaaacggcgaacctgctgaacaggctcaagagatcgtgcttaaatacgcgttctcaaaacttgctaatcgtgttgggtttctggggttgcaaccccagtgtcgtgacctaaagtgtcggatttgacctattttattggttaccgaaaacgtaaatgatctattccaaaataataactgacatggagaagttcttgtaacttaagacggagatcctccagcgaatggtgaccgagattcgaatctaccaccccaatgctggcatcagcgcagcaacgaaagcttctacaagaggagcacagccaaacggagtaattagtaagaaggcgaagcaaggctgagaaacactagcaagtactgataaaatattgtctatcatttctaaagtatctgaactcatgttgaagtctcccatgttcaaccggagtcatggaagacttggcacttcgtcacagtatagctcgtagcgccctacgaaagatctatcacttgtcatttggcgagatgcctcgcaagcgcaaaaaaaaaacaaaaaaccacagcaacaactacacagtatgtgtaccagtgcctcagtcgcaagttgaatcaagtctgtggtctggatttcctgcgcaaagagctctagcgaacgaccatcgttctccgccaggtggggctcattggatggaaggtcgggggaatgtatatcctccgcagccttgatcagggcaaaccgcttcccgaactcaacgcaatgtttttctaccgatgctgcgctgcttccctgggctcgactgagaaacgagatcggtacaagacgaaccccaaataccccgacctcaacaagactttcttaatgtactgggaacttcgacaacagcttcgagcccacgtggcaccgtcgctggggtattgcggtgccatgataaacgaaatgatcacgaaaatggcggttaatactgccaacatgttggctcgacacttccgtcggcgactgtaccaatacgttagattacggtacgcgaaagaaggaaagattcagctgagcttcaacaaaaccaagaaacttattgatagctgctatcgtgtccaagaagttcaggagtttgacacaaatggcaatttaacagctactatgaaaatgtggggtgcttgggataaatggcgaacttcagaagagcgcgagttacgtgagtggctcggtatggcgccttggcattggacaattcgtgagaatctaggttactttgtgacgaaggtgtacgacatgctttcgtggatggaggatttgtggagaaacacccaaagacaagaggggctcatctctactcgttactaccacaatcgagctctttcataccatctcacgttacattgaacgcgacgactttgtacgagctcttttgtcgcatttacgataatccggtggcgaaaaaaagtcgtgaatggcgatctgggactggaatgcagaactaaggcagctcgtgctacctggacactaaatcgcgaagttattatccgctagcttttcaacgtaacggagttggagaccagaacccgcaagttcggtaaccgagacacgacggatggctatgcagcttcggtactactcgagcgcgaaatgcctaccacagaacccacagacaccaatacggctccaaggaaaaggaggaagactagcaaaaatcgattaacgaatgttgtggagaaagatgccttggatttggcacgtgacaagttaccggaaggctacacaccagacattttcattgggatcgatcctgacgttagaatactggtcacggctgcgtcgactggatatcttccacagcaacggcaaggccgacagtgcaaacaccgccacagacgtcgtcgctttcgcaaaaaagattcgaggaagtgcattgcgaagaaccaacacggacacggtcagcgagttatcggcgtcagcacagctgagtactatcacctggccaagctcaataagaagcgcgtatgggacctcaacttgaggaagacagaacctgcgtacgttttgatattgaaggaaatgccaagttttaatacttctcagctgacaacattcatggatcgactccagtactttgtgaagcacgtgggctttctcgtctcgtattcgaccaaaacttcgtttcgaaagtggagattcttaaccacaagttcgaagatgcgggcgttgactgcgattaccaagcgacttgttccgatccggagtgcgcaggtctgcatcgcatttggtgattggagctgccaggacggtctctgtggaaaccctagcgctccagtacaggcactcaagaaagaactggaacagcgagcgacagtttgcccatggacgagtttcgcacctgtaagctgtgctccggctgccacaagcacctcctttcagctcggctattgacaaaggtgaaagaccgatagaccgagaagacctcgattgtcttggagacgtcttgtgctgcaagaacagtcgatgcaaggcacacttctggaatcgagacgttaatgcagcgagaaatatactagagttactcaagtgcaggctttcaggcctggggagactggcagctttcgagcggtgactgcgagaccaagatcgtgattggaaagtccatttcttagaaacatgctgcacttgaagggtgtgggctttttgtctggggacatgggggagcatccactcacacggtgtggaggcgcacaactgcttcgacacaagaatccgatacaagatagcgattacgtaccacgagtagtatgtagccagcttgtaacttaatggttaaatcatagaccccgaatgtctgcgaattcgacacacctgcactgtaatttgcaaagctgatgtaaaacagcatttaaatggcccagaggcttcctgctgtagtttatgtgcaaatacaagcacattcctcaagggccggatcatggtgatcccgtagaatccgggtagcagccaaacgtgaccctcatgttctccacaaccgatagccttgtcattacaacagtcggtcatctagataaaaacggtaaatatcagccatccctcctgtataaatggttgattgagacctctcgatatatcaagtatactcgatactaatctccctggttctcgaagatctcggaggagcttgagaacgtttggtatatcggtgaaagcaactacagaagacgacaattttgaagacagggcgtttggttcggcacagattaatgaggtacttaagacagggacaaagaatctaaagaaggtcgcggctagcgcaaggctcatgtttacaaaggcatgtgatgaagcagaggaagcttagtacttagaagtaaaattgaaaagtgaattgttttcttgttaactactctattgtagctaagcgtcacacggatgaccttgtcgtggtcgtaaacatgtacgtgaacatgtatgacctcgacaagtccgttaacgtaaaagtaaacctcgaggtcaaactaacggagtaatccgttacaggacaaccaaccggcgacagacaagctgttcacgaggtttaaagttaatacggcacaagagaatctctttgcgactaaaagagttcgggaagtggtcgaccggagtggtcaaaaacttcaaaaagaactaagaagcggcggatgttgccgtgatatcaacgctgatgagtcgtttggatgatgatgtgttgttggcaaataatctgatgctggcgaggcgaacgcaggcacggagagtattgctacgaggcttgaagaggctcagcatacgtattggttgcttcataaaaacagcgcggatgacgttatcaagctccttaatctgaataaggaaggcgacaacgtgctctgaatctctttgtggagcattggctgcatacataaagaaggtaaatgaccagaacccagacgaagcgatattctctgtgttgaagacacactatgacagtgacgaaatactagcaaagactctcgttggggctaagatggactacagaatggttacaaccgctgcgaaattggagaacatgcaactctcgagatggcggtatgatgatagaaccacggaaactgtcttcaacctgctgcggttaaaccaggaaggaggcgggttattgataagcaggttgctagacacgtagatatcttacgcaactttgatgaaggaagacccgaacaaaatcttgctggtaaaattggcgactcgctaccaagacgagaaatcgctaacgcagatgctaacttccaacgcagaaggatatcaatactcgatcaactgcctataatttattgcaagcacagatggagcagtggaaaatcagtcgcaagacagctgaggaagttgttacgctcctaaaactgactgaagatggcagcaacttcctgaacagccccgtcttgaaagcttgggtatctttggtagagaagttgaaggaggacccgtacgagttaatgttttccaagctgatgaagttttataatgctcataaactggccctacttctacgctggtcatcggtgcttgacataacgggaacaacgagtaagctcgaggagtttcaatgtaaattttggaaggaaagcggcaaaagcgctgatgatattttcgaacgtttgcggctgaatcagaaatctgacggctttttaaacaacccagtgtcgcgtatttgggagatctacgtgagaagattagatgtggaaaccaaataaagaattgttcttgaaattgaaagaaagctacagtgatgaaggactggcaaagatgctcatagctgctaagaaagattccagtacgacctacatcgctgaacgtttggaggacgtacacctccagtactttcaggaaaatggcaagacaacagaagatgttcataaatttcttcgattggacgaggaaggtaaaaacgctcgtgaatccgccgtcttcagcacgtgggcatcttacgtggctaaatccagacaaggcaatgttcttgatcctacagaagaaatacggcaacaaacgtttggcggaaatggctagtcaggcagaggatggcagtactacaaacagcggagtcaggaagagatttggagaagtcaacagatgatagcggatggcgtcttcaatctcctaaagttgaaagaagaaaggaacctacttgtctctccagcttttagcacctggagctcctacgtgacaaaactgaacagctcgaaggaggaaccgaatgacttggcgattatcgtttatttggaaagaccctttggcggctttggtctggcgcggatgcttgatagatcgcagcagagccctaaccgacaagtacaagaggatgccgagaagttgcagacgctgcagctcaagcattggatgaatcatcactcggacacgattcgaatgctaaattacggcaacatgttggatgaaacggacacgaggatctctatcgtttataaaaaattcttccaggctaaaaacaagaagtagcacactcctgttacttggattctacgacgcgaagagcgtcacgatgtacagtcaggagtaagatcacgagattatgcagataccgatcaatataaaaaacgttacatgcacatgatatatttgagacctgacacaaaagctgctaagaggttccgtggcaaacaatacttacaatgtctttcaaatctcagttttgtcctttataccaaaattcactggcgtactgcctaaagagaacacgagttggcagcgcattgacactacaccaactcgcattcgcggcttcatccctttctgaacgtgacattcaagtttaaacttttaaaagtaggatcgcagtgttcattgcgccattttcgtgtaatagcaacaacaactgacggttgattgacagcaagtagtatgccatcgtcctcaagcgtgacacaattggtccgttttaatattaggtcggctgactagttggtttgcaccaagttaaatatcatatcttcaccgatcaacaaagttttcacagctgtcggcgctatggcccatgcggatttgcatctttgccgagagagcagcatttttgggggaaagtgacgcttttcccgtgaacatcaatcttttaatatcaaacgcaacaactagctaaatgcaaaacgactcgctatttcgagcctctccgggccgcccaatcagaactccgcgctatgctgtgtcagggcatcttcacctgcgtccgcttccccgcctagatcggatagcgtagaagccttttcttggatcggtacgtctcttgagcaagcttacgcttcttttttagcttcaagccaagctcgatcaaccttttttgagctcgtctgtaccattcaccattctgcagttgtagagggcaatgcgagatatgggcgttcgtaaggcctacgcacaaagatatcgtcataaagccctcgagacaaacgatatttgtcggcgtatttcgccaaagctcattgagccgcccaaagtagttctcaacaatcacacgatcatgcgcagtccggtcattgtttgcttggtctgctcgtctcagatactttccttttttcggtatgataccgcgcaagaagggagcaatgtcttgatatcgtttgtctgctaacagaacccgttcatctggaaatgcttctagaaggggaccgtcgtctggaagactctcattgcctgcaactttctcattttgctgtgatggaatgccgtgttgctcttgaagatcgtgatgtcgtgtgttgccgcaggcacatgctcgccgcaattaattgcgaagccacgaccgatacctccacctttagcccatacagaagatgcttcccgctgcagtgctgccgcctggtcgccagctctgttgaaacgtgacatcttctgcatacatggcactcggaaaatgctcaaatgtgttaccccctgttcgtgcgttgcgcattgttgcctcgtcgcaacgatcctgaacttggtcgacgtaaatcttaggagctagaattttgatgaacttcgtaactacgtccatgaaggtagtggtagtcaatcgaaagcgattggcgttggagtcccatgttctcccctctttgagcatcacgagcgtcctgaagaaggcgtcctttggcttaatttcggagtgcttgcctcgaccaacgttgtaattcattcgtacatggtcacgaacagtgagccacagtgcgttgaactctcgtagcgaaaagttagtcatagcgtggatcgcgccagaaccaccaatctcacgaaacgggtccattagaggcgtgtcggtttcatcggtgtcgacttcatgcagtggtgcgttggggaaatgactgaggtcttcctctcggtcaatgcgacgttcttctagctctgaaagtatagattcaacacgatcccgggcagattggcgcgtaccgcgtggttgcgctggcattgctggcttttgactttgttttgtatgtggactcgggaaagactgagaaactcgggaaatgtgctaccttctcgccgggaatctttcgcttacgggagagactagtcaaatcaaaggtgggcttctcttccgtacaagatgaatcacaacatgattaagtagggttcccccaaacaacaaagtgcatcgccagccattgtgattaccagcgggaccacatgtgttcccgccgggttatcccagttatgccaatttttcagtcaactcgccaagtggcctattgcttctgagttatctggtggctgaagctgcgaccgacaaagcagacttcatacgtaagctttttaacagtaaaataaacaatcggatctccgagcaggaataaaggcccatggctgacgccacgcaccggaagttgtgagccgcttacactgtctttgtgttgaatggtactaggcatccaatcaatatattagtgacgactataagcctttcaatacttcaggcatccaaacaatccttgaaggttgctactgtattctcaaaagaagagagcacaagtggagcggctgagcgcaattgacagaagtgtcctgttcataatgtactactgaagctattattaataatactacgtactattgaaacaacagcaataatatacggtaatggcgcatgaatactattattcttcatctcctcaatagcagtaaattagcggttcccgttgaccagtcacttacaaacccaagatattactccctctcacccctcaatcgtaaaatggaatacatttgcagtcaaatattcctattctggggttcttaactatgaaaaagtcataactgcacagtacatccgaagaaatctagcaaagacttttggtgcatgtggccttgctttcttccaagttcttcgcggagcgtgcgctgcatttctcgcaatccgctcaccgatctatccgatacgccagacgcacctccacaaactagaagcttcgcgacccacatgagatgctctttaattgcttctggctcaaggtcctcctcatttcacgtacgacgctccatatcgtcctcgtccagattttctgcgccgttctcagtgccatctacagccaattcttggtcactaactccaccgaagtcttcatgtgtgggatcttctgcagctgtgttctcgtctggtgggttcagcagctcgtccacggacattgggtccttaacgtgcagacgaggtaacatcgtcgcaagcacagcggacattgcatcgtcttcgtctggatcatcgaagacgcaattgtagtactttaaatgcccggtgtgcttccagcatcttgcgaagagggaaggtgaaaaaaaccaattgtttccactactggatgcggtgcactgttccaaaccaaatgtactcggaatgtgacggggtcacacagcaccttgcgctgaggaagtaggcttccaagagtatacaaacgctaagtgaacgaccgttcatgtgtccctggcctgaggggacgaagtactcacttaagggtacgattaagactgaatgtatttataggtaagcttagcttggtttctaatagaaactataagtcacctatagtaaagctatgtagatatgcaatgattggctcctagagcccctggtaccatgtaccaggtattacaagagtgactggtcactcttcatgtaacttgggtacacctggggtttgtacccagttacatatttccccacttaggttcggtttaccgaccaatcacaaaagggagacagagtcacagactctcattccccgagtcgaaaggggttcgacaagctgcggggacgaggctgtggcccatttcacagttggagccttttgagcgaaaacgcccgtcttctcggtttccacttcgaccacatcatgcctcgcgatactgccaagagcggtgcgaaatcacccgccaaggctgctgcccgaaaggcgcacgccaagagctctaagcgtcatagcaaaagctcggcactcaaggaggctactaaggtagcctccgaggcggttgatgcctcgggtgactcgactgcgagcaagcggcaaagctcacgccgcagtcggtcgccctcaatgtccccagacgaccgtccgaacccacggttcgcgtgccgtgagcacagtcctggttctgaggacgaggccaaggcccacagcttccgcagtgtgtctgggagctccgtgggatggcacactccagtgcccagcgataacagctttgacagcttgcacttgctcgctagtgatcacgatgatcacgactcaaagacgcctgagcgctctgagagccctgccgacgaggctaagagctcgcccaatgctggcggcgacgagggaggcaaacctccgaagaacctctcgctcaccgagagccttgagcgtgctcaggctactaaagctgcagccactgaggccaagcactctaagaagcgcatggcttctaggtctccactccgcgaggggaaggagaccgatccgtactacacgatcttcgactcctcggacgaagaggaggagggtgccatcaacgagccccgggagatcacaaatgatctcgaccggcagcaggaattgttccaagctgcccggcaaaagcctgggggttcggaggcgacgcctgtcggccagggagcttctatcaacttgagaggttattggcctcccgaggagagctttggagccgacctcttcttggcggagctcaaggctcctcgtgggcttattggtggccacacttctaagggcgcttacgagcgtgccctggtccagaaggaacagttgttcgcggacaacgtggaggcggcccggtgcctgcttctcgcgcagcaccagatacctctgaaggacttcacgacttgtcattagtagcccgagaac

SEQ ID NO: 247 - DNA, 20627 bp, Phytophthora sp.
  source 1..20627: mol_type = other DNA
catccacgttcagcttcagcaatttgaaaacatcatcactggtttggccactattcagccaattaaccagctgaagatcttgccatttcacagcatactgtctgaacttgtaatcgcttcttgccgctactattagcttagccagaacttcgtcgctgtaatgagtcttcaatgacttgaacatcaattcagacgccttatctttgttgagttttgttacgtacagtatccaagtgctcacgagcgagtcttcgaatagtttttctcctttctcatgaagtctcagtagcttgaaaacgtcgtctgcactttgttctttgatgtgccaattcgtaagctgagcgttgataaacgtcgttgccgtagcatgcgaaattttcttcgcctcagttagcatcttcgcaacagcgacgtctccgtagtgagccgccagtgacgacaccattgccacttccgccacttcaggcttcttcttcgcagattttgatagagaggttgaccacgctatgaagtggtcggtttgaagaagtgctgcctctgcactggtacctttgatctgctcgaggaatttcttggtggcttttgcgctgctcgatttcaattgcgtaaccagttccgcgattgtagaggaactagtgccaagtcctcggtcgtctgtcgtgacagttctcagacgtcgaatagcttgaaagctcttgttcgggttcgaattcggagagccaatatcggcgttcactgtcgcgttgacagatactgcaaggacattgacttgtgcaacgacagcgacaacactcagcagtacgatgccgtacagacacttgtttgaggtggtcttgatacccatgaaggactgcgaatttggtggagaaatgggaagtgatagaaaacaccagtaagattttgggactctatctccagtaattaccatataaccatcacgtgatcaagatgtacttcacatcacgagatttggatttgcagtcaaatcctactacagtagttgatggcatcaacttgatcaaataaagcatccttccgtggaagccacccagacgtccttgtgatggcctacttagctttccttgcgaattctgtccggaaacattgtgaatgatctacgacgaagtatgcaatggtgctgcttccttacttttaagcacagcgacttcgaaaagaaaaatagttcccactcgtgctgctgtaaggctgctaggaagccttgccatctattaggaagatgatttcgggtacacatatagtttcacctgctacatattatcgaaaattgctccaagcataccaacttcgccaatttaccatcgttttctgtgagattgataagaacacttaaaagttattctttagattcaaaatcgtagcatcgagcatgccgcctcgataatagacagaagagggtagttaattcacattaatagaggatttctgaacaaaccaaatactgtagctagaaaagggtcatatatacagtttttattaagcaattgaccagtcgaaagccagtgggcaatcttcccggttatatgtcttctgacagtctgagcttgtttcccgtgaccaggctcttcgctgcgtgtcttaggcccgttctcaaccgaggcgtcagagggacgcatgcgttgcatgcgtaccctaaacatcgcaattcaaaatacttgactatcattggcagaataatagctagtcatgttgtgttctagcagttctagcctggcgctaaaccgctaccaaactactggtaattaacgagcgcggcgatggaaaaccaggatcccctcctaggagagaagaatattcccatcgtctcaggagcctcctcagcagatgcatgcacttccccaggttcagcaaactgtcgctccctcggtgggttctgattctttgcattggaagttctctccacccgtagcgaggaatctcgctgacgagctcggacgtctttcgccaccgtcgccacctctaccgatcttattcgaggctgaagtacgccatgcctttcgtggtggggttgaatgccacgaaaagggctatggtcaaagcacacagattgagcgacatggcggggacgtcctgctggtaaaagtggtttaatcgcggaggggcatcttgtgtgggagccgtacgaaaaaatcggtggacctcaggctgcggcgttggcgcgcagcagggatgcatcgtctctctcgctcaggtccacttggagatctttggggatacagagccattgttgttgcgatctttactgtaaaacactgctaccttggaggttaaagggagagtaaaactgtttggttagggaggtcattgattggctaaaactcgaacaaaacgtgctgcctatgggccgattgcacagccaatcaagtcgcaaagtggttgttaagcacgcatgcgtccgaaaaacgcttcggttgagaacgggccttagacacgacgtctatcttcatcagactcgaacattatggatgatcaaccctaataatccagatattcttgagctcgaacaaaaaaactatagaaagttagtatatgctcgttccatactccggagtaagtgcacggttttgtctcttacaacccactcaccagccagtttccaagcagcctcgaagatcggaactagatgatactgtcggcatgactgctactgactagcgagactaacggcgaatcataacacatacacttgcaataacaaacgaacactcatgctacgttcattttgctttaggatagatccgaccttacgtaccttctcgtttctgccacaatagccgctggtcataggtcgaaacaaagcggtcatagctcaccacttcgtttcttagatctcccactggtatatgcactctgtttacccaagcgacgtcgtcctcatcacacaccatcgttcgtaacacagaaaacggcggaaaagcgactcataaaatgaaatgcgcggcggatactcttgaaaattcaaccgtccacgctggcgattgccgtcaacggcaatgaaccaacaccgtcgcacgtttacacgaagtacatctcgcccttcatggattggtgcaagtcgtacatacgcgtgtccgtttccggtgcagtctcactgaagcccgagacagttgaggcagtgtcactaccttccgccaggaagaaccgcgcacggaacgccacgagatgcgaatagtaggccgacggcaccatggagacggagcgagtgcatcgcgcaaacgtgtaacacagtttgtaagtgagcgtctgcaattcatccgccgtaaagccgatctcattcagcagcacgtggtagtgcgtggggcgactggtgccttgcagtccagcgtggctcatcaagtaaaaatcgttctcaatcgggtgacagatagcagtgtcgacaacagttcccgccttgacattgccactgcgatcagcatctctcggagtgtcagggaacagacgggtattgtggcgcttctggacaataacgaacgtgatcgggggtagataaccgacctccagcgtctggcaagcttcacggatggccgtgacttcgtaattcagcaccatgtggaactgtccttcactcactccatcgcgatagaagacaatgcggtccggtttgccacgcgtctggcggtagaactgcttcatcagttccactaccatatctttaaggttcataatctgctcgacacggtggccttgtgcacggatcgccgatgcatgtcggatgaaattcgggtccatagacgccgtaacagcagcgacagaggggcgactcttgtccatgggacttgggtgcgtgacatcggcaccaaagataatggtacgcgacgccgatacacgcggcaatgggccactgataatgccattcttcccacccaacttggtgttcaccttcatcagaatattggcgatatactgagggttgcacttctggatatgcttcgacagcatgcactgtgacagaatacccataccagcttcactgtcggacatcagcttcaactctccataagcgtgtgcatccatcctcgggttgatcatccagatgatctgcgccggggtcttgaacgtctggttggcagcattcactgcggcctggaacattccacgcactgagtcctctcgacgctgcttcaacaggatcggaggcagtttaggcggacatcgcatgcccaactgacccatctgtgtcatcacagccttgaagaatttctcaatactggcctggttacagtatctcgcgtctgccatactgataacagcccacgacttgagttgagccggcgtattaaactttttgccgcgcatgttccacgctccgtcacgtggagtttccgtagctcgcccactgtactcgatcgtaggcggtggcaactgacgaccggtagtctccaccatacgaggctccacatccagtccaaaggctctaagcgtcgggtccgtgctgaatcctgcctcacggaacttctgctcgatcgagcgcttgcgctgatccggcggcgtgcacgtaaacttgatcatattagccacctggttgtccgtgaccttacgaggacatttctgtcccgccatgatgtggcaaacctccatgggcagataattcttgttctgtggggcgccaacatggagacacggcagcttcggatggcgcagacgcaggttgtacgtcttttggaagtactgcacaatagacatgcgttgtccctcgtcgttctcaaagaacgtttgctctgcgctgttcttggtgagcccgttaacgcggtagctgcgtcgcactcctgggcgatgagtgatgttcactttgactccacgaatggctttactgaacgcagagtgttggtgtttagccagtgaaggtggcaggtttctcaaggacagagactcacagaggaaatccagtacgtccatctcctttacgaaggcggtggctgccaagtccaagttgaccacaagtcgattctgcgtggctctcaagctctggaagtagccgaaccagagctcagctccttctccgagagatttggcgccgttgccactgaacaagtttcgtccaactacagtgaatctctgcgatgctgagtgacgcagagccacgtccagcgcttgtagtgcgtcgtacggcgtgtagttcaagcgtccagcaaagagctcgtccagttgctgcatgcggatagccacagggtcggcttccctcacagtggctgagaactccctggctctgcctccatcatcaggtagtgtaagaccactgaactcctggagctggaacggcagccgacgaggagcgtatatgttcttacgggcgtcagagacaaccataaagtctgggaattggcgcttgagctcggctaagagcgcggccatgatcttgttggctagcgtcttaggtgggccgtcgttgccgaagctccggccgctctcggccatcataacgtcgtagtgaaacacgtcgccagccaacttgaagttgaccttgaagtggttagcgtgcagttttacagctcttccagccgtgccgaagcccgggcgagggggaaatgcgtgtttacgagtggctgcaacaggcgaggctcatccggaatgcgcgctttctcctccagctccagagcgagcgacgagacgctgggggttgcagccgacgctgcagctggcgccggtggcggcgcgacggcgcgtgaggttggcggaggaccaggagcgggggcagcagtagcggggccgccgcgtccgcggcctctggcgccgccctggccacggcttcgacgcggacggccgataacgggctcggaatcttgctgcttgttgcgccgtcccggcattttgaagaatgagatgcggagcgacagggagggattttccctctcaaaacggattcgcgctacttcacaagattgcagcttaaaagcttagaactattatactaaattgctgaaggctctgcattatatttccccctgcaagatactttgggttgacggtgggaaagatctgaaagacaaacgagccgctggtcagaacgcggctgtttgcttttttgttttcagccaggctaatcacttgtagctgatttggcacaactgaagagcttttgtggtgccctggatgcatctttcccaacactgcgtcgggtctgtctgatttttcaatcatcggctgggaacgggataatatctccaatctctaaccggtttctccctagaagaatttctacaagcgaagcagttccgacaagtgtcgacactaagtagttaaaaagactagattgtctatggtaatatggatacattcatttatacttacttatattaaactaaagacaatcatcatccctccattgacttgcctcctgctccctctaataagcaaatataggggaaacggacaaaaatcctcagttaatgaggcctgctaataatagaacccagctctgattacgggtgtgctcgtttcgagttagacaatttgtcgttcttgtcgccgaaccgatcgaagcgaaaacaagattaacgcgttctgctgtaggggaagggctacaatgtgaaatagtagaaatattatacaaagtcgtgctgcgcccgaagaaccactgaaatttggtcaatcttgctgtataaaaagatgaaagtagatttttttatagtcctgtctaaaacgaagttgtcttgccggcagaatacaaatgccttcttataaccttcgaatgatgatgtaagttcccggaggatagattatctaactgtctgtcgtccaggtcgagtcctattgtattacataatgcgggagaacttgactaggtaaaaaaatacagttgcactcaaataaccaaagcgaatgcttagaggttgtagtgctcgttgttgctattaagcggcacaagagtgctaactcaaacgcatgctgcgtgagctttcgacttctttattttaccctttcgaatacgataacaatagtgctagcaacgctacgatcacggacgcactgagaaaaacgattactttttctcagtggcgcatcgacgccaactacgaactactaatgatcctatgtggagggaggctatcgaccgagggtccactgaggtcgaagtcctctacgatgcggtcgtgacgacaatacattttatttcacacaagctgcagtttcggctaatcattcgaaaattcatatctgttaacacacgaaataacataatgatatttctccatgcagtaacaaggcttacttcatcaagtgctgctgcggtaagtgtaagtaatctccgtttttatttatgtattcttgggcgaccgtttacgtgtttctattatcgcttttgcctcaactcgcctccttttgtagatcttataaagagcagacaacaccgtatccatactagtcgttggtgaacgaagcgcttgaatgcggtattgatgtagtatatgccatttttttcttcacacgacacaggggtcataagagctcttggaactagaatactttggttgccgcgacgttgttaaattccatttttatgtgattacggtatctgttcgtagtaatcgatttcttgctgatttgcgtgtgtgtgtgtgaagactcttcactgaaggggggcaatagatatacttactgcgctttgtgcgtgagactcgagcagattacgaacatcgtgatagtgcacatttataggaataactagggctgtgcgagggctgggatagccaacagttattaaagaggctaaaggtcgcgaacagctcataccggtaaaggtatatgaaacggcggttaccagcttcagtttttcggcttcagttaccgtcgagcgaattaacctgatttgggctgtcccagcagcacagagttactgctatcccagaatgaatactggtaagcaagaagagccggtccagagtaaattatgggccggtctactatttcatttgatatgacttaatcttttctccgacggtcttcattggttgcgactaggttttggcacaatgatttttcgcacgaagcgtgcacagtgagtggataggcataaattttacaataagtcgtcaagcacgtgatcgaaggtcgagcccaatcacacgctttcaacgtgacgcacagtaggagaatatttgcaaaaataagtctaatctcagttccaactgctacagttaaggacgacgaagctgttggtcagcggtttggcgaatctgacgaatggtttggtcctgtcgaaattgaaatccggcgggtcaaaacggcgaacctgctgaacaggctcaagagatcgtgcttaaatacgcgttctcaaaacttgctaatcgtgttgggtttctggggttgcaaccccagtgtcgtgacctaaagtgtcggatttgacctattttattggttaccgaaaacgtaaatgatctattccaaaataataactgacatggagaagttcttgtaacttaagacggagatcctccagcgaatggtgaccgagattcgaatctaccaccccaatgccggcatcagcgcagcaacgaaagcttctacaagaggagcacagccaaacggagtaattagtaagaaggcgaagcaaggctgagaaacactagcaagtactgataaaatattgtctatcatttctaaagtatctgaactcatgttgaagtctcccatgttcaaccggagtcatggaagacttggcacttcgtcacagtatagctcgtagcgccctacgaaagatctatcacttgtcatttggcgagatgcctcgcaagcgcaaaaaaaaaaaaccacagcaacaactacacagtatgtgtaccagtgcctcagtcgcaagttgaatcaagtctgtggtctggatttcctgcgcaaagagctctagcgaacgaccatcgttctccgccaggtggggctcattggatggaaggtcgggggaatgtatatcctccgcagccttgatcagggcaaaccgcttcccgaactcaacgcaatgtttttctaccgatgctgcgctgcttccctgggctcgactgagaaacgagatcggtacaagacgaaccccaaataccccgacctcaacaagactttcttaatgtactgggaacttcgacaacagcttcgagcccacgtggcaccgtcgctggggtattgcggtgccatgataaacgaaatgatcacgaaaatggcggttaatactgccaacatgttggctcgacacttccgtcggcgactgtaccaatacgttagattacggtacgcgaaagaaggaaagattcagctgagcttcaacaaaaccaagaaacttattgatagctgctatcgtgtccaagaagttcaggagtttgacacaaatggcaatttaacagctactatgaaaatgtggggtgcttgggataaatggcgaacttcagaagagcgcgagttacgtgagtggctcggtatggcgccttggcattggacaattcgtgagaatctaggttactttgtgacgaaggtgtacgacatgctttcgtggatggaggatttgtggagaaacacccaaagacaagaggggctcatctctactcgttactaccacaatcgagctctttcataccatctcacgttacactgaacgcgacgactttgtacgagctcttttgtcgcatttacgataatccggtggcgaaaaaagtcgtgaatggcgatctgggactggaatgcagaactaaggcagctcgtgctacctggacactaaatcgcgaagttattatccgctagcttttcaacgtaacggagttggagaccagaacccgcaagttcggtaaccgagacacgacggatggctatgcagcttcggtactactcgagcgcgaaatgcctaccacagaacccacagacaccaatacagctccaaggaaaaggaggaagactagcaaaaatcgattaacgaatgttgtggagaaagatgccttggattggcacgtgacaagttaccggaaggctacacaccagacattttcattgggatcgatcctgacgttagaatactggtcacggctgcgtcgactggatatcttccacagcaacggcaaggccgacagtgcaaacaccgccacagacgtcgtcgctttcgcaaaaagattcgaggaagtgcattgcgaagaaccaacacggacacggtcagcgagttatcggcgtcagcacagctgagtactatcacctggccaagctcaataagaagcgcgtatgggacctcaacttgaggaagacagaacctgcgtacgttttgatattgaaggaaatgccaagttttaaaacttctcagctgacaacattcatggatcgactccagtactttgtgaagcacgtgggctttctcgtctcgtattcgaccaaaacttcgtttcgaaagtggagattcttaaccacaagttcgaagacgcgggcgttgactgcgattaccaagcgacttgttccgatccggagtgcgcaggtctgcatcgcatttggtgattggagctgccaggacggtctctgtggaaaccctagcgctccagtacaggcactcaagaaagaactggaacagcgagcgacagtttgcccatggacgagtttcgcacctgtaagctgtgctccggctgccacaagcacctcctttcagctcggctattgacaaaggtgaaagaccgatagaccgagaagacctcgattgtcttggagacgtcttgtgcttcaagaacagtcgatgcaaggcacacttctggaatcgagacgttaatgcagcgagaaatatactagagttactcaagtgcaggctttcaggcctggggagactggcagctttcgagcggtgactgcgagaccaagatcgtgattggaaagtccatttcttagaaacatgctgcacttgaagggtgtgggctttttgtctggggacatgggggagcatccactcacacggtgtggaggcgcacaactgcttcgacacaagaatccgatacaagatagcgattacgtacaacgagttgtatgtagccagcttgtaacttaatggttaaatcatagaccccgaatgtctgcgaattcgacacacctgcactgtaatttgcaaagctgatgtaaaacagcatttaaatggcccagaggcttcctgctgtagtttatgtgcaaatacaagcacattcttcaagggccggatcatggtgatcccgtagaatccgggtagcagccaaacgtgaccctcatgttctccacaaccgatagccttgtcattacaacagtcggtcatctagataaaaacggtaaatatcagccatccctcctgtataaatggttgattgagacctctcgatatatcaagtatactcgatactaatctccctggttctcgaagatctcggaggagcttgagaacgtttggtatatcggtgaaagcatctacagaagacgacaattttgaagacagggcgtttggttcggcacagattaatgaggtacttaagacagggacaaagaatctaaagaaggtcgcggctagcgcaaggctcatgtttacaaaggcatgtgatgaagcagaggaagcttagtacttagaagtaaaattgaaaagtgaattgttttcttgttaactactctattgtagctaagcgtcacacggatgaccttgtcgtggtcgtaaacatgtacgtgaacatgtatgacctcgacaagtccgttaacgtaaaagtaaacctcgaggtcaaactaacggagtaatccgttacaggacaaccaaccggcgacagacaagctgttcacgaggtttaaagttaatacggcacaagagaatctctttgcgactaaaagagttcgggaagtggtcgaccggagtggtcaaaaacttcaaaagaacgaagaagcggcggatgttgccgtgatatcaacgctgatgagtcgtttggatgatgatgtgttgttggcaaataatctgatgctggcgaggcgaacgcaggcacggagagtattgctacgaggcttgaagaggctcagcatacgtattggttgcttcataaaaacagcgcggatgacgttatcaagctgcttaatctgaataaggaaggcgacaacgtgctctgaatctctttgtggagcattggctgcatacataaagaaggtaaatgaccagaacccagacgaagcgatattctctgtgttgaagacacactatgacagtgacgaaatactagcaaagactctcgttggggctaagatggactacagaatggttacaaccgctgcgaaattggagaacatgcaactctcgagatggcggaatgatgatagaaccacggaaactgtcttcaacctgctgcggttaaaccaggaaggaggcgggttattgataagcaggttgctagacacgtagatatcttacgcaactttgatgaaggaagacccgaaaaaatcttgctggtaaaattggcgactcgctaccaagacgagaaatcgctaacgcagatgctaacttccaacccagaaggatatcaatactcgatcaactgcctataatttattgcaagcacagatggagcagtggaaaatcagtcgcaagacagctgaggaagttgttacgctcctaaaactgactgaagatggcagcaacttcctgaacagccccgtcttgaaagcttgggtatctttggtagagaagttgaaggaggacccgtacgagttaatgttttccaagctgatgaagttttataatgctcataaactggccctacttctacgctggtcatcggtgcttgacataacgggaacaacgagtaagctcgaggagtttcaatgtaaattttggaaggaaagcggcaaaagcgctgatgatattttcgaacgtttgcggctgaatcagaaatctgacggctttttaaacaacccagtgtcgcgtatttgggagatctacgtgagaagattagatgtggaaatcaaataaagaattgttcttgaaattgaaagaaagctacagtgatgaaggactggcaaagatgctcatagctgctaagaaagattccagtacgacctacatcgctgaacgtttggaggacgtacacctccagtactttcaggaaaatggcaagacaacagaagatgttcataaattcttcgattggacgaggaaggtaaaaacgctcgtgaatccgccgtcttcagcacgtgggcatcttacgtggctaaatccagacaaggcaatgttcttgatcctacagaagaaatacggcaacaaacgtttggcggaaatggctagtcaggcagaggatggcagtactacaaacagcggagtcaggaagagatttggagaagtcaacagatgatagcggatggcgtcttcaatctcctaaagttgaaagaagaaaggaacctacttgtctctccagcttttagcacctggagctcctacgtgacaaaactgaacaactcgaaggaggaaccgaatgacttggcgattatcgtttatttggaaagaccctttggcggctttggtctggcgcggatgcttgatagatcgcagcagagccctaaccgacaagtacaagaggatgccgagaagttgcagacgctgcagctcaagcattggatgaatcatcactcggacacgattcgaatgctaaattacggcaacatgttggatgaaacggacacgaggatctctatcgtttataaaaaaatttccaggctaaaaacaagaagtagcacactcctgttacttggattctacgacgcgaagagcgtcacgatgtacagtcaggagtaagatcacgagattatgcagataccgatcaatataaaaaacgttacatgtacatgatatatttgagacctgacacaaaagctgctaagaggttccgtggcaaacaatacttacaatgtctttcaaatctcagttttgtcctttataccaaaattcactggggtactgcctaaagagaacacgagttggcagcgcattgacactacaccaactcgcattcgcggcttcatccctttctgaacgtgacattcaagtttaaacttttaaaagtaggatcgcagtgttcattgcgccattttcgtgtaatagcaacaacaactgacggttgactgacagcaagtagtatgccatcgtcctcaagcgtgacacaattggtccgttttaatattaggtcggctgactagttggtttgcaccaagttaaatatcagatcttcaccgatcaacaaagttttcacagctgtcggcgctatggcccatgcggatttgcatctttgccgagagagcagcatttttgggggaaagtgacgcttttcccgtgaacatcaatctttttatatcaaacgcaacaactagctaaatgcaaaacgactcgctatttcgagcctctccgggccgcccaatcagaactccgcgctatgctgtgtcagggcatcttcacctgcgtccgcttccccgcctagatcggatagcgtagaagccttttcttggatcggtacgtctcttgagcaagcttacgcttcttttttagcttcaagccaagctcgatcaacctttttgagctcgtctgtaccattcaccattctgcagttgtagagggcaatgcgagatatgggcgttcgtaaggcctacgcacaaagatatcgtcataaagccctcgagacaaacgatatttgtcggcgtatttcgccaaagctcattgagccgcccaaagtagttctcaacaatcacacgatcatgcgcaatccggtcattgtttgctttgtctgctcgtctcagatactttcctttttcggtatgataccgcgcaagaagggagcaatgtcttgatatcgtttgtctgctaacagaacccgttcatctggaaatgcttctagaaggggaccgtcgtctggaagactctcattgcctgcaactttctcattttgctgtgatggaatgccgtgttgctcttgaagatcgtgatgtcgtgtgttgccgcaggcacatgctcgccgcaattaattgcgaagccacgaccgatacctccacctttagcccatacagaagatgcttcccgctgcagtgctgccgcctggtcgccagctctgttgaaacgtgacatcttctgcatacatggcactcggaaaatgctcaaatgtgttacccctgttcgtgcgttgcgcattgttgcctcgtcgcaacgatcctgaacttggtcgacgtaaatcttaggagctagaattttgatgaacttcgtaactacgtccatgaaggtagtggtagtcaatcgaaagcgattggcgttggagtcccatgttctcccctctttgagcatcacgagcgtcctgaagaaggcgtcctttggcttaatttcggagtgcttgcctcgaccaacgttgtaattcattcgtacatggtcacgaacagtgagccacagggcgttgaactctcgtagcgaaaagttagtcatagcgtggatcgcgccagaaccaccaatctcacgaaacgggtccattagaggcgtgtcggtttcatcggtgtcgacttcatgcagtggtgcgttggggaaatgactgaggtcttcctctcggtcaatgcgacgttcttctagctctgaaagtatagattcaacacgatcccgggcagattggcgcgtaccgcgtggttgcgctggcattgctggcttttgactttgttttgtatgtggactcgggaaagactgagaaactcgggaaatgtgctaccttctcgccgggaatctttcgcttacgggagagactagtcaaatcaaaggtgggcttctcttccgtacaagatgaatcacaacatgattaagtagggttcccccaaacaacaaagtgcatcgccagccattgtgattaccagcgggaccacatgtgttcccgccgggttatcccagttatgccaatttttcagtcaactcgccaagtggcctattgcttctgagttatctggtggctgaagctgcgaccgacaaagcagacttcatacgtaagctttttaacagtaaaataaacaatcggatctccgagcaggaataaaggcccatggctgacgccacgcaccggaagttgtgagccgcttacactgtctttgtgttgaatggtactaggcatccaatcaatatattagtgacgactataagcctttcaatacttcaggcatccaaacaatccttgaaggttgctactgtattctcaaaagaagagagcacaagtggagcggctgagcgcaattgacagaagtgtcctgttcataatgtactactgaagctattattaataatactacgtactattgaaacaacagcaataatatacggtaatggcgcatgaatactattattcttcatctcctcaatagcagtaaattagcggttcccgttgaccagtcacttacaaacccaagatattactccctctcacccccctcccccaatcgtaaaatggaatacatttgcagtcaaatattcctattctggggttcttaactatgaaaaagtcataactgcacagtacatccgaagaaatctagcaaagacttttggtgcatgtggccttgctttcttccaagttcttcgcggagcgtgcgctgcatttctcgcaatccgctcaccgatctatccgatacgccagacgcacctccacaaactagaagcttcgcgacccacatgagatgctctttaattgcttctggctcaaggtcctcctcatttcacgtacgacgctccatatcgtcctcgtccagattttctgcgccgttctcagtgccatctacagccaattcttggtcactaactccaccgaagtcttcatgtgtgggatcttctgcagctgtgttctcgtctggcgggttcagcagctcgtccacggacattgggtccttaacgtgcagacgaggtaacatcgtcgcaagcacagcggacattgcatcgtcttcgtctggatcatcgaagacgcaattgtagtactttaaatgcccggtgtgcttccagcatcttgcgaagagggaaggtgaaaaaaaccaattgtttccactactggatgcggtgcactgttccaaaccaaatgtactcggaatgtgacggggtcacacagcaccttgcgctgaggaagtaggcttccaagagtatacaaacgctaagtgaacgaccgttcatgtgtccctggcctgaggggacgaagtactcacttaagggtacgattaagactgaatgtatttataggtaagcttagcttggtttctaatagaaactataagtcacctatagtaaagctatgtagatatgcaatgattggctcctagagcccctggtaccatgtaccaggtattacaagagtgactggtcactcttcatgtaacttgggtacactgggtacgtaccccgttacatggtgagttgggtgagctgggcttggttgtggttgtggggtcgagttatcgagtggatccatgctatggagatattatactgtgattggataaaattgaagaagtacgtgaatttgattgaatgttagatttactggtgctgtgaggggagatttgtgtagttcgtgtatgcattacggtgattcatgctgtttcgagtggttagtattgtgatttgagtgccgcaagtactgttcagacatttattttattttttgagtgcaaacaggacgtcgtcccgtgcagccgtgctacagcgcgttatgttggccactcggtaatcaactcggcatgtgacaaggcaattcgctcgtgtgctttgttcgagtcggacagatgacatgtcttgtgcactatccagacgtttttattaggatttgacgcggacttcgccacttgccagccaacgaaaggaagtttacactcgagaaccagttccaccgaggctcggtgtgatggctaatacatgtacatgtaccgtaatccgatttctacaacctatcctacaccagtcaggtgctactcctcctcgaacgatgatcatcgttcccgaggtggctactttcgtgagtcattgccttggatggagccattccacaatttgcagcgcatcaagtaacttcacagctcaacgtttctagaagcatgcaattaatccgacttatccttgcaaccatgcttgttcttctgccgagcagtatcgacatggtcaatgctgctaactgcggggccaagacgacaaccgacaatctccgtaccgtggaacccgtccaggccgtcagcttggcagaatctcccgacttcgctgctgcagaagaagagcgaggggcccaaaacgctggagctgctgcgcgtgtcgtcggaggagcctctgtcccggttaacggtcctccatcaacagtcggtgacgagatggtcactgtcacaactttcgatggcaacggcttcttccagcgcgtgggcaagtggtggagccgcgcattcggcgccgggaacgagaagtcgcgaagaattcgacagtgaaaaagcataagcccaacatatttatccgcatatagacaaccatagacctgcattcgatcaaaccgcttgcttaaaaccagtcaagaatattgtcagagaacttttcagagcgacaatattaccgagataaagaaagcaacgaggggcagaggtcgttgccaacttctcacagatttgaatggagaccattgaatgccgactcaacagacggaaggcaaagccacaacgcaatacagagttgatgggtacttgtgcagtcaagataatatgcactactagtacaattcaatcaaactacacgagcttgccaaggtgtgggatttagtctggtaaagtgtatatttttttagtagatggcctaaaactgatctgtcaatggcctaaaacgtagatacagactcggtatcttcagtttaggctatacacaaaagaaagctggctttgccagtctaacgtgtgtatgcgctcaagttttgtttcagacaacaacaggaggcttcatgcagtcggaggcaagttgtcaggacgtttgtgggcagcaaacgccacatgggcgcatggctggcaaatgaacgatcgtttttcaactggccgctgaatatcagtagtcccgtccctgcatccaacgtttggacggctttgggcttcgggagagttcatttgtctccctccatcgtcggtcatggcagccaccgccacgccgacgcacgcgcccaagtggaacgtcaagcagctccagcaaatggcagcaggcggcggcgctggcattgtggccaagacggtggtggctccattcgagcgtgtcaagatcgtgtgccagacgggcgagagcgtaggcatgttgcagaccacacgcagcatcttcgtgagcgagggcgtgtttggcttctggcgtggcaacatggcggcttgtgtgcgtgtggtgcctcataaggctgttcttttcgccttctctgacttctacaaggacgttttccggtctatggacccgtcgggacagcacaaactgccggcctgggggccgttcgtgtccgggtctttgtcgggcttcacggcgtctatcatcacgtacccgttggacctcattcgtacgcgcgtatcgggtcaaattggggcgaatctggtctacagcggcatcgcccatacgttcatgaggacattgagggaggaaggacctcgtgctcttttccgtggtatcggccccacacttttcggagcgctgccttatgaaggcatcaagtttgggagctatgacattctcacgagtcttttacccgaagatatcgaccccaaggcggattttgctggtaaaatcctgtgtggaggaggagcaggagtgctcgccacgatcttcacgtacccgaacgacacagtgaggcgacgactgcagatgcagggagcaggaggagccgccaggcagtacaagaacgcgtgggactgctacgtcaagttggcgcggaacgaaggctggacggtgtattacagagggcttacacccacactggtacgagctatgcccaatatgggcgtccagttcgcaacctacgacttcctcaaaagcttcattgattgacggaatttagaaatgcatgtttgaggtaaaatgcacgtttctaaaactttatgaggcttcactgttctcgtcgtccgctgcgatcatcgcagtagcgagctcctgttcgtcgtcggttaatacgccctttagagtggataaatccttctgaaagaccgtcttgacgactgattccagtgctgcacgacggtgtgtttctcgcttaacgtcagtactgaaccgctccatgagactcggacgcgttgctgcagctactaagagcttctccttattgcgagcgatcgcctctttaaattgttgtcgttgttctcttgctttctccttagcaacgacgtccatatcttttaaatccacaaagttcccagcgtaattatcacgtcgggcagactccgatcgcttgacttgagcacgtactcgacgagcagcttcttcacgtcgacgttctcgagcctcagcttctcgttcttcacgctgtctttccttctcttgcttggcagcttcagccatcagcttctgtacgcgcaaagtttcggatttcgtaggtttccactgactcccagcttcggttgctagtgacgcacgcgtccgtgctaacagcttctcttgagttcgtctagcgtgctgttgaatggct

SEQ ID NO: 248 - DNA, 20801 bp, unidentified
  misc_feature 1..20801: note = Fanzor polypeptide
  source 1..20801: mol_type = other DNA
attgcagtggggtacactagtgtgtaccacactagtgtaccccggtctggccgctgtgcgctaaccaatcaaatcactacaatgcgaagaaagagaagattatgttcaaatggtgtggtcttcattcgctttagatacgaattggtggaaccactgtacttcgggaagtgacttctcgaagcacccctggaacgaagaaaatccgaagccagctttggacaaaattgagagaagcacagtactgcgagaagtcacttccctcagtacagtgcttcacacttttcgacaagtcttgcggcggcgcggtcgtcggtcgcttggtcttgctgttgctgctgctgctggtgcgagcagcgtggtgtttgttgaagtgttggcttcggtgcgctcgaaggagatagtgggacgttgataaaatttcgacaatcaaaacccgcgattacaaagatcttatgttgcgcgtagccaaaagcgaagattgcgatccgatgagcaacataacttcctttttgctgaagattttgggtctaagtcgatttctttaaaatatatttccagaaatttagaccgaaggcggtatatcgatattttaacttctgttattggtacttcgttcgcagggtgtcttgaagtagtgattctccaattttcgagagaagtgaattccgtattccttcgtacaaggtgtgagtagcagtagcagtagcagtagcagtagcagtagcagtagcagtagtagtagcagtagcagtagcagtagcagtagcagtagcagtagtagtagcagtagcagtagcagtagcagtagcagtagcagtagcagtagcagtagcagtagcagtagcagtagcagtagcagtagcagtagcagtagcagtagcagtagcagtagcagtagcagtagcagtagcagtagcagtagcagtagcagtagcagtagcagtagcagtagcagtagcagtagcagtagcagtagcagtagcagtagcagtagcagtagcagtagcagtagcagtagcagtagcagtagcagtagcagtagcagtagcagtagcagtagcagtagcagtagcagtagcatttgcgattgttttgactctatcagagcaacgcatgcgcattgcacagttggaagcaacgtgcagatctcagtgtcaggcagttgctcgcagagagaatcaggcagttgtatgtgagtgagtgctagagcagaccaagtcgtaggtcgctcgctatgttgcgagggtggttttgtgccgtgcaggatttccatcctcaatcccattcttacctcgtggaactcaagtgtctgctcctcctcgctactcgagacgtttgcgagggcatctgcgacgaatcacagtgctgttttcatcgactcagttactcatggcgttcgctagacacggttgtgcacacttgctagaggcgattggcgtcgcgcgtgaacaaccaatcgaaggcgttagcgtagtcggagtacgtagtcgaccggcggatgtacgtaaggcttgcattcgcgctcgcttgctccaacgtacggtgcttgaacgcgttcacccgctgcgaaatcccttggcagcgcttccggtacatgaacgtctcggcaccacccaggtactcggtgatggcctggttcaccaccacactgcccttgctcgcgaagtgctggccgatggtcatgtggttttcgccgtacacgccgttcaggtggcgcaggatgtcgacgcgggtcctcgcaatcacgtccaagaacgggtggatgcgtcgctctgcttcgaggtcagcgatgcgacggcgagcggatgccaagtcgcgctccagctgcgatattagagcttcggtctgtgcatcgcgagtatggcgtcgaccttggtcgtttgtgctgtgatccatgcgtgcgaggatcgagctcgatcgggtggaagagcttgagctgtcgcgaggaaggtatgagagtgagtcgagttggacacatgtcagcgagtcttccagagttgccggcatgagcacgtggcaggacaagtgcgaaagcgatagagaaccgagtgacacattcagacaagtaagtagttagtggtctgatgggctgtcagagtcgtgacattgcgcgtttgatatgtgcctgcttctagtcacagttcagctcaagtgacgttgattgctcgcttgtcgagatccacttgaccgagtgcacgttccagccacagctctcgccacgcaaacgaacaccaacagcaacagcgacagcagcagcacacacacggagtgtatggagtcgtaccgagcgagaatggactggcgtcgccagtcatacagcgcccgctgagtccatacggctgcagcagcacagctagtcggtgctttgcatcgagtccgctttcgtcgccacagcgacagcgaacaccagtgtcgctgagcacgtttgcgctgcactcgacctcgacgagctcgctgcgacaacgacgcgatcgtctcaagcgacaccgacctcgagacagagttgaagcagtagatgatagcgtgagggaacggagcatatcagacgacccgacggcgtcgatctggtcagatctggtgcagatctggtgcagagtgaacttgccacagcgactgcagctgtagctacactttgtgtcctacactcgagcagcgagcttgccttgagcgcgtggtcgatcgcgagtgttcacagtcgttggtgactgtagcgccggtgtgtgcgaattgaatccatgtgctcgcgtcgagcgtgccgtcgctgtgtgcgaacgtgcgtgtcgctaatcgacgacatcgcgagcgagtgaacagttgcgttgtgaaagtgaggagaggacttggagcacatgacgcacttcaacgagtgtgcgactggctggtccagaccaccgctctcggcgctctcaagcacgcgcctgcgcgtggcagccgcgtgccttggccgaattgcacatgcgtattatgaagcagtaggagcactaggagtaggagagactcgagcgctcgacagcgagcgctcacttgaatggcactttgcatttcaccagcatcagcatagcagcactcaacagcaccagcacgggtgtcgccaaagcagagcggcggcatcattgacagacgtcacagagaattcttttgacaaaggaagcgtgccaggctttggagctgaggacgtcaagatgacggtgcctcagcccatctacgagttcgttcaagctccaaggctgaacgagtggagtcaacaagccctcgtacggttcgcgcgcaagcacacactgtacgaaccgaagatggcagagcgctgcagggcaactggcgacgcggtcagcaccgtcacctgtggtttgaagagctcgctcgagccacgcgtcttggaccatctcgcgtactacacactgcgcaaggacccagcagcagtgtcggataacgacattcgccggcttgtcgaagagaagctcgggagcgtcgtgaacaatcacgtccccgacatcgtcccgctcttcaagaaccgcttgcacatgaacatgcagcaggcggacgtcgaagcgcgtgtagcggactactacatggactttgacacgatcgtcgaagagcacgggctgaccaccatgatgggtcgagggccgacagacaccgaggcagggcgacagcgcatgaagctccggtgcaaggtcctcatgatgaacctccagccagaggttctgcgagtcgagatcgcgcgcctggccgatttgacgcatcgccacgtgcgagcggacgacatcgcgctgcacgaccttgttgttgagcgagcaacccgccagcaacaagcgcatctcatgagcggcgaggtccgtagttctgctgcaccgcgtcaagccggacagcatagcgacaagaagagtggatcagtgaacgcaaagcacggtcacgcgccgcgcgtacagcaggcgtctggtcctgcgacatcggctgccccggctgcgcctcgatttggctgctgggtgtgtaagggaagtcactggctgcgtgattgtccggtggcgactgagacccagagagcagaggcgaagcagaagatggccgaggcgagagaacgtcgggcactcaagcgcgtgaacaacgcgaaggctgacgtcacacctcgaacggccgtggtcaacggcgcgctcgaggtcccattctgtcctgacacaggcgccgacgtcaacatcgtcggctgctcgatcatcgacgagcttcgcgggcgtgcatcatcggtcgagatcgactttgtgagccccccccactacaagtacaggtggccggtggcgcgacggtgacctgccacgagaaggtgcgactggacctgcgcatcacgacggctgcagggccactacaactcgacggcattgtgttccacgtcatggacggcgaggacgagctgcttcttggacacggcacgctaagcgagatcggcattgacgtcgaccgcctcttcgaacagctcgttgagcgagggccggatgaagctgacgacatcgactccaggaacatgccgctccttgagccggcagacgacgtgcggatcgagctcgagcggatgtttaaggcagcagcggcttcaggattcgatccggcgtgcatggttcagccccgtgacgtggtgatgcgtttcgccgacgtgtggcgtacgtgtctcgggcgacgcagcagctcgcgtcgaaccgctcctcgtacagatacgtgacgacgctacaccgtaccggactgccgtgcgtcgttacgccgaggcacaacgccagttcttgcgcgagtacgtgcgcgagcttgagcaagcgggtctagtgtaccgcaacaaccacgcccgatgggcttgtgctgtgctgccagtcccgaaggccgacggcgggttccggatcacggtagactaccgtccagtcaatgcgaagacagtgcccatggctggtgcggcgccgagcctcgctgtcagcatccagtgtgttcgtggggcggcgtgtttgggcgatttgccttccacaagggcttctggtagatgcctctgcatgagcagtgccaggagctgttcagcttcctgactgaggatggtatctttactccgactcgagtaccgcagggtgcgacgaactcggcagtgcacttccagtcacagatgaccgactgccttcgcgacgtgctccatcgcgcggcactcgtctggatcgacgatgtgctgctgtacgcatgtgatgcgccgacatacatcgccaaccttgaggagttctttggcatcctccaccaacgtgggctcaagctgaacgcgaagaagtgcgagctcgtcgcgacgcagatcacgtggtgtgggaaggtcatcgatggcacgggtgttcagtacgatccaaccagactctcagctctcgcctcgatgcctttgccgccggacggcgcagcacttcagcacttcctctgtgccaccaactggctcagggacagcatcatcgactacgctcgtgtcgtcgctccgctgagcgcgatgctggaagctgtcatgagagagcgaggccgtcgcaagtcacagctacgtggtgccgcctactatggaccagcgaggaccgcgactcgttcaagcaggtgaccgcagccatcacgacgtcaagcaagctgtcgttcccggacgaccgcgcaactgtgtgcatgttcaccgatgccagccacaacggttggagcgtcgtcgtgacccaattccgcgagtggcaagaaggagagcctgtcgagcgccaacagcacgatctgctggtctgctgtggcggccagttcaagaccgcacagctgaactggtcggtcatggagaaggagggctatccgatcgtaagagcgtgcgatgacctgttgtacatgctcaagtgagaccgtggcttctcgatctactgtgaccactcgaacctgatccgcgtcttcgctccggacaaagagatcaagtcccacaccaaaggaaagctagagcgatgggctctcaagatagtcggccgtcgatacgtgatccatcacatcgactgcgagcacaacctctgggtggacatcgtgtcacgctggggccagcctgcggacccgacagtcgtacgacgcgtgacgacgagatcagcgcctgctccgccgagcgagctacgtcctctgcaggacgctgcattcgtctggccagcactggtcgacgtgaagcaggcgcagcagcgccacagcgagacagcacctcaggatgccacggagaacgacggagcaatcttcgttgaaggcaagctctggatcccgagggcggctcgtgagctggtccagcggctcatgatcgttgcgcactatggaagccaggggcaccgcggtgtcaacgtgatggtggagcatctgcggcggcattttgaactggacggagctcggcccatcgcgctgcggttcgtcaacgcatgcaagctacgcaagcatgtgaagggcggccacctgatccagcgcgactggaccgcgatgaggactgtgacgagcaacgagtgcctccacatggactacctctacctcggcgagagctacggtcccgctcgctacgtcctcgtcctgaaggacgaactgacgcactacgcagagatggttgccagcgatgcagcgtcaagctcagtggcagccgacgctgtcttggactggacgaagcggtttggcctgccgcgcacgtgggtcagcgatcaaggatcgcatttcaagagcacactgatgaccgagttagcgcagcgcctcagagtggagcaagtgttcgtgccggtttacacgccgtggctgaacgggacggtcgaacgcctcaaccgcgacgttctccaagtgctgcgcgtcatgctactggagtttcagctagacacacgcaactggccgcacctcctgccagtcgtccagtcaagtgtgaaccatagtccggtgccgtttctcggcggctgcgcgccgatcgagctgttcacgggcctgccagcgcagtcgagcctcgacacggtggtcgtccctgaagagcgcgtgcccctcacgctgcacatggactcagcaagctaccacgagcgcctcacagcaatgcggcggagcattgaagcgctccgtcaaccagtcgtcgacatccgcgaacagcatcgcctgctcgagatggcctgggggaagggcacgacatgcaacttctcggtcggagactttgtactatggtcgagagtcgacaagcgcctgcgcagctcctcgctcgctgggttggcccctttcgcgtcgaagcaggccacgcgcactcgttctcgatcaagcacctgcgcacaggcgacgtctacgacgtccacggttcgcgcctcaagttctacaacgatccagacctcaacgtcgacgccgagctgcgacagcacctcgcgctgcaaggcatggtgctcgaggtctgggccatcagcgaccatcgcctcaaccgctgaactggcgagtggcagctccttgtggcctggcgcgaacctcaggacgtcgagagctcttgggagccgtttgcaacgatcagcaccgacgttccggggctcgtggcacgctacattgaagacaacaacgcgacagacctggcgcaattttttgccgagtcgtagaacccaagagatcgcaacaagcccaaaatgggtacaactggtattaccagttgctgtgcaactcagaagacatgggctcacagaccatcactcacgcggtacaagggaagtacagcgcgcttgtggtcttgggggcagtgtagtgtagcgactggctggtccagaccaccgctctcagcgctctcaagcacacgcctgcgcgtggcagccgcgtgcctggccggcgcgtgcctgacgcacgtcggacgcgtgccttggccgaattgcacatgcgtattatgaagcagtaggagcactaggagtaggagagactcgagcgctcgacagcgagcgctcacttgaatggcactttgcatttcaccagcatcagcatagcagcactcaacagcaccagcacgggtgtcgccaaagcagagcggcggcatcattgacagacgtcacaacgagacacaatggggtagagtagctgtagtgcgctcgtaggtgcggccatgatgtatgactgctgctgtggtgttgaagtccgagtctgcggcacggcctactgatggacagagttgcgtgcgtgtgtgtgcgtgcgtgagcaccaagaggccaaggaatcacgcgaccgatgccagaagcacagacgtcgatacatagtatatggtgttctccatcagacgacaatgaacgattgaccctgttgtttgctgctagagacttgctgtcgtgtcaatcgtctctgtcttgcacacgcacgcatcgctcaaccgctcgactgatcactcacgcactcgaacctcctctcgcgcgctgacaaggaaggaggctctcgctcactgctcactgcgcaagtatagtgttgaaccttcactcgctcactcactcgcgagtcaatatgcgtcccgacaccgccaagtctcgcggatctgctttctctctctctctctcgctctttcgctctcgtctgatggttcggactacgcactcttgcgtgcgttcctagcgcctagtatcgggtcgcagtgccgcttgccttcttgctcgctcgtctcctcgtctcctcgcttgtgtctcgagctcattcccactcttgctcacgttcgcacaagctcttcccgactgagcgcacacaccgccacgaacacgcacgcacgcacatacgcacatacgcacatacgcacatacgcacatacgcacatacctgtacgctcgcaactgccatggtacagcacacgaaccaccgagaccagcgctcctcttcccacgctcccactcgcaacgccggcacgcacactgagtcgcaccttgtcgtcgcgagtgccgtagtctcgtcgacccagccaaaatgtaccgcaacacactcacggcgagcgctcgtgatgcgactggcgcggccacaagcgccgccatcaccgacatcggctactggcgtcgagtcgactgctgtgccgcatcgcccggcgactgtcgactggcgcgtgggactcttgaagcacctcgctcgtttcgaagctgatctcgacgagcttaacacggcgctcgagcgcattgtcgacaagctcgccgacaacgaagcaaagctccatgtacacatgcgcgcgcttgatgaactctggcgcggagtgatcgagcacacagcaccgagcaccgcacaaacatctgcgctcgtcagcgctgcagtactcgctcaagaaggcgtcgtgcacaccaagcaagctgctgcgatggtccgtcgcgcgcgatccgtccacgaacagacattactgatcgtcgaccgagcgcatcggctcgacggcgaggcaagcgcgctcagcgtgcaagcggaagctatcaatgaccaagtgcgcgaacaagctctatgcgaacatcgacaagtgcatcgtcggagcaacggagatcccgtttctcggatgctttgtcggtcgggaaggcgtacgcgccgacccaagcaaggtgaaggcaatcgtggattggccaactatcgcttcctcgacagccgctggtggatggtccatgggtcgaagtaatcgtcgtcgccgcagagcgagcgagcaagcagtcgaagaggtgcttgtcaatgtggttgtgcgcgacgtgcgattgagcgttcttgttgtaatgagcctttgaaaagttggcggaagcgcgatcttttcgaccaatggtcgcactcaaaagcgaagatcttgtgttgcaggaatggcgtcctgctaaaagtgaagatcgcgcaacgtaagcttcaccatttcgagaaatccaaagtgaagtcagtatatcgattttagctattcagtaccggtttcgtcatccaagacgtggtcgacgaactcggagtcgattcgagagacgcgagacggatcctccgagcaagtcaagacgacacgacgaccgacacacgagctctcgcagtgcggtagtggcttggcatcccgtgcacaagcgcgaacatcactgcaaacaccacgcacttcagatggaagctgatgcagatgtgctcggaagcagtgagtcaaggcgacccagcgttcaaagtgctacctgttcctgcactcactcctcggtttgtcacgatcacgacgacgaccctcttcgcgacctgcaggcgcattgagcgcgactccggcttctggctactcggtgacgctgtgccgcgggacccaccaagcatcgcgccgtatcgagacgctgcttggcgtgaggtgctcaagttcaagaaggtcaagaatgtgatgaagatcgagaaggttgagacgacgcgacgcacgtttgcacactgtctgcgcacggatggcgtctcggcgcatgttctacttcagcgaccgcggaaccatctcgatcagaagctcggttacgagctcgaccggcagaccgacacgagcaagttggttgcgatcgaccccggcgtgcgcgtactagcaacagcagtgacgtactcgcagcagcagcagccgcgagcacgtcgcagccagatcgagacgcactcgaaagcatacaagcaacaaagaagtcgtgagcggcgccagcgcaagaaggcgaaagcacgtgtacaacggaccatgctacagcaagcgagacgaccacgcgagcgccgccaacgcaagacaaacgtcgcgagcgtcgcagcacaagaaacaacacgcgagacgtgcagcagcaacaacagaaccctcgcccgtggcggtctcgaggcaaaggtcgtcgcttgcgtcgtcgctgcttgaatcgccatcgagcacagcacacagcagcaccatgcgaccagaggactcagcctgaaggtcatcaccggcgccgcttgcagcaccgcatcgagcgccagcaaccacaaccgcttcccgagtaccgagtacagcgcatcactgcgcgacgcattcggcacgaagcgcgacagcacgagcaccacgactggctcgtgcgtcaagccaaacgcgaaccagagatcgctgcgatgcgaagcaacttcccgtcgttcaagacggtcgatgtgcacgtgctgcgctacttgtcatgttcgcgagcctgccagtactgttggagttcgatcgcgagcaagcgcatcgttcgcggcgcttcaaacgcggtcgtttccagatgaaagcgatcgacgcagctgcagcacaactgactcaagaaccagggacgacgatcgctttgggtcactggcgcgcgcagcagattgtccgtggacacagatcgccgctttcccagttcacccacgctctacgacaacgagcaacagtggtgctcgtcgacgagttctgcacgagcaagacgtgctcgtcgtgcttctgcgcgctcgtcgacagtaagtatgtgaaggtgcgcagcgacagcagcgcgacgacatccacgacatccaacgttttggagtgcacagcgtgcaacctgagcgctctcggtccgtcggctcacaccggcatgaaggtgcgctggcaccgcgacgacaacgccgcacgaaacatccacacgatcgcactcgccaacatacgtggccaagaacgtccagagccattccagcgaggtcaagcacaggcacgagtagcagcacaagcaacagcacaagcagcagcacaagccgaagaagaagggctgacgcttctccaacgcgtgctcaagagcgcactccaaaaggcgcaactcaaggcgagacgtgcactcacagtggttcgtcacacgcgcgcgaaagaacgacgaggtcgacaacaccaagcagcagaagcaacaacaacagcaacttgactgtgccttgtgtgcagtcagtgggtagcggcagatgagagtcaccgagtggttctaaccatggcgtgacacagtgactctgacacgcatccacgccgagcggtgcgaggactagaaagaccgaccgaccgcaaggtttgtgatcgtgactagaacgcacttgtaggtacattagcaataatggcgagggtgctatcgacgagctcgagcaccccgagcgagtatggcagtccatcgacgagcggagcgctgcggtactcaccgacgccacttggctgcgcggatcaacgaacagcatcagctactgcgactgcgcgatatgtacagctatcacaacgatcgtcttgcgcgatcgccagctcgccgagtcctgcgcagagcctgacgaccgcggatgtctcgactcgagagcgcagagtgagtgagtgagagagagagagaggacttgcactagtggcgatgcttgatcatagctttcaatacatacacaacatgcgctttgctatctccgactcgagtcagaaccgcaagacgagatcgctcgctcgagcttcgtgcttgacctcgatgacgctgcttacggtcgcacgcacgcactcgcttcgtgcaacactcactacattgtggctctcgacccagctcactcctctcgtattgaatgcgcaacagcgctcgttgcagctacgtcgtcactcgactcgcgcgttgaggcagcgattctccgaagaggtacgtcttgcgtcgagcatatgtgtatgcgtctgtcgtgtgactgcaatgtgggcaatggatgagagagcgcgcgagggtcgctcatgcttgaatcaagcgtgcactggcacgacaacgacgcattgacgtcctagcaactcttgttcatacgatgcagcagcagacgactgcttctcgccgaacgcgccgaaccagggatccatgtcgtactcgtcgacaacgatgggtgcgactgcaaagttcacgaggatgcgcggcacggcgatgcagggctcgtcgaccacgagctgcaccaagtttggcacgtggtcgcaagtcacgccagtgtacagcatcgtgtaccagaagaagaacgacggcacgtacaagaacaacgactcgggctacaagctctacttggcgtagcaagaccgccgttcattcattcgtaggacacagtcgccgctcgctctcttgttatcagcatgagcagctacactatcgatcgacacacgtgctcgtgctcgtgcgtggaggctctctctcatacacttggatgtcgtacgacgccacggtcgctggtcgacctcgtgcctgtcactcttgtgctccttcacaaccgctttggtgcgcgatcgatcgcgggtgtttcgcgcttaccgccactcaacatcgacgctaggcgattcatcaacaccttcagtcttagccacgccagcgtcagacccgctgcgttcgaggactggttcgcatccgtgtgcgtcgtgtccgtctatgacgtgaccactcttcattcaagtcgatgagagcgagcacaagttcatcctcgagttggagcaagtacatatggcggtctatcgacgctccatcgacgcctggggcgctgcagtctgcggcgctagacagcgcgccacatcaagtaacagcagcaacaagagatcttttcgtatgtgtgtacgccacgtcgagctcttgaacgcagttccagatccagacgccactgacgagccggtgcgagaggtctgacgcacgtcgtacgctgcgcaccgagttcagtgcactcggagcgcaccagcgctgtcaaacgctagcgcttggtcactgcagtgacgaaggagaccgcgaccgggtttttgtctgctccgctgctctgactcgctcgctgactcctcgccattcatcgttgatcggacggtgcaaaatggtgatcgtcaagcgactggcgaccaacgaggatgcgcgggacgacgactgcacgaccgagtgcctcctcgacggacacggacactgtgagttacgctcagctcgagcacctcgagcaccagcggctctttgatcgtgtgtgtgtgtgtcggactagcactgctgctgtttgtgtgcatctgcagcagtcgcaacagcgacgccacgacgacgacgcgcatcgtcggacgcaactggcagtaacaaccggccatgtcgctgcgcgcgccggctttgactggcgtcgcgatgtggcactcgatgactgacggactggctgcgcgagcgaacgaaagtgcgtgtgtgtgcgcgcgctttcactgcgcgcgctcacttgccatgatgcaagcgcctacacctgcgtccacgccgcgcactgcgctcgcgccacagccgcagcagcggccccaccagcttcactatcatcaccaacatcacaatcgcgcctatcatcagcaacagcagcagcaaggcgtgcggctctacgatgccccgccgccaccacgaccgcgcacggcgactgctgggagtgcatcgagccaccgcagcggcgcgccactgccgtacgcaccgactgcagccgccgcggcagcgctgacgccgacacagatgacgtctactttacgcacacgcaggtcgtcgacagccgcatcagctacactgaggacaaccggcgctttgtcgagtacaagctcgagatcgagacgacgtcgcgcgggacgctgtacgcgtggcaccgctacagcgtgtttctccagctcgcggcgacgctgcagctgcgcgagagcagcggacacggctatcgccacgagatcccgcggctcccgagcaagaagatctttggcaacttctcggacgcgacgatcagcgcgcgcgtcgagaagctcaactggttcctcgccgcggcgacgggcgccgagttcctcgactggggcatccgcgtcgacgacggcatgtgcgtgtacaagcgcagcacggcgcggtggaacagcagcgacagcagcggcgacctgcgcgacagcatgacgtcgaacgcgtcgactgcgactgcagggtcgctcgcatcgccgcggcgacggctctcgcggcgcttgttgctcaagtcgcagctctgacgagcgaaaagcgcaccattatcttttggctggtcgtatacttcgtgcgctgttgtgactaagagattgtatcgcttttgctattcgcactgcattcccacgttgatctataattttgtatttctgaaaaggaattctactgtttgagcttctcgaaacgcccccccttttgtttggctcgcggggctcgcgcacacttgcgaactcgccgcttcccgctcacattcgcgccgaagcgacgacgtgctgtgcgtgtgtgcgtacgtacgtgcgtgcgcccgagcgagagtgagtgagtgagcaccgagcgtctgcgagcgctctcgacacttcgttgcttcgtgcacgagcgttgtgcgactctcacaagcaaacgaacaaacaaacgaacgaactgaacgaacggcgtgagcgagcgctcgatcatccgacagcagcacgatgtcgtcgacgcagttctcgtactcgagcgcgcggctgcggcgcgtcaagtacctccagttcggcgtgttcagtcccgaagagatccgcgcgatgtctgtgacgaagcagatgaaagtgaacgaccgactcattcccgacggcatctcgcgtcccgagacgtacttgaacggccacccggtgatcggcggcattggcgacccgcgcatgggcacgtgcgactttcgcgcgcgctgcaagacgtgcgactgcacgtacagcggcagcggcgggaaagtgaatgactgcccagggcactttggccacattgagctcgcgcgaccgatgttccacctcgggttcatcaaagaagtgctcaagatcctccggtccgtgtgcttccactgctccaaggtcctgagcgacgagcgcgaccaccgcttccggtctgcgatgcgcatcaagaacggcaagcgccggctcaaggccgtgtacgagatctgctcgaacaagtcgatgtgcgagtacggcgaagaggccgacatggagaagatgcgcgaggacctgaacattggtctccaaggcggcttggacgacaagtcgaagccgaaagaaggcggccacggcggctgcggtggcttgcagcccaagtaccgcaagcaaggcatcaagctcatggtcgagttccccgagcagatggaggacgtccctggctcgggcgaccgcaaacagaacttgccagccgccaaggtcctgtcgatcttcaagaacatctcggacgaaggctgctacgcgctcggactggacccgcgctgggcgcgtccagactggctcatcatgacgctcatgcccgtgccgccgccgcacgtgcgtccgtcggttgcgatcgacggcatggcgcgcggtgaagacgacctcacgcacaacttggcgtcgatcgtgaaagcgaacttggcgctgctcaactgcgtgcgcaagggcgagccgtcgcacatcattgagcagtttgagcagctcttgcagttccacctcgcgacgttcttgaacaacgagcagccgggcttgccgcaagcgcagcagcgctcgggcaagccgctcaagacgctgcggcagcgcttgcgcggcaaagaaggtcgcattcgcggcaacttgatgggcaagcgcgtcgacttctcggcgcgtacagtcatcaccgcagatccgaacctcgagattgaccaagtcggcgtgccgcggtcgatcgcgatgaacttgaccgtccccgagcgcgtgacaccgttcaacatggcgtacatgcaccagctcatctcgaacggaccgctcgagcacccgggcgccaagtacatcatccgcgaagacggcaatcgcatcgacttgcggtacatcaagaacaagtcggacctcgcgctcaagtgcggctggatcgtcgagcgccacttgcgcgacgacgacctcgtgctcttcaatcggcagccgtcgctccacaagatgtcgatcatggcgcatcgcgtcaaagtgtttgactggtcgacgttccggctcaacttgtccgtcacggcgccgtacaacgccgactttgacggcgacgagatgaacttgcacgtgccgcagtcgatgacggcgcgcgccgaggcgcaggagctcatgatggtgcacaaagtgatcatcacgccgcagagcaaccgaccggtcatgggtattgtccaagactcgctcttgggcgtccagaagttcacaaagcgcgacgtgtttgtcgagaaggacgtcgccatggggctcctcatgtgggtcctgaactgggacggcaaggtcccgacgccagcgatcctcgtgccgaagaaaggcgagctcggcaagtacaagccgatctggactggcaagcagctcttctcaaagatcatcccagcgatcaacttcacgggctttgcgtcgatccacaacagcaacgagaagttcacagagctgtcgccgttcgactcgcgcgtgattgtccagcgcggcgagctcctcgctggcatcattgacaagaaggtcattggttcgtccgctggtgggctcatccacatcacgatgctcgagaaaggtccagaagaggccaagtacttcctcggcgccgtccagaagctcgtgaacaactggctcgtcggccggagcttcaccgtcggcgtgagcgacacgatcgctgacgtgagcacgctcaagacgatcgtcgacatcatcacacaggccaaggtccaagtgcacgacctcgtgcagcgcggccagaagggcgagctcgagacgcaaccagggcgtacgatggtccagtcgtttgagcagctcgtgaacaaggtcttgaacactgcgcgtgaccaagccggtcgcgaagcgcaaggcagtttggacgagacgaacaacatcaaagcgactgtgacgtccggctcgaaaggctcgttcatcaacatctcgcagatcattgcgtgcgtcgggcagcagaacgtcgaaggcaagcgcattccgtacggctttaaccaccgcacgctgccgcactacggcaaggacgacctcggtccagagagccgtgggtttgtcgagaactcgtacttgaaaggcttgacgccgcaagagttcttcttccacgccatgggcggacgcgaagggctcattgatacggccgtgaagaccgcagagactgggtacatccagcgccgactcgtgaaagcgatggagtcggtcatgtcgcggtacgacggcacggtccggaacgcgcagggcgagatcatccagttcctgtacggcgaagacggcatggacgcggtgtgggtcgagaagcagcgctttgagtcgcaccgactgaacaagcgcgagtttgacgccaagtacgtctttgacatcacgagcgagtcgcttgggtgcgtgcccaagtgccccgaccagctctacctcgagcccgacatcatcaaagacatccggacggaccagcacacgcagcagatgctccgcgaagagatcgcgcagctccagaaggaccgcgtgaacttgcgcgtgatccttgcgagtcgtggccaagggcaagagtcggacaacgctgcgcaagtgccagtgaacatccgtcggctcgtcgagaacgcgcagcagctctttagcattgacatgcagaagccgtcgagtctccacccgacgcggatcatcgaaggcgtgaaagagctctgcaagaagatcattgtcgtccaaggcgaagacccgctgagtgtcgaagcgcaggacaacgcgacgctgttcttccagatcctccttcgctcgacgctcgcatccaagtgcgtgacgctcgagcaccgcttgaccgagaccgcgttcgagtggctcatgggcgagatcgagtccaagtttacgagcgcgctcgttgcagccggtgagatggccggtgtcgtcgcggcgcagtcgatcggtgagcccgcgacgcagatgacgctcaacacgttccactacgccggtgtgtctgcaaagaacgtcacgctcggtgtcccgcgcttgaaggagatcatgaacattgccaaggacgtgcgcacgccgtcgctccagatctacttgactgccgactcggcgcacgacgctgacaaggccaagttcatccagtcgcagctcgagtacacgacgctcgcagacgtgacagcaaacacggcgatctactacgacccggacccgatgaacacgatcattgaagaggaccaagagtttgtcgcgacgtactacgagatgccagatgaagacacgccgatggcgcgctcgccgtggctcctccgcattgagctcaaccgcgagatgatggccgacaagaagctctcgatgagcgagatcgccgcgcagatcgagtccgagtacggtcaggacctgtcgtgcatcttcacggacgacaacgccgacaagctcgtcttgcgcattcggatcatgagcgacgaagaggagaagctccagcgctcgggcgagactgctgtcgggcaagaagacgacacgttcctcaagcgcgttgagcacaacatgctcacgcagatgaagctccgcggcattcaaggcgtgaagaaggtgtacatccgcgaagggcggcagacgcactggtttgacgacgtcgggttcaagatgatgaccgagtgggtgctcgataccgacggcacgaacttgctcgacgtgctctgctacccgcaagtcgacgcgacgcgcacgatctcgaacgacattgtcgagatcatccaagtcctcggcattgaagccgtgcgccgcgcgctgctgaacgagatccgccaagtcatttcgtttgatggcgcgtacgtgaactaccgccacttggcgtgtcttgcggacgtcatgacgttccgcggtcacttgatggcgatcacgcgccacggcatcaaccgcgacgactcgggcccgctcgtgcggtgctcgtttgaagagacggtcgagatcctcatggacgcagcgatgttctcggaaggcgacccgctcaccggcgtgtcggagaacgtcatgctcggccagctcgcgccgctcggtacggggctcatggacttggtcctcgatgcaaagaagctcgcgaacgcgatcgagtacgaagcatcggagatccagcaagtgatgcgcggcttggacaacgagtggcgatcgccagaccacggaccaggcacgccaatctcgacgccgtttgtgtcgacgcctggcttcacagcgtcgtcgccgttcagtccaggcggcggtgcgttctcgccagctgctggtgcgttctcgccgatggcgagtccagcgtcgccgggcttcatggtagcatcgccgggtttcatggcggcgtcgccagcgcacagcccagcgtcgccgctgagcccaacgtcgccagcgtactcaccgatgtcgccggcgtactcgccaacgagcccagcatacagtccgacaagcccagcgtactcgccaacgtcgccagcatacagcccgacgtcaccggcgtacagtccaacgagtcctgcgtactcgccgacgagtcctgcatactcgccaacgtcgccggcgtactctccgacttcgccagcgtacagcccgacatcgccggcatacagccccacgtcgccggcatacagtccgacgtcgcctgcatacagccccacgagtccagcgtactcgccgacatcccctgcctacagtccgacatcgccggcgtactcgccgacgtcccctgcgtactctccgacttcaccagcgtactcgccaacgtctccggcgtactcgccgacgtcgcctgcctacagtccgacgtctcctgcgtactcgccaacgagtccggcgtacagtccgacttcgccagcgtacagtccaacgtcgccggcatacagcccaacgtcgccagcgtacagcccgacatcgcctgcgtactcgcctacttcgccagcgtacagcccgacatcgccagcatactcgccgacgtcgcctgcgtacagcccgacaagtccggcgtactcacccactt

SEQ ID NO: 249 - DNA, 8613 bp, unidentified
  misc_feature 1..8613: note = Fanzor polypeptide
  source 1..8613: mol_type = other DNA
gatggccatcgcctcgaaccgcaccacgtgccaggtctcgattcggttcaaccctccaagaaaggaacccctgagaactgcttacaaactcatctaaagcatgtggcagcccccacgcgttcgtgcgtcccagggggggggggcgtactttcggcgcgctggccaactcttggtggccgcgcaagtaagccgcctcgcgccagggaagaacggacacggcccggagctttccaaacaagttgcacagctgtggctggtgtgcacgggtgctcgtcgtccggggtgtgttatttgggagtgcgctcgtccgttgattcaatttgataatgcgaccaaagcgcccgtgtcaggggttgtatgtcaaagtacggcgatttggctgtgcggtccagagacgcgagcagcacgatgcagaaagcgacaacggtgatcaccgttgataccgcatgggcatattgcgccacctcttgtcgaaaacacaacatcgccaaaagtccaagacagcaagcccatgttgcgcataccaccaggtgaacgtacgtttcgcatggcgggtttgcctccatcaacgaaacaacccaactcggaaggtaccaagccaccatgcacagcgacatcgctaaaagggctagaaggccaaagctaacgcacaagaagactatatctccgggccatgcatggcgaagcttttctcgtgcccaagtacagcacttttcccacatactgatgcagcggatttaacgcccggcacggcaggcgcgcgaggtgcattgtgtttgatgttgccagcaacgcaagccgtccgcatcagggtgcactcgctgccataccctccaccattccatgcagccgcacaatgtcgatgggtggcagttgcggcagaacctcccacgccacatgcttgagccatgtgtgcacacggaatccatctgggaagagatgccggtgctcaggcacctgcatgagcttttgcagcggcttgggcaagatgtgcgcactggcagggggaatgaccgccaggagctggatggacggcgtgatggtgaagggcagcacgtacttggcaccccagctctccggcacactggcgcgcatcaaataggcgtgcagcgactgtatcgtaggcgaataacagaagttgtagcaccactcggctgcaggggccgcgttgctggtgtagtatgtcatggcccactgcaggccctctgcgtactggcacagcacatcatcctgctccgtgcccaccgggaagagccgctcgttgtacgccatccgccacccgggcttgtttgggtccacaacctgtgcctcgctgaacctggcatccagggcagcaaagtatttccatgcgtgctctgcatccgtgtcgcgcgggtgtcgccgcggcacctgctggaccgcatggtgcactgccttgagcttggactcctccgtcccgaccagcagctgcaggagctggcgcaaggcatcgtactcgacgctgccattggcgtgcacaaatgtatgcacagccttcgactcgagcaggccccgtgcagtctggagcagggcgtccaggccggatggttcaggctcctgcgccttgatcttgatgtacgacagtgggggcaagaagtcgttgcccgccagcatgctgaggaagacgtagttcagcagcgccctgtttgggtcagccttgatcccaaccttcgcctgcgccaggctgctgatcttggagatgctgaccaggtcaaagtcgcgcagggatacctggggccccggcaaagtgtctgcacgctcgcgcatgagcgtgatgctcacctccgggtgcagcatgctcaacaggatcatgtcagcatccaggccgtagatcaccacgtttctgcagtcagggccctgctgcttgacccactggaagattttgtgctccccttcccctggctcgtcccaggagctgatgtccgccaagccagacagctcacggaccaggtaagcatgcagcttctccatgaaggcggtccccggtgtcacggcacttgagttccacaggctctgcgacggggttacccctttgtacgccttctcaaagatgctcatgtagcggcgcttgcgctgctgcacgagtttggccagcggcggaacgccgtccactgcgatgtaggccttgcatggccccaccagacgcacaatgttctgggtgtacaccttgatggcccggaacacctgtgcgtgcagctgcgcctcctttgcaaacgtgcccttgcgctgcaccgcttgcgcaaccgtgtgaattaagcaattgaaatcaaaacacagggcgtccacacggggcggcagggccttggtggtgacgttgtggcttttgaccaggctggcaaagtagaacgggatgcccatgttctcagggttgcacgcacaccgttgcccttactcctgttgtttgctcctgtccttaagacgttttacgtctccccacagccaccgcaaaatgcagatgaacccaacgagcagtgctctgtctgcgaggtgcaggggggtgtgcaccccagccatgccagccacggtgttcagcaagcccacaacgtcccacgcacccggggcttcggttgtggccttgtcttggaggcacttcaagtcgacaagcagtgcccccaggttgtgcagttcggccagccttgcactaagcctagacctggcggtcttgcaatacagcctctgcgcgtcgcacacgacgcctttcaccctctgctgcgggcacgcgttgctgtctcgctgggtgtcttgctggacgcaccttgcgtgcgtgcatttggacggtgcagatgccagcttcatccctgcacttaagcacaggaggagcggccttatgccgttgtttgtgcagaacatgcagcgtgcacttcgttgcttgcgtcagcacttgcgactataataaaggcggacaggtgaaggagggatgaataatttgatcgtgtctgagtatgctgcacttgctggctctgagccatccgctgagttcatccagctgtgggcctcaccactcattctgaagcagaaaaacgtggtggatcttcgcagggagctgcttatgcttccccacgttcacgagcgggtgaccaagctggccgccaagaggttcattgcgctcactgataagacgccgcctgaggactttattaaaggcacactggcgtcgctggtggagtcggggttcagcaacgacaggatggacacgctgatccgcaacacgagggattaccgtgaaaagtacgcagcgattgtgtcggagatgtggcaagttgtgaaggaggagatgcccacggaggaggtggtggacaagttcacctttcggttcattgacgacggcaagtacagcgttgagcagctcaagtcagatatcctcaccagcaagagctgcggcacctctgctgtggcaaaaattatctcagcactgaaggccatcgaccagcagccggctgctcacgcgccagatgcctgcatccagagccaggaggcccagacgacactggacttcatcgccgcttacgaaaagcagttcaaccgccccatgactgcacgggagctcttgcggctcctgcccaaagttcccagcatcagcgatgttgctgccttcgtgtggaaggagcgtgatacgctcgagcgtgtgtatggccgtgtgcgtgatgcgtacgccggttacctcgaccaggagcacgacgtgtacgccttcgtcagggagcacttgcaggcactggatgcaaacacggacgaatacgtggcagacctcgtacgcctgtttttgaaggacgagaagtatgtgagcctcatgaaagcgtgtgttgagggcctgtaccgtgaccgctaccgtgtcggcattgaagcgcccaacctggataagatcttgctcaatcttgtcaaccgctcagtcatgctcacagacaccgaaaccatcctgcagattatggactcctacgtgctacagatggaggacttccttcgcagtgttgcagacgtgtaccagggacacttggagcgcacgctggagggcgaggaggagacagagtacaagaaccgcttccgcaacggagatgtggacatacagaagatcattgacgaagtgcggtcgtccttcgagtatattgacgtggtgaagtcgctggtggcaaccctgtgcaagagcgctggcgtgcctgtgacacccgcaaaagtttgcaagctggtgcagactgccctgtctggtgcggactcgcgctttcccgacaactcattacttgggctccagcatggcgtggcacagctgatcaccgagggagctgtctgatgtcacgacacatacaaccgagcacgggcgccaatcagttcagccagttgttacagaaagtcacttcaggccgctccgggccgtcctgtcaggccgacacaactgttgttcaaagatgcaagccattgttgctgccatgcatgcgctttctcacgtcccagcaatccgacttcacacatccacgtcgctctcctcctccaccgcgtccaccgcctcaaccgcctccaccacctccactgctgcctctgctgccacctctgcggcagtggcggcaatgctgcggggctcacctccgtccagctgaatgcccttgaacaccttgccaaagaacgacttctccgagtagccgtcgcgcttggtgcccttgcggaacgagtcgtgcagtgtgatgcggatggtgtggtacttcttgggcagcatcttggtgcccgcagccgtcttcagcgtcatcttgtaagtggccttgtggttgggaatggatggcccgttgatgacaatgccccgcttcaactcatccagcccgtcgctcgccagcttctcgttgaacagctccgcgctggtgtcgaagtacaccgtaaagaacttgcgcacgtcctctgtgcccagctcaatgccctcatccttcaggttctgtgtcagccgcttcaggaagtcggatccattgatggtagactggcggttcttgggcttgctggtcttgctggtcttgctggtcttgctggttgccccaccttgctcgttcagggtgtccgatgcggaggcgtccgactgggtgccctcggacacggaagctgacaccacgccagccttggtgcctgactcgaccacggcggccacggcgtccgcgggggcgggggtggcatccacaggcgccgctgcggcggcggccatgtccagcacctcctcctccaacacgttcttgttcttgcttgccgcggccttgttggcagcagcggtcgaggccttggagccagcagcagacttggtgcggggggccatgtctcttgtagtacttatccttgcttggacaggaggcgttaagtcctttttaggggtaggagatcgggtttgagtgccaaagggcttgctgtgtgctgtgcttcaggttggggacggggtgggggagctgtggtgtgcttgcttttcaggctgggggcccagtccttatgtatgattttgctcgttggtcagggacaccacgtcatcaacgagcatcttcacctcacctcctccaatggcatgtacgtgcatgccatgcttttcacgacggtgctcatccgcaccgtgcgcaccaggcagcaaggaaaacagcatacagtaggtctcactgagaatgggacagcgtgggggttcaggcctacggaactattgtgtaaggtcgtttcatgattgacaccgagactcgttacagagctgttgtcgactacaaatacttcacaccaagtctgcgcagagtggcagccaagtaccatgtatccaaatccagtgtgtcacggtgggcacgcattgcaggcgtggtaaagcgaaaggtcaggcaagggaagcgaagcgtattacagcctttgcaggacgccatttcgcttgctttggcgcagaaccccttcctgaccacatctgagttgaccagcaaggtttacgaaatagccggcgtccctgtttctcgtgcaaccaccgcaagagcccgtgcacggtgtggattccggtacaaagtggcatacaggacagtcgcccaccagcacgacaatggcaaagtcaaggccttctgtgagcggtacctggcctccagacagctcgtttgtattgacgaaacatacttccgtgttggtgcgtgcaggcgtcgaggttacagccaagtaggcacacggctgaatgtggcagcctccaagaaagtacgatgttccaagttcaccctgatcatggcagtctcacagcacggtgttgtccttgcaaagcttctggaccacaactgcagaaagcaagatttcgtgcaattcatcctcgacctgccgtgcagcaggggtgacctggtcatggacaacgtggccttccaccactccaaggaggtgcaggttgctatggaacagaaggggtttgcaccactgttcattcctccgtacgcaccggcaacaaacgccatcgagagtgtttttcacgccatcaaatccaattaccttggagcctgcaccaaagtgctcatggaaacgggggtggagcacatgacgccagtccattacgttgaggaaatgcacaggtccattgcttttggtgagacattgcaactcgatgcttacttcagggaagccagacggttcatacaagcaacacttacgggtattgccacgaacccgttgttcagcttcaatgggtacagcagtaaatagacttaaggagtgtccgggtggatggaataatgacagacaattaccgcagtcccatgacaccaattgccccaccatggccgcccagccagtacaaggattgctggctgactgcaagtactgaaacagaggtctgactggtacccaaatagacttaagggacggaccatacatgtacagtatgggttcggcggctacaacatgatggcaagtgtctcctgctaaccatgccccgaatcaaagggtcttcagggcctgaatgctgcacacgggcgaccaaccaagcagtgttccaggacgacaccaatatatcattggagttcaacaacaaggcatccgcacaacaggatgatagcggtcagcgggcagtctccgtcaagctcaacacagtgctcaggccatacccagatgcatcggcccaagccacacaaatggagagcttcaagcagctgctgcaaacaaccgtgatggtgggcaaccggctggaggctgaggcacacgccttcgcaaacttccatgtgctgagactgcttgatgcacagcaggagctgcccaagatcgacgacgagttctactaccggtgcctgcgctgctgctcggagccggtcacagctgtcgcccaggacggccaatggaacaccagtcgcctcctcttcaaccagctccgtccacctgggcagctgcccgtgcaggtaccaccgcacatgggccagctgctctccagcctacggatccgcatgtccactgctgccaccctccacctgcgtgccaatttgggcaagcgcctggagatctacctccggctcacccagcgcacgcagccccctgagcagcgtctgtccacacgccagcgcaagctgctaatcaaggccgtcgtggagctgccgcggatgccggtggccaagctgaccatgggcttgagcagcgtcgctcgcgagcaagtggcgcccctccgacagctcgttggccgaggccacctgaagatcatcagcggcaagcttcccaacacagtgctgcaccacaccatccccttcctccgaaccgtcctggctaccatcgagacagcacgtgcccaagcccctcctgacgcccgcgtccctggcaagcttttcacgctgctgcccatgaagcagggcttcaccatctcccacatgcccttcagcagcatgctcatgatcgcgctggtccgcgaaagcggactggcagccttcaaaggggatggcaggcagctgacacccgccgagcagaagggcatctgggaggcggtgctcaacgtgtccaggctggagacccgcacaagccacttcgacaattacctgacaaccgacggcacatccgccagcgtgctcatggacagatccgccaacctggaggcaggcaccaagagcatgctgtctgcagaggagtgcaaggcgctgctgtacgaccatgcagcagacaaggtgggggtggatcccggcatcacggacgtggccaccaaagcctgcttggacgggcgcacagcctcgttctcttcagccaggtattacgaggaggccctctacaacaccagcaggcggcgcacggaggcgtggaacagggagacggaggacctcatccagcgctttgacggcttcagcgcggagactgcatcaactgacgcgtacagcgcgtacacacgcgtgtacctggaggtcctgggccctctcctccaccaccgcgcagacaaagggtaccgcaacatgcgcttcctccgcacatccaagcaagccaagctggtttcggacatcagcaccttcatcgcgccccgcaagccctctgggcagggcgtgacagtcgtggggatgggcaactggcgggggcccggaaagacacccatccggcggcgcacgtgcggcccgctggagagggtgcgcctgcacctgaagcagcgcagcgaataataataataataat

SEQ ID NO: 250 - DNA, 8613 bp, unidentified; identical to SEQ ID NO: 249
  misc_feature 1..8613: note = Fanzor polypeptide
  source 1..8613: mol_type = other DNA

SEQ ID NO: 251 - DNA, 21002 bp, unidentified
  misc_feature 1..21002: note = Fanzor polypeptide
  source 1..21002: mol_type = other DNA
gtgctgctgacgcgccagcctgccgagggtcgcgctcgtgatggcggtctacgtttaggggagatggagatggagtgtctctgggcacacggaacgatggggttcctgaaggagcggttcatggagtgctctgacaactaccgtgttttcgtctgcaagtgctgtggcatgatggctcacgctaaccctgagagcaacctgttctactgcaagtcttgcaagaatctgactgagttcaacgagctgaggattccgtacgcaagcaagctgcttgtccaggaggtcgagacgatggccatcgccactcgattcgtcacggacgcgtagatctttaatattgggttttcagataccggatcgtattggaactgatatcgtggaacgtaaaagcatggacaattattattttctttccggtcgatgagatttgtaatacagtcggagacgaaagccatccccattatttgtaagcaagtgaatgcagtaatggatcagaaatcgtagacattttagttctccgtgtctccgacttgagtttaattttactgttccaccgactgtatgtaaaaaggtacaccaatcccagtttttcttcttattttcgagtttgttgttgttgttgtgttttgggggtggatgtctttggggtttgttggttggtggatgtattttggggtttttgggtggatgtctttggggtttgttggttggtggatgtatttggggttttttgggtggatgtctttggggtttgttggttggtggatgtattttggggtttttgggtggatgtctttggggtttgttgggtggtggatgtattttgggttttttgggtggatgtctttggggtttgttgggtggtggatgtctttggggtttgttgggtggtggatgtctttgggggttgggtggtaccaatgacatttttgtcatttgatagttttaactgttcttttgtatatgagttcggagatatatcaaagataacatgtacatctattggatatttattttgttcttttattaattttagaatactttttggattgtctaatattttttcatcataatttagttcttcgctaccgttcttaaatttcaaaacattataatttctttttccatttataaacggaacgtattcagcgtagaaatcaataaagtcttcttccctcgtagtttcgtttattttgaaattaatacctttcgagtttgttgttgttgttgttcttttaggtgttggtttgttgagttccgttcttttactttgctgttggagagttttgtgttcaattgaagaataattttggggtttctttttaatacctctcattgtcaattgagtcgggactaggattgttttattcgatttagcgtttttgtcagttgatgctatgctgctttcatgatttaatattactgcgtctgctattggtttggtagttttaacgttgatttgaacacctggtacagcagtattgtgatttgaattacttcttgttacgagacgggttgtgtttttcgtggtggatgtaaccggtgaaaaggtgtttgagttatcgtttggggtgttgaagatgtcatgcccggtcatgcgcacgattctatcaaacatttcgatagctgtgcgcaaatcatccgaatcatcagtgatctttgtattgagtataagggaagatagtgtctttgccacgacgatattcatactggacggaagtgtatcttcaagcgtttgtttagtttcagcactcaaatcacccggtcttaattctgttctgccttcgttcgttgttttaacaatttcgttaacggacttcacgagatcatcgaggttaattttgggacgatcaccttcattgaaatcggtgcctatataatcgatctgtttcctgattcgattgttgaattcggtggcaacattatccatggtatccgacttgcttggttgttgtgtgttactaccggaattattagtaacaatgttccatattttggtacccacagccttgctgatttcttggatgtagtagtacgcgtacatgacagaggccattggggggaacaatgtgtgtttggatttgtcagttacaaagaactcaagtgtcttgcaatcttttagggttgcaatagagaaacaacatttgatgaataatacatcattctcatgattaacgatctctatcttcgtggaatctattttgtcaggccagcgagaggctatgcgtcgcacgtacttcaagatagacgcggacagattttccacgctcgcaggggaagcgatgtccgtgaaaacgacttggcgaccgtcagcagactcggttacaaatgaagatgattgcgatattctagactgcgaagacatacctgatttatacaatatctctgattgagatcgtgataattgagatgatattcctgattgagatcgtgataattgagatgaaacgcttaataatgggggtatcaaaacggaaatagaatgatgttcttcagaatcacctgcccctccagtgagaagagtgcgatacttagaaccgattatttcgtacacaagcatttcaagtgataatgtgttgttgtcgcggtggcatttagttttagaattaacaaggacgatcgccattacgagtgtcaacgcacgcatcgcaacctcttccaactctcgtggaagcttagagacacatcccacacgccattttggacgcataatgatgcgttcggaacccaattgattaaaccacctaaagtgttcgttcacacgccgagctacagtaacatgcctggcaaatgatgacgatgaggcggatgctaaagacgatgctgttctacgcaatgcggtcgctacacggtctggcctgatatgtacaacgacgttctcaatcaacaagtgaatcagccaaagccccaccaatgctcttacgttcagggaggttcccttggacagcaactccaatacggtgaccacatcagaagcaccagatacgtctattttgaagctattgcacgatatcttgctctgaccattggcccttgcatccatggctaccgcttctgaccgaagaaatacggcgcccatgcaggcgaacgtatttatttttctatgttttcttgtggatttgtgcagggacagagacgacataatatcaagcaggcttttacacatggctttattgcctccatttgatctatttatatttcgtccgatccaagtgcataatacatcacatgaatcgtcttgttgaactccacccgttggcatgtcggttggcgtcgagggttgctttacaatggaacgttttttttttcatcttcaagagttcttcaacgtttcctcaggcggcgcagtcgtgtgcgtgttagcgacggcgcagcacctgtagggggcgtacatgcccacatccggagagaagcgcacgatgcgaaccaaatggccaggacgcagatctaggtaccgtgccatcgggtcagagcacgcgataatcggaaagtggtacttcgacttgactcggtatcgtgcgacgagttgctcaatcacgtgcttgtcgcggatgggttcgtggcggggcaccaactcgtgacgagagatgttgaactgcagttcggagagacagaaaaactgcacgcagcgacgaacgctctcatctagacccctccgacttgtgctcaataccttctcgcgagtcaccaaaataacctctcgaatgttgttgccgcccacactggcacctcctccaccacgttgttgatgctgattctgactgtcgccaccacccatcttggtggtataagagtccgcttcggacaacgccttttcatttatatcgttgttgtcattctcggtgtctcctccttcctccataatgacgtcatcttcttcgatatcccccacaaaatcctcatcttcatcttcatcatcgttccgtctggcaaccgccgcgtccttccctacattattttcgaggggggcgaggagtttcctcacgtcggggagcttgaacgtttgattgagactgtagatgacacggtagccgcagtctcctggaaggtagacatggaagacgccccccgatgatggggtgacggctctggcgtgcaggtcgagagcgatcggggcggtctcctcaatggataacgtctcccctctgtcgacgagcatctcgcatattaccgtgaggctcttgcggacctgtttgtccaacatttttgttattaataaattctttagttatttgctttacactcgctcacattttaggcaccactttctaattggcagtgttactgaggcataatatttttgccacgaaaccagccagcatcgtggggatgttgtctgggacgaacttgtacgtgttttcgaacgtctccttattcacaatataatatccgacaccgtccgtttcctggacgacgtagtctcctgcgtccactaccatttgcgattgagagcgtgagctactgaacgcaagcgtttgtgatgtgtacacggcggctcggcgtctcccaggcctggccgtcaacgtggaccccacaatgtcgtacagcttgagtgccttgggaatggtgacgttgtaccggtccgatttgggattgcagatcaccaatacggcaacgacaccttcatcggggaccatcatggacgcaatcgtgaacgtcatgctctgcaattcatcgcgtgtgcggacaaacttgtacctcaatcgtttcttctccacatcacggaatttaaggtcgtccattctgatgaggtttgtgacatgttcaacgtatttttaaacatttatactgtattttaaatgaagcgtggtgcggtggcaagaggattcggaaaaaaaataaaaataagatataacgcatgaatgcagctcccattgatgaagttcgacattacggatatccgccatgacaaggtgattgtattgataggaaagagacagaccggcaagtccttcctggggcgagatattctctttcacaaccgcgcaatccctatcgggaccgtcattttgcctacagaggagtccaacaagttctacggcaacatgattccgcacatgtttatccacgacgagttctctccggatatcatcgataacgtgataaagcgacaaaagttgttagctcggaaggtagacaaacaaatacaggtgtacggttcatccaatatagacacacgcgctttcttgattctggacgactgtctttttgacaagacgtgggcaagcgacacgggcatccgctatctgttcatgaacggtcgtcacctccctatcatgttcatgatcacgatgcaacatccgatgggcatcccccctaatcttcgaacgaacatcgactacgtattcatccttcgtgagaacgtcctctccaaccgaaaacgtatctacgataattacgcgggcatgttcccatcgttcgacatgttttgccatgtcatggaccagtgcaccgagaaccacgagtgccttgtgatcaacaacaatgtgcaatcgaacaaacttgaggaccaggttttttggtacaaggccgagccacatgaccaattcaaactcgggtcaaaggaggtgtgggaactcgctagaaggaccaaacaaaaatgggacgatggtgcagattcggatgaagagggaggagactcgaagaaaccgtatgacaaacgaacttatttacaaggaaagggggggaaacaacaaacacaaattagtgtcaagaaaaccatgtcctgatacacgtgtcctgatgagaacaactgtagtataatttacatgaacagaatctcgtctccgttcttcgtggcgttgtccttgttctgttcctcctcctcctcatcagagttcttcttgacgttgttttcgtcgaggtacatgtcatcatcggtgggcatgaacgcgtagccgtcgaggttggcaggcatgatcatgcgcagctggcagaccttccacgtaacaccgaacgatttgttcagccccacggaccagatcgactgaagatggatgattgcggacacgcgcgcacccttgccacgcttagggctccggaggatctctttgaggtcgagaggctcgcggtcgcctccgtacacagggaaacggaaagtgccatctacgaaggggaggttcagcttaaagttgggagggtacatcgtcgacaactcgccggtatctttgtccttgctgtaccgcatcgatggggtgaacatgtcggccaccacatcacgagaggggtacttcttcttgaaccacgcgttagtgttctccaatgcattgtcgatcacgtgctcagaaacgcgctccatcatgtcgaaaaaatcctggacgccttggtttgtgtcccgtccagcgaaggacctttgcagtgtgtgcttgtcaggtagcccccgctctccgggccacacgctgataccgaacggcagagacatcatgggcgtctgtacaatcaggttccggttgttataattgatgaagatactgcgacctccgttgtctagctgcttcggagcactaaaggtgatcttgctcacgtcaacatcgcaagggaaggtgacgtcgctcgcgacagacttggacgtagtagtcattggtatagggggaattaggatggggtggtgggtcaacaataaatgagaggaacaaagctgatacctaaaacatatcggatcctctttatacttgtttgagtgtgccatttttattcttattttttttgaaatgtgtaccgctaactttcttgggttttgggggcatggaaagcattagcaagtcaggatcgtaaaatgttggagagcgacgaacattgtcgtcacgcagggggggggtgtccacgttttctcgttggattgtggagcgttgtttttgaggtgtattctgtgtttgttgttgaggcggcgtattatggggtttttgaggtgtcttctgtgtttgttgttgagacggcgtattatggggtttttgaggtgtcttctgtgtttgttgttgagacggcgcattatggggtttttgaggtgtcttctgtgtttgttgttgagacggcgtattatggggttttgaggtgtcttctgtgtttgttgttgagacggcgtattatggggttttgaggtgtattctgtggttgttgttgagacggcgtattatggggtttttgaggtgtattctgtgtttgttgttgagacggcgcattatggggttttgaggtgtattctgtgtttgttgttgagacggcgtattatggggttttgaggtgtattctgtgtttgttgttgagacggcgtattatggggtttttgaggtgtcttctgtgtttgttgttgagacggcgtattatggggtttttgaggtgtattctgtgtttgttgttgagacggcgtattatggggtttttgaggtgtcttctgtggttgttgttgaggcggcttattatggggttgttgcggtgtcttctgtggttgttgttgagacggcgtattatggggtttttgaggtgtcttctgtggttgttgttgaggcggcgtattatggggttgttgaggtgtcttctgtgtttgttgttgagacggcgtattatggggtttttgaggtgtcttctgtggttgttgttgaggcggcgtattatggggttgttgatgtttacgcgtgtgatttcggtgtttcggtccgaccgtattggtttcgctgagattaacgatgtccctcaaactcttcgatagatcgaatttgaacaccttgttatggaggtgctggagcgatgggttcaacagtgttgtcaatcgtatctggaatatggcaggctcgtcccggttgttaatgtcggtgaagatcgtgtaaaacaggttatcgaagtctttgagcatgagtattctggcagaggtattgttgtatttacgaatggagcgcaccgacttgtacttcataggcgacatcttgcgacactcgactgcagtcgtgtcaccatcaatgtcgtatgtgatcgttaacatgtgtatagcgatagcttccatctcttgtgtgtacttcgcttgatcctcagcacacttgagcagtcgatggtcccccaacgacattacgtacatgtagttcctggcgttcctggattttaagaagctagagaaccctccgcgacagtgatcgatgtagtgaccaccgtgaatcaactcgttcatcaagaaaaatcgatcaagcacgctccctggatcaaacttgagctccggctcaaagctcctgtagtactgtccagatagggatacatattttatgaaagagcttatcttatggtcggttccatcgggattcagtagcttgttcattactatgctgtagatcatgtaggaaactatgtggaaggctccggcaatcgtgtcgcggtgttttacactgtccaacccgtccagcaactccttatcattaattcctataatggtcttgtaaatccacgtattggaaccgtcacgtttggcgacaattacattggttgtcttgtactcgctaatgcgagctatctgattgaataacggagcaacgctaagctctagatatcttttcaatatgtccaagtgactgagtcggtgttcgttatcaatcatcaagacgctcatgtacgctggtaagttatgctcgatgagacgctgttggattaccagtccgaaaaacagttggcgcatttggtttcctgcgccgtggttggggcgcggcacacctttgccgctcgaaaacattgaccacatcgacgggtatggcttgttggagaaattgtcaaaaacgaaatgcgcacacgacgtgatgaaggtttttattggagttgaggaggacacgatttcttcattattgagtccaacaacgcttctagatgcatcgtctaagtacgggttgttcagatctatggatccgtagtgtttcgatacattggggtatccgatacccttcagtttcttatattcatagttctccttgataagcatttaggttcacccagtgcgcaaattattggtatacatttgttcttcaaattaaatgatgtaccattaattgttacactcagaccggtcaataatgttacagtatattgaatcaattccaattctctatgtacaacttggacagacggtcgattgttgtacacatgtacacattgctgcaaagtttgaggagagtggctatacttgcgaatgtaagccacatgacagtctcgaggtggatctcaaaccccactaaaaaagtgtacaaacggaataaacctacaaaatcggatgtggtcatagagttcttaaaggcgtcattaaaaatagatccattcgcatctctttctgttcttcgtcataaggtaaaggatgctttcggatttgaggtatcaaaagagttgattcgcgttgtgataaaatggcttgggctcacaaagaaaaaaacaaagttcttctccaggcctgataacttatatgagaaaaccacgtcattcataagccaaagggaacggttaaaagaggaagggaggacttttgtatcgatcgacgaaacttcatttggaagacatacgagagacgtgtttggctactcaccaaagggagagctactggttgtaccgaggttgagacctagggtgacgacaatgtcggcactttgtcttattcaacaaggcaaaggagacatttattttaacatcaggcaagggtctttcaacacacatacttttgttgagtttttagaaaatttggactgtccaactgacacagtaattatacttgacaacgttgcgtttcaccactccaagaaggtcaaaacacttgcagcttcaagggggtgggagctcctatacactcctccctactcaccttggttcaacccaatagaaggggtgttctccatcgtcaaacgcgatttctataaaagccaagatgtgtataaggctttgagttctgttaaagagaaacacgtagaggctttttttcgaaagtcattgaatacaatttctggaccttgatacaaggaaatagcgacattggctactaaatggagacgatagtcaataaagagcctccggacaagcgtacgcgaccggaccaggcgtccaaaattaaggacaggaaaaacggcgaggagaacgtggtaaagtgtacactgagtcggatcatagcggataaggacaacaaggacgttatcatcaaggtgattaaggagcgggtcgacagcgtatccaagaggacttatcttgccggtgttgcggtgaaccggatattaaaagaagtcttcgaaggggtaccagatgcgcaacttcacaatgtaagtgtccctagcgtcgaccagaacttcattcggcagcttatggtggggtcgagacaggcgcacatggagacgagggacgccacagtcgaaaggttctttcacaacaattattggtttagggagaagattgaggggcgcgaggtaattgtgaaaaagaagaaacaatacgtgggtgccatcgctcgctacgatggcgatcgaaacctgtacagccatgcgtcgaagaagtacctgaccaacttcaataaccactacagagtccatctctccacatggatcaagaagttcgtttactcgaaggaaaacaggatcttggccaaggagttcaaagatgagcacggcattgacgagaccgtattccaccgatacctcctctacgatatccactcttggggagtaaaggaagacctcatagcgatacattcgctcctaccggagcgaacaaagatgttgcttaagattcagcactcgatcatcggacgggacgagatcaaccgacagtggctcaagagcgtttccaacagggccaagatgatccggtacaacgtctttatcaatcgatacctcgaggccacagaggacgagggctacgccaagcaggtcaacatcgctcccatcccaacagtcaagcacgccttcatcacgatagacatcgacggcctactgggcgtcctcaaggatgtgggtctcgtcgagagtctcgaaaaaacgctgacgaacaaggagcactaggagtcggtcttcgatgtggaaaacatctgttctattgggaaaggtgtgttaacatgcaccatagacactgacggcgtaatggcttgtacccactttcttagggccgagaagaaaaagatttcaatcaaggacgacggaacggcgattaagaagcagaccaagactctccgcgagttttccgagtccgaccccaatgtggtggtcgttgcaaacgaccctggccgctgcaacattgcctttttgacttggaagaaaaataaggtcgaagaaaaagataaggggggtaggaagaggaagaggcactgcgagttcgggagcaagagactcacacgggagcggtactacgttgagagcggggtcttcaaatctagagggccgaccaagaagtggttgtctaacatccaggactgccttgacgacctgaaggacaacagtcccaagcgcacatctctagtgtcgtttgacgcttacgtgactgtaatggtcaaccattgggattctcgatggggggagatgtccaagtcgcggtggggcgcgcagcgcctgcggctctacggtggcaagaaacgtgtcttagcacgcttcttcaatgaggtccacgcggatgtcggtgagaggaaaacaattgtcgtcgcatgcggttctgctaagtttgcccctggtggcaagggtgaaatttctgtccctacaacgagcgcgttcaaggcgtttagcgaccgtttcaaggggcgagttgccgtcactgacgaattccgtaccacacagatctggcacaaggacagcaccaccgtcctccaaagtgtgcagtccaaaaaagaagggcgcacggtttgaggcttgctatggtgcagttccaacatggagaacagcaagttgtttgtaaaccgtgacctaaatgcagccattaacaaacagtcggagacacaaaaacaatggtgttccactgccccgtggatttctacatgtacattattatcagccccgcggaatcacaatacctctccagaccatgtttcgcaaccagtcacaatccgccgggaggcaggaacacccattatttgtaatgctgccacacacccaacttgtccaatgaaaaaatgaatatatcggttgacctccacgtgggatgtagacctcgttcaccgccgggtcaatcgggtagaacatgccgtggcgctgtaccttgaaaacttcagaattcccacatgattctctcgatgctccgaggccttcgcagaagccggtagatcatgcttctcagtgagtacacgaaacccgttgagcaaacgaatgtatccttgtagtcgctgcgtcccatgcagaggtcgtgatctgctatctcaaaaggagtcagaggcgcgtgcatctcattgtcagagagaaactgttgttttttgacgaaggtacgtctcagtacgtcccagcacgcgcttcttcttgtagtatcattgattactccatgcgttcgtgcatgacgagcgcgactctgctgcgaagagaccgtcgagtcggcctgcggcgatgcggttactggttcctacatacgggtgcacttctccccgcatcggagcatttgcgtccgtcggtgtccagggacgcgcgtattgaatcccttgaacacgtacttcataacgcgttcaggccaccgattccccaaaaatcgagttccacgaagaacatggtgctgcgcattgcctcgatgaacgtcggggcacagaggccctccagagcgtggatgtgggttgtaagagatggcgaccctggacggtgcgatgtcaaagttgaggataagtgtggcaatgtcctcgatcagctcatgatgacttggatgacggggtgtctcccaccatactgacgatgttcatggtgtcgagtcctgatgatttttccggcgtttagcctctcgatttctgcgaccatgctctcggcctctgcctcgtcatcatgcccacaaggaagatgtcgtagtccctatgcgtcttctccattccagtgacgacatgcctagcgcggctcctcctgcgagcactagttttccggcacccagtcgcaacaacgccagcacctccggtgggagggacttgtgcagttgctttgacatctctgctaccgtgagactttcgtccatcactaatggctcggagatcgagcttggacgccatcgagcttggacgcgaccgagcttggagtcgatgccgccgaagagccaattgatgtttcgggagctcgtgcattctggtggacacgtccgccggatcggggacacgtcgtcgagatttaccaggcacgcgttccttgtggtagcgttgtcgctcgtccgacatttccactccagtgccatggcgtcccacatgttcgggttctgacgcaagatgtccaggctagcattgacagcttcgaggagccgttgcaacctgtattggcgcaaaccgagcatgtcggcctccacgcacaagcaacggaaacaattgtccataatgcaaccgtccacactgacactgtcattcataatgaacttgtcgtcgtcattcagaatgaaacggttgaacatgaacatgatgtctgatcgcgagtgtgtattggcagtctttgacacggcattgtagatgtcgatgaagctggtgcgagtgcatggagccgggacgggaatggtttccgattcaggttccgatttaggttccgattcaggttccgattcggagtcaggaatgtggtcaggactgctgtcaggaatgtggtcaggactgcggtcaggaagtggttaggagacggtcagaatgtggtcaggactgcggtcatttagagatgtgtagcacatgtcaagctgatcatccagcaggggctcgaagtaggagaatagtctgagcaccttgctgtttgaaggaatctttaacgtttctccgttgtggaattgcagcgtgacgaaggttgtcttcttgttgctcgcctcttctgccgccttcatctttccttgcacgatgtcgccacgtatttcaggatctcgttgggatgtgcaagagtgcgttcttcagtttttgcagtgttcgattgtgttttatcgcatggatgcaggatgcgtgcatatgagagggggcggatccattttttgccttacttggagcgatgaccacgaagctgatgttcctgttgcggcgagcgctcttgaagtccactcctgggatgcgttgtgttctggtccgtcgtagtattcttcctcttcggcgagtgcagatcggaggaaccaatagtgtctgcggcacgggttatctcggtggggacgtggttcagaatcgggaagatttcctcgaggtgcttcactagcttctcgttgtccacgtcaacaacacaaagctgtctaagaagcactcctgcatccatgtggttcttgtgcttagacacgaagggtgtgatcaccccattcccaaacgttgtcctgtgctgaaacttgggtttcttatctattgctgcatcaagacatctgagaatagacgtgttctccaggaactgcagtgtcaaaaaaactctcatgtgggtaatctacgaaacggtattctcgttttacaccttaaagatgtttatgaattggagttgattttcccccttcttggagactagcttcatgtgttcaagtggaacgggtagagtggacgagtcgtgcaacgtattggcggtacatgtttgcttcctttatgatttgagggacgcagaagtgagaaccaattggtttaggtctctcacttgttctaggatgactgcttggttccctcctattataggagtctgtcaggaatacgggcgcatgacgaacactagttgatcttctgactggggcctatcacgagctttcgatccgagtctacccaaacgcggtagcggatcgcttggtgatagcgcccaaattggcgtcgctgaagaacacgttagctacactggaggttggaaggacaaccctgcgcgaccgcgtattggattcctttgtgatagccctgttggttgttggtttttacatcacgcagatggggggggggggagcattgtgacggacgagcttcttactatttttacatgttttataaaaaaaaggcgcgtgtgacacgatgcgtaaaaaagccgcatcgtgaaagaacccctttccaaaactcaaaaatgttgtgcgtgatttttgcatcctttgcggtaatttcatggtggtgatcgtgtgctagtgatgagtgctatccatcccatgaattggggaaaaaaggaatgcctcatggatgggaagatgatccctgtcctaaatgaaaagtcaaagcggcaaaatcaccatataaagtcccccccaatgacaaaacttctctagaaaaaaccaaggatacccccaagaccccacagtccatctctaaagcggattcctccactgcaataaatgccaattctcaagaaccaaataccgccaatgccaaccaaccaaataccaatgccaaccaaccaaataccaatgccaatcaaccaaatacacccgccaatgccaaccaaccaaaaaccaatgccaatcaaccaagtacacccgacattgattctaaagaacaaaatgcacaagcggaccccactgtaatcaaacaacacgcaaatgccactttaccccccaccgatttacctcctgatactggacaccctgtataatttgaatatcccatgaaacctgctacaggtccggggttcactactactgtttaaatttttagttaaagcgttatctgcattgaaaagtgtcttcagtcatcatcatcatcatcatcacaatgagcgttttctcataccaagttgcgtttccagagacctttccatcattgtgtaccatatcgaccattcatacaacggatggtaggtcgaggtcgttgttgttttggcgaaatcctttgggatttggttgagccgtgtgcaagcttcagtacgaagacatatgcaggactcctgagtttccttcacatctcgtctgtgttcggcgctcatccgcacgcgcgatacggccgtccctgtcgtccttgatggaggataacttgaaagatggccatctcatggcattgccttgagagcagtggtggaaagtacctcccgatgaggacacggtggtgtttccccacattcaacaaccttttcagaggcgtgttggatctgtggaggagattgctaagcactcggtaatgcgagcactcaggagcgcttcgtggtgttcaagagattctttgaaaaggcttgcggagtcgtggacggaacgacatgtctgacctccttggcgagttcagtattggtgtactcgtgactactaaagggagcgtcttcattgtgtgcatatgtttttggagaactcctggggatgcacatggaattggtgtcagagttgcgcaatgtgtgatgtactctacagggagttctggaacattgttccctggccggatgcccccgctgggaaaagtatatcgcctctggggggaacgtgcatgctctgtaggctattgtagatcatgtttactgtctccgggcgcacaggcttgtttgcccacggggctcctttgatgaacggtttgggtgttcgaccgcgtttaaggcgcgtgggggatctcgggtactttgcggaaagtgttcagaatccagaatcggccttaacaggacactgggtttctgtttcttgtaatggacttggtagtgtcgatggatctactcattgtaacggactcttcttgtattgaggacataaaaaagtgtaaaggaatggcgattaatgattgattactaaactttaagatgatcgtcccagttcgttgcttacatgtggcaagggtcgttgcagacaagtggcgtgcttacaccgtatggcgacgagacaagaccttgaaggacgaggagcgtgggaaattcttgatacattgggcatcaagcgcatatgttgccggactgtcatgctaaaatgtagacatgatgtttgttttgtgatacaagtgcgttctttcgcaaatccattttatttcagatggtgaatctcccgacgtctctttgcccccccctccaatccattatgatttgcgactctataaggaaatccgcctcttacgaaacgtgttgtatgcgtatctctcatccctgatggaccgtgccaaagatgatgctgtgcggttgctgatgagcgccatgtcctcggttttttccagaaaaattgcgtacacagtccagtccggtttcaaacatttttgagtgatgatgaccactagctacaccgacacagaccgcgatgttttgttggatgtgtgtaatcacgtagcaagaatcgtgtacacaagaccgcatatcctctacgatggtggaaggattgagccaggtcgaagcgggcagataatcggaagatcctaagtccaaaaaatggcatttctgcaaaacatacatacgacgagactctgcgaaacatatgtctatgatatccgaagcatccgagaaattgtgaagatgtggaactagataacggtatggagtagtgacgatggagtagatgacgatgttgaagtatatgatgatgttgaagtagatgacgaggggtcaagaatagatgacggtggatcgatgtaagttgaagtagatgacgaggtggagtgaggaagtagatgcaaagatcgttgaagtagatgacgatgttgagagtagatgacgacgtggaatcagatgacgaggtggaagtaaatgaagagttggaaatagcagacgattgtttctggtgatgatgatgatgatgatgattgatgattcgattgattcttcacgtacccctaaccggccatgttggcggatgtgtgatttcgtggagactgcacataatcatgtgatattagcaaatgtccgtgtcctcctcatcccttcatctgacagggagacaaacagaaggacgctatagggaagttgacgatgagagttgatagtatcatgaagagcaactcccatcgcatgcgtgcccgaatggtgcgaacgtcagtgttcagtgttggaagagatcctcggatgaggggtattacatacttctgaaaaacaaatttgagccgcgtaattgaacgcaaccacccctctacgcacacgaggtgattgcaggaagggcgagcgcttgcacaacatgattgtttaggacagcaaggacaccgtctgaaatcttcaacggagaagagggaattgggggggtacagaatcttggaggttcgtcaaactggatgccaacgaccgacgtgtgacatatgacgaataatgttgacaagatcccccgccagtagggaaaccatggagacactcgaacccgccacttcgtcagttggccggaaaagtaaaataaacattatcagatggaaataaatgtacgacatcgccgttagaaaattggcggttaagacaatggatcgctgacttgggtgagttaaaacttctgtgtcttagcgaacatcagtcgtttacgatgtggaggtggagggtaaattgaaaacgagtttgcagtgatattggaagcaacaccatttctgtgagtacgaacaaagatttgttggaaaattgtctttgatgtcaactacaagcgcgagccaccgtagtgtcatgttttcctcgagcctcgtcgagttaagagagcggcgtacgttcctgccgaaaccgtctttaggtgttggtgcaaggtttgcaaaagttggtggaacgcacaaggaggcccctacgtccattataactacacagttggtatatcgtttcataaaactacattggtttacagaaaaatggagcaactacacgtggacagtgtacaaaggggaccttagttccattgtcactgaattttgtgtatccacctcctctttcccagctaagattactacggattaacaactgtatctgttaatgcgggatgcatcctcccattttaggctctatcagttgacgaaatgtgcccggttagtgagcgtctcaagcaacacttagggttttcccctgtaggaaaaatgttatcccgtttttaaaactattggttgcggtgtgtgtacacacagagtttcgttgaggaagttttgtcagatggatagcagaaggagttcgttgttggaagaaaggatctgtgaagaagacggacttcgctgctttattgactcatgagttgtgaaaataatttcagtaagtaataatcgacaacgtccagtatccataaactgagtcctcaaagcccagtaaatattggctacactccccttacagtccagaatcaatgctattgagctgcttgattcgtgaagaaggactttttcgtcgattgaacatataccaaacgctacaaagactctcacaatagcaaaggaatgcactgacatggaaatgttgggtaagggagggagaccgcttccatttttgccaggatgcgtgttgttgatgggctacgatacaaaaaacatgatggtgttccactgcaatgtgcggcgcgttgcacccattaaaagttacaccataaggtcccctacaccataaggtgtacgctacactccagaaagcggttattttcgtattccgtcgagtgtaaatccgtcatcaactgctaccatcgctgactggtgttgttaatccccccttgctgtgctgggttagctcaacccgtcacgttgcccttctgaatggcgattccttcacaccagcagcaggacaacatttgtatttgatattgcaaaagttattccttacttatgtcagaacaaactttattaccaaacgtttaacatggaccatggttgtctacgtctgcaggtgttaacgttacttctcttcaatttttttttattgttgggcgcggccaatccttccttcagttgttgatattcgtggttgtggccagaacgcctgatgttgagattgtatctgagcggacgacgtgatgaccaagcttccaaaagagcgataagagtaatgcgtgttttataacgagcgggattcgttttttgactctgacgggagctctttccctaaaaactcggtgtacttccgtccgtcggatgggacaatcgtgtgcaatttttcacgtgattccgtgaagaaggttgctaactgtccttccgaattcaaattggaggatgttacggtaattgacatgcggacgcagttcacagaccctcgatacgagtgttctacaatgatgtctcctaacgtgagtcgagaccctgcgcaacacatggacgcgcgcgtgcggtgtgcttctaggcgagtacgagtttgcaaagacgtgtttacattggagactcttgtttggacgcatctattcctacagtacactgtgctttgggaccgcccgcgccttttccaccaagtttttttcctcttgcgccccatcttcgtccggggaccggggtgtgctcccatgcgcactcgcacggtaagcatgtacgactctcacgatccgaatagtgtttcccaaaacaacatccctgtagtatttgaggcattgtccgacaacccgcatcataggtggcaatcccggggatttcgtggacattagcgctgtccttaggaatatgcaaacgacggctgtaacgtacggctcgaagcgtgttaacattcccatggtcatgtattacctcaactttgtgcaggacgttcctgtcgagtctctcaaatacacaaacgggttaccgcgttcatcacgcgcaccaccttgaacgctcaggtgcgtttgacagacagcgtcgtcatgaccgtcaacgtcggttccgtgaatgtcaacattgctaatgccagccgcccgtttgaggttgattgcgtgcgcgatagctcgttagttgtggtgaccttcacgacatctcttatcatcatggcgtccatggactcagtgtcggggcgtgtgcagatgctgcagatcggcggcatacctgtgatgcgcatgtcaaccgacgcactgaccagggtggagcgtttgttccctccaacgaacaacatgtacccttacacgaacaagagcat

SEQ ID NO: 252 - DNA, 21653 bp, unidentified
  misc_feature 1..21653: note = Fanzor polypeptide
  source 1..21653: mol_type = other DNA
acgctctatcctaggacagctgcaaatggtccgtcttagtcgcaccaccctgtcctacgatgacgttaagggcagccaggcatgcgacaaggacagtgacctgtctcctttcgaggtgtgcaagaaagttgctagagcctgccagctcaagcatgagcattcaagatcggctgaacctagctatggtggacgacatcgtccccctgttgatccaggagaactaccttaaccaccgcccagtcatcgcaggaactgaggacgcagcggatgagggcagtggcaaagtcagctgaggccatatctgcaggagatgtgatcaacacgtctgtgcggcgctacatgaactggagccttatgcctgccttcaacacgcttgcaatgccttgtgccgggggcgtacatgcgcggcgggaggggacgccttctggccaggcgacaactactctctcgcttcacctcatggctgggcaacttctcaacctcaaaagcaaaaacgctgctgggagaactcaccgccaccatggcttccagcggccacatggcttctagcagatctcccgtgcggttagagtacctatcagccatgcgcaccctactgacgcgtccactagtggactgatggagagagtgggtggcatccagcagagtgtttaccctgatgcaggactactgcgtctcccgggaaatgtttgactacgtgattgacgtgaccaagttcaagaccaaggccgattggggagaggaccccatgaaggatgtccctacaaagattaagagcgcctttaccaggagcttcaaccggcaaggcctgcaggcgaagtgcggtgcaatgctctccgcacctttgaagggcaaaaagggtaagaaggggcgctgccgagcagagagaagacggagcggatgacgatgaggacgagtccgggttcgagaagcttagtgcaggcgttgcagatgaagacgaggacgcagatgatggcgacgagatggtagcggcagccaaaaagcccagctgctaagtgccaagctgatcaagagaggcatgacgatggacttaaagtctgacaatgctccagtcaaggggaagggcagtgcgggacggggctccgggggcagaggggcaggtgcaggtagagggagtgggggcggagggggggtggcatagacctactgtcacgtgggttgctacaccattaggttacaccgtaaggtttcattttagtattccgtcgactgtatcactatactatcgacttaaccccactgtctggtcttacggccctacagatcttgagctttaatagtccctgcttccagcaacatttaaatagggttttcagagttgtaatcccaatgaaatcagtaagcggcaactactttcgagtcggagcactcctttgcgtttgccatgctcataattgtttagggttttatattgtacatttcaaaacacgatcttcagacatggattacttaccttaccagaatcccacgtacactgtagggtccattgtaaccatagacaacccaacaacgcacaacgacttggataagacaacaagtatcgtggggctagtatacgagtcttacattcacaagggatttccgatgtatggtgtgctgatgagaaagaaccatgcgtgctatgacatgaaaaatttcaagcaatcaacctcatgcttgtcaagtgatatatgttgccaacacttggatgagaaccgtatcacaacacttgatgtcaacaacagtcatcactttcgggcaaagcatgatcagcatgcatgtcgggaatgaacaatgtgtcgggatagagacttcggcctccgtagggaatccgggtccgcaggtctgccccaaaaaacgaaggggagctggagttggaggcgcaggttcgaatcacacgaggagcatctttcggggcgagtgggtggtggtttccacagcgcacgtgagtagttggctgcatgcatgttgcaacctttcgaacctgctgctactgctttcagtctttatcgaacccgagctcatctttgccaacccttcaggtacaacaacaccatgccacccacgtgtggtgagtcgagtctacatgcatataaaaaaaaaacaggctatctaaccttcaatacgacttgccaccatgtgtactggtaactgctcctcatgtccttgttacagtcactgccggtgcacgtatgctccacctttcaaggacggggattcagaggtagcactcaacctaccgggcaaggtcatgcatgtgcgagccctgtgcagtggcttagcgtccattcgcccgagcctactctatgtcaagaatgcactggaagatcatcatgacatggattggacaatttttcaagacaccgtagcacgagagctcactatggcatccatgttcctgggcggcattttggacggctgcgtgatcgcagagatgcagcaatccagagacaaaggggggcctgcagctcccaagagatctgtgtcctttcagggaaccatgttccaggatgcaacgcttcgcaacatacaggcaggggtcaacggattgcgttcgttttactttgaagagcagagtgtgcaggcaagcttatggacggtcatacatttttggaaacactactttccttaccaaccgctaccaacagagttctcgcgaggcagactgcacactctactcgacttccagcttgtcctcggaagtaaccatgcagcacttgacacaggtatacctgagtccaaggacagcctcaatagcaagccactcagcggtcctgtggtgcacgacctcctaatccctgcgttcaacgctgcgtgcggcattactgctcgccttgtggagatttatgcagtttctgggaatcatacagttgatcaaataattttgggacactcagtataatttgaatgatatcccctgaaaccagatacaggtccgtggttcactacaaatattttttgaggagttgcaacatgtaatcaccgttttcgcctactttaccgtgtgtttccggggtttgagtgatcgatcccccaagagtatcgacatcgttccaccgtttgatataagttaagtgtagtctgcttgctacggggacgatgagggtcactttgcttcaccgcccaagtgttacagtgaaaagctcaagcgttacagtgagaagctcaagcgttacagtgtacgcgagtcatcaaatgaatccaattcaatcaaatccgctgccccgctccgcggtgcccgcgctcccccttcagaaaccaatagagttgtcgttaaagcaggagtctgcttgaagcctccgtgtgagaatgagtatgcgcaagtcatcgtgatccccgcaatccgcacgactgccgacatgatcgatcatgtatgtatcatcttctgtgacaagtttaagttgtcgtcgaccgagtgtgtgacatgaatcatggcatcgagttcttcatgccggcgcccttgaacacagatttgatcttttctgagggagttgtcaattgagcagtgcttagtatcataaaatccgatagaccaagaccaatctgaactgttttgtgtggcatgcttcatgtaattgactacctcatcgcatgtatttggaaattgtgcaaattgtgatgcaaacccatggaaattggtgatgctgtgtttggggaactgcattgagtgggacatgtcttcataatggtttatcgaaaatcctcgaagcattttacagttttgaagcgaacaccaatcgacatcgtataggaaaaaacgcaattccagaaatttcatgtttgggaatgtatcaatcaatgcttggacatcaccttgtagtttggacttcatattgctgccgccatcccaatatcttgcttgtggaaaaatatcttcgccgacaagctcgacacaaactgcattgctaattactgttggatttgatttcaacagtaaacaacctccactctggaccttgattgttatgttatccactgattcacctcccattttcacaacttctgcaatactttgtgtgcaccctcccttgacgtaaccgatatgtgtgatatccatattcattttactgttccgccgattgtagtagatgccctcttaacaaatcgggtcatttggcatctttaccatcagatcacctgaactcgcctcagcctgaagatctccaaaatggacatctttgaccccagtgcaaatcaagtttgacgtgcctaacgcagtgatgagagaagcgtaatctgtcattctatactgtatgcaaaagaattgggagttgaatgagcgaacgggtagatagatatgaaaatctttggggagggggaagagacgttgctgatggtcacgatgatgatgaggcgaagagaccaagtttgctgatgctgtccatgtccgagatggaggcggcggcgtcgcgtgtgtgtgtgtgtgtgtgtgtgtgtgtgtgtgtgtgtgtgtccgttccgtaaatcagtagtgtgtctgcgggttgatgttacactgtgggctcccctccggtcgcccacccgctcggttcctcgcggactcctttgtggaggcccctccggtcgcccccggtgggggaagatgtgaaaggggctccgccacttgtttaatgtggtacggtggtattttgttactttcgttattttttgatggggagggccatagtggcacctgtgccgccgtgatgagagtggtcggtctctctgtgatgtgactcgacacaggttccgcctgatgcgaaagtctccctgtgagtgactactcggctccgccgatgcaggtgccgcctgatgcgaaagtcgccgtccttgatgagatgagggaggggcatgataaaagacccgacgatccccgtaacagcataatttccttttgttttgttctcctctttttctccgcacggcggctttcgaaaaacgagtgtaaacggaggggggaacatccaaaattgagaaattatccacttcttttgcttaacaaatcttcatgatcatgatgatatcgagcctcgagtgaagtgtgtggctcacgcccgacagcatcattcatggggattgcccagacccagatgtctgataacacactcgaggttggcttacctctcggatcgatgagagtgctgtcaaggaagccgaccacagcttgtgaagacaagcagttcctcctctagggaaccgttagactcgcaacttcaaaagctgggaaaagctacctctgtacggtccttgagggttcgatgatgattgctgcatctatcatccgcggcgtcgcttgtgtgtgtttgtgtgtgtgtgtgatttcagtagatgtgaagtgtgggctcccatccggtcgcccacccgctcggttcctcgcggactcctttgtgggggctccccttcggtcgcccccggtcgctccgctggggggaagaggtgaaaggggctccgccgcttgcgtggtggtgtgtgcatcttattcctattcagcacatttgcggccagctggaattcatacttggcttttaatttgtttaggcattgcacgccacatgagtctttgtattcactcagttgtataattatcccatcaccatcagctgggatactgaatggatgtgaaactgctacaattaaccgtgttccagttttgacatgcagtgatatagcatcttgtagtaaactgtctgtcgaattgaaaatgacgttgtccaaaactataatcttaaacccgattaggctatccagggtgtctcgcatgctcataattgcaattggggaatgcagtttatgatgagttacgtcatggtctgtctcacaaaccaccaaagtggattcaccatcccctatttcgtttgtgatcatgaagctctttccagtctgcctacgcccaacaatatacatcacatgagtaagcacacacactgtcggctgcgacaatacggatgcctcatttacagaagcgttggttgccatacatggcattctgatatctagtacatgcaaattccttatacactgttaggtttacttatttttggaaagcaaacgagtcaactgttgcaaccctttgacaccatggacctacatcgcgcatggaattgaattagtcatgtgtgtgggtcagcacagagagatgttattgtattgcatgcattgtggggcacaacgcgcaccgcgtctattcatgagtgcacgagcaagcagcacgcacttgaggttctcgatctcttcgtcctgcttggaaaccaagctcagcgcctggttcagtagacaatgttgctcatgcgcagactcctccgtctgagctagtagcgttttgtacgctcgctgaacagcgtcagcacgcacgcgctctgcagccacggcatcagccacggcaacagccacggcatcatcgagttgggctttcgtgtacatttcggccatgctcagacactgcacatgcattgccttgtctggggctgggtccctatattactattctaatatccttaaaaattgtgtattggtcttgttcctgatgattccgtgtgctgcaaagcttcaggactacacgggatctgggagccctgtgcaggaacttttgcccccagcatgcaaggtcccatgcacactgttgctggagttttgtgtcgggatggaaaggtatttctcgtggatgctggaggaatgcagttcgctcacctctctcaggacaagcggcacttcgagttgtgggtaccgtctcgccagttgccccacatcgaatgccagccgggcagcccatgatgacatgtatacatgctgtccttcttcgatcactaggtcgttcatccatgggggcgtagtacggatgggaaagtattgcggaatactcacaaagttgatgtaaccatgcttaagaaacccttggtgatgaagtgcatgacaggttgcaaagtaattgcaaatatcaagaatttcctgacttgtgtacgacacatgcatttggtgaatgccgggtaccagcacttccttcggtgctccggatgaagtcatggacataatggatcgcaaagcgatcgtcaactcattgtaaccatgaaatgtttctacagtgcagcgtccagacaaacgcataattgtggatggcaatgtatcgcgagtcatcaaccaaactttcgtcacattccatcccatgtcaagtaacgcttcggctacttctaactctttcaccgcatcgcctgcatcagggaacacacaaacgcaactcgttttatgtgtcggtcctccacacaacaaagtttgtacgtgtttcgctattgaccctgcagtgccactgtagtaaggcatgagtcctctatttttgtttaatggagggggcgtaatgtacttacagatcacggatctcttatatgcgtacatcgatccccgaaaacagcatgatttcctttttgttttgttctcctctctctctctctcttacttcacacacgacctcctttctataagcagcatcattcatcgagcctcgagtgcagtatgcggcttacgcccgacagcatcattgatggggattgcccagaccccgatgtctgagtacacactcgaggttggcttacctatcggatcgatgggagtgctgtcaatcaaggtagccgccaccgcttgcgaagacgagcagttcctctgtcaaaagaggaatcgtcagacgaaagccgccgtctcaaatcgcaaagtttgtttgttgtgactctcatttgctgcgcagattcgccttctcctctcgtaacaacgaattcgagggaggatcagattgttgagtgagggaataggtgaatgagcttagcttggtgttcaagagcatgtatcacacgagggctctccacttgtacacacgttccacccaccaatccattgacccagggggctacttgataggatgcatggggctgcacagatctgcactggccgcatgggctgcatggaacagactgcactgggaatggtaactgcatggtactgaatgtggaatgaggcttctcatgggttgcagttggttgtcataggctgcagttggtcgtaacttgcccattatgtgtgaggctgatgagcccttgcactgtttgaagatttccaataaatttaaagtaattaaaaggctctgccttaggccttttattaaaaatatttctttgtgatcgtattacaggatggagaacatgcaagatgatgagctcgagcgcgcgggtaccaaagaggctttggtagaacttgtccgtaggttgcgcaagaaagtgggcaatctggagagccagctgaatgaagtgaggtgcgaaatatatattctacgtcgagtgattgtagggagggcacaatactcatcatgttcctctcaacacatgttcacagcccggagcttagtgtcttgaggaggttcgctggccggacagtcccatgttctgatctggatgacgacatcgacagggctaggggcacatacggcatggtggagcgccattcccaccgccatgccattcgggaaaagctcaggggttggggagtggccatggttcaaattgaccagcagtcgcattaccagattccgggggatgtgtgacagaggcatatcctacacgtgtgtttccgcgcgcccatgaaagactagtgtaaacaagtcatatccgacacgtatttccgcgagtcatcagctgaattccactgccccgtggatttctacaccattaggttacaccgtaaggtgtggtgccgtacacgaagcggtttcattttagtattccgttgaccgtataaatacgcctgagtctttaattctatcttaattcacttgtaaccccgagtcaagagtcacccctggagtcccgtctcttgtcccagtctcctctacgtgagttgtctttgatcccccgcatcgccctgtcggacatatccttttcgcgacccgagaccctgatttgccaagatttgcctgaagaccccagcccggcccgcccccagcgacatatccttgtcccgacctcgagaccctgaagacccccccgaaagcacgtgctcagtgtgtgttacactcagaccggtcaataatgttacagtatattgaatcaattccaattctcattgtacaacttggacagacggtcgattgttgtacacatgtacacattgctgcaaagtttgaggagagtggctatacttgcgaatgtaagccacatgacagtctcgaggtggatctcaaaccccactaaaaaagtgtacaaacggaataaacctacaaaatcggatgtggtcatagagttcttaaaggcgtcattaaaaatagatccattcgcatctcttgctggtcttcgtcataaggtaaaggatgctttcgaatttgaggtatcaaaagagttgattcgcgttgtgataaaaaggcttgggctcacaaagaaaaaagcaaagttcttctccaggcctgataacttatatgagaaaaccacgtcattcataagccaaagggaacggttaaaagaggaagggaggacttttgtatcgatcgacgaaacttcatttggaagacatacgagagacgtgtttggctactcaccaaagggagagctactggttgtaccgaggtcgagacctagggtgacgacaatgtcggcactttgtcttattcaacaaggcaaaggagacatttattttaacatcaggcaagggtcttttaacacgcatacttttgttgagtttttagaaaatttggactgtccaactgacacagtaattatacttgacaacgtggcgtttcaccactccaagaaggtcaaaacacttgcagcttcaagggggtgggagctcctatacactcctccctactcaccttggttcaacccaatagaaggggtgttctccatcgtcaaacgcgatttctataaaagccaagatgtgtataaggctttgagttctgttaaagagaaacacgtagaggctttttttcgaaagtcattgaatacaatttctggaccttgatacaaggaaatagcgacattggctactaaatggagacgatagtcaataaagagcctccggacaagcgtacgcgaccggaccgggcggccaaaattaaggacaggaaaaacggcgaggagaacgtggtaaagtgtacactgagtcggatcatagcggataaggacaacaaggacgttatcatcaaggtgattaaggagcgggtcgacagcgtatccaagaggacttatcttgccggtgttgcggtgaaccggatattaaaagaagtcttcgaaggggtaccagatgcgcaactgcacactgtaagtgtccctagcgtcgaccagaacttcattcggcagcttatggtggggtcaagacaggtgcacatggagacgagggacgccacagtcgaaaggttctttcacaacaactattggtttagggagaagattgagggacgcgaggtaattgtgaaaaagaagaaacaatacgtgggtgccatcgctcgctacgatggcgatcgaaacctgtacagccacgcgtcgaagaagtacctgaccaacttcaataaccactacagagtccatctctccacatggatcaagaagttcgtttactcgaaggaaaacaggatcttggccaaggagatcaaagatgagcacggcattgacgagaccgtattccaccgatacctcctctacgatatccactcttggggagtaaaggaagacctcatagcgatacattcgctcctactggagcgaacaaagatgttgcttaagattcagcactcgatcctcagacgggacgagatcaaccgacagttgctcaagagtgtttccaacagcgccaagatgatccggtacaacgtctttatcgatcgatacctcgaggccacagaggacgaggtctacgccaagctggtcaacatcgctcccatcccaacaatcaagcacgccttcatcacgatagacactgacggcctactgggcgtcctcaaggacgtgggtctcatcgagagtctcaaaaagacgctgacgaacaaggagcactgggagtcggtcttcgatgtggaaaacatccgttctactgggaaaggtgtgtttacatgcaccatagacactgacggcgtaatggcttgtacccactttcttagggccgagaagaaaaagatttcaatcaaggacgacggaacggcgattaagaagcagaccaagacgctccgcgagttttccgagtccgactccaatgtggtggtcgttgcaaacgaccctggccgctgcaacattgcctttttgacttggaagaaaaataaggtcgaagaaaaagataaggggggtaggaagaggaagaggcagtgcgagttcgggagcaagagactcacgcgggagcggtactacgttgagagcggggtcttcaaattgagagggccgaccaagaagtggttgtccaacatccaggactgccttgacaacctgaaggacaacagtcccaagcgcacatctctagtgtcgtttgacgcttacgtgactgtaatggtcaaccattgggattctcgatggggggagatgtccaagtcgcggtggggcgcgcagcgcctgcggctctacggtggcaagaaacgtgtcttagcacgcttcttcaacgaggtccaggaggatgtcggtgagaggaaaacaattgtcgtcgcatacggttctgcttagatttcccctggtggcaagggtgaactttctgtccctacaacgagcgcgttcaaggcgtttagcgaccgtttcaaggggcgagttgccgtcattgacgaattccgtaccacaaagatctggcacaaggacagcaccaccgtcctccagagtgtgcagtccgaaaaagaagggcgcacggttcgaggcttgctatggtgcagttccaccatggagaacagcaagttgtttgtaaaccgtgacctaaatgcagccattaacatccacaattgctttacaatgtacccaatccgccccggaattcttgcgaggccaaagaaatattgcaaactggaagttttggtaggacgccaaattgattacaagctgacaggttctttacagaacgcagtgtcgagcgaagtgtagaagataaacacatacaagaggattttgggggactcgggatattatgtaacataattcccttgtccgagtgtacagcgcccatgaaaatacgagtgtaaacaggtcagatctgacacgtgttttcgcgcgcccatgaaagacgagtgtaagcaggtcagatccgacacgtgtttccgcgagtcagcagctgaattcctgtggcccactctgtgggtcccgcgattcctctttcatactcccgacatagttgtcaagacacgtgttcagcgcgcgccctacttgacgcacccagtccaagccacacacaccccagccatgtcaatcttaaccaagtaccgactccaattctttgctcacgaagaactcagtgtgttagggagcatccagcgaactccgaaagtagctttgcatttcagtgagtgaatttggcgattacgttacgtgtgttgttgttgtgctggctctgttgagaaaatcgtttcgttttttttcgaaacgtagtctatttggcgcgcggggtccgcgttgcctcatccgcgtttccgattcggtccgttcccccccctatttgttgtttttatctgctaaaaatccgttgcatttccatgctaaaaaaaaattgacgcctttttccttcctttgaaaccacaacaacaacaacaacaacaactgataaaccccaactcaactgatatcatgtctaccaacaacatgtctacaaacaacatgtctaccgagatcacatcattcgtgaatgatacctgtatattaaaagttgtcctaatgacggaccgaacgaagctatccagcaaacccaccgtccctcaattgaaggacatctgctacaagataatttcatttcctcgcgttcctgcgtgcctcgcagaccctgtctgcgcaatgaaaattgcgcacgctaagtttctcgaagattcccccggcgcggagaaaaagcctttacagctaatgcttctccctgttgccgtcgctgctgcgaatgccgtcgcttctgcttctgctgctgctgctgctcctgctgcttcctccttgcttgccctcgccagtgcccttgccctcccagaggacgacgtccccaccgaggacgtttgcatgtcggaggagagttccggtggtaccaagcgcccccgcaccacggtgtcactctctgtggctcctgctgctccggctgcttctactgctgcttctgcttctactgctgctgctgctcctgctgctgctcctgctgctgctcctgctcctgctgttcctgctgctgctgttcctgctgcttctggtgtctcgttttcaacgggccccccctcctcctccttggcctccggtcgtgttggtcgttgcggggggtccgttctaaagaacgagcttcctgttggctccaaacacggcgatctgaccatcgtggggtactcccccaccctgggctgcactgctgtcaccattcacggcaacccgtgtggtagaaaacaggtgctcttaagcaaccccaatggtgggaccttcaccactggcaagtgcgcgcacctagcgtgcatgaaccagactccctccaagcgtgaggcgtacctcgccaagaagctcgctgctatcaagctcccaattgagcttcgctccctgtccctcagccagcagctttagttatatagatactcagttatttagatactcttttttttgctacatttcttagagacgagaaaaaatggtcctgcctgtatgtactgtactatactgtactgtaccgtaccgtgtgaattcccccctccgtttgcgtgcgtgcgtgcgtgcgtgtgtgaggatgcggtcgggcgagcgctctttacacatcccatccatcatcccccttttgtttgtgattcgtgagtgagtgagtgcactactgtggattttgaccacctgattccttcaccaatctgaactacaattgtgacgtgtttttcaagaatcatcgaatcaagcggcagtcctgccgcctttttgttggctctcagagtgtctcaggtcattttactgttccgccgactgttttattttactgttccgccgactgtagatggttacaacttagtccctgtagaatggtccaatcacttccccatcagggtatctgttgaatccatacaaaaaagcacgtggctcttcgttgaccaaggtttgaattgcaatgtgtgtgtggaaccgatgctgattatctaactctaagtggattataagcacttcatgtgcaaatggaagccttagtgtaatggcgttggaagttgacgtaatatcttggacaaacttggaggcccagtcttggtccataacatgcatagaccggtcaataatgttacaatttgaatctctatgtagtttggccagaatatgtgttttctcattgaaccgcatggggcttgaggagtggcacatccaagatgaagaggcaatccccatcgatgctttcgggcgtgagccacaaactgcactcgaggctcgattctgttgatacagtcgacggaatactaaaatgaaaccgcctcgtgtacggaacacacaccttacggtgtagcaacccacagggcagtggaacaccaatacgattttgaatcaacaaattgcaggatgttaacgagaatatcgtggtttttttttagatcacggctctccatcctgcagactccgtatcgttcttttgtcggtactttcgagagtgtccattgaaggaccagccgcagtaccgtggcccttcctggaccttccccagtaccgtggaccttccccagtaccgtggcccaaaagaacacggggtctttgttgatgtgcaatgcgtcatgtaaggaggtttctttgctggacgggtcatttttgctgcgcagacatttattcacattcacgaagaattcgaggaccagcgcgcaccaatctggccgaaggtgagtcccccgatattggtaagcgaccgactcgaggacatgctgaggggcatgaggatgcataaagctgcatcgtgttggtttacatacagaatgggtgatgtcatgaaaactgcctcgcaaaacctacactccgtccggccaaacgggcaaaccctttgtcgtgtagattccaagcaggacatggcaaccgacgaccaggagcccccccctgcatgggccacgtccatgctgcagcagctctctaaacttgagcatgcagtgtctgacatcaagttggacattttggagatgaagtcatctatcaggttggcatactgtcgtcatcttgggatgatagatatccttgtacataacactgatgcttgcaccgcgctgcttgccatgcgcaggaacatgggctcgtcctccagcatgagcatggctgagatagttgccgattacgaggtaaacaatcgtggagaaggactagtcgggcctttcgggggcgactgccagtttgctgctagggctgctggagaattcttctcaaagatccatgggctgatgcgtgcgataatggtcactgtcgtaatgtactctccgtcgggcgccaccctttcattggctccaggcatcaacggcacttctcctgtcaaagacagaaccgtcccagatggtgctaaaccgtacaggctgacagagggcagttgcgtttggactcagtatgatacgcaacacccgggcccttgcaagggatacgtccactatgttgccagtgtggtcactctggatggtcacaatatcatggttgactggggtattgctcaatttgcaaagctaccgagcgacatgatgatgtttgtctgatgattgcaaatccttgttgaccgcattagtgcttgcacgcactgcatggctggtggcatgatgtggcatgaccgtgttggaatgcatgcatggtggtgaggcctgtggtgtggtttgagagaaaggcgattgtttacatcaagctccccttggatgtcgggtaccacacttgctctcgcatcactggcttctgttcttcatggctgcgtccaatggcacctgcaatcagcagcattcacaatactgacgtgcgcagccaaaacatatagatgacatattgtcattgctcattgcatgcacatacacctcctttgcaggatgaccaaatacaccgtccttgctgttcatgttctgcatggtcacgcgtacgtttgggcaatgctccttgagcactgttcccagtttgtggtaagtcgtaagctgtcccactgccacccacgcgtccatgaacttgctgcctcccgctccgccccgggccattccaaacatggtggacgcggcaataatgacaccattgtagtcagcaatcgaatagggaattgatgcttctgcaatactgctagatgcgtgttgctgagaatattcccactctcccttagccttggctctggactcgtaaaatgtcaggctgggtgcctcgttgttgctggggtatccctcttcctcgcacatgttcagcacacgaacaaacgtgccggtgaacccttgctgtgctacgatgtcctcgatctcctgtgctgtaatctgctgcccaaacgaacagacaagggcaccatgttgcgttgaaccactccacgtcccatggccacagaatagcagaactgcgacatccgtgccgggctgcaggagatgctgtatggcggctctcaggtcccgttttggaacctcggaagtgccgcccataacgttgcagctgaatccttctcccagcgactccttaaaacgctcaacatccgttgcaaaacccgtcgtgctgtacgtacggaggtcgcgggggagcagagccgcctcctctaggactcgcgtgaggcgcgcctccaggttcaaggcgtagctgggtgagactagcaatgcacgcttcatcttgtggtaatagtcttgggggggatataaataaatcacagtcctgcgcgcacaacaccaatatgcatttttagaactcatcaacaatgatagataacattgactgcagctgggtgttgtgcaagtaaagcatctagttcagcgtcgccatccatgacctgcaataaagaacatgaatggatactttttatacagattgcagccacgcacgcgagcaaatctctcaatgtcgaacagcgcagcgacacatgcgatgcgtctaacaaatcagaattcggccatgcagatctagtcgccccatgcatgggatcatacagtgcgtcagcagctgaatgcctctgccccgctccgcggtgcccgccctccccccctcaaaaactcaagagagtgtcaaacagacgtctgcttgaggagagaccacctgactgccttcatcccctttgactctgtgtgtggtgtcttggcaccccatgtatcatccgcggcggtgcgtgtgagcagacacatcgttactgtccccgctttcctcgagatacttgtggaacaaggcaacgctcgactccctgaaatcttcctcaaactcgcagttctcggcgaggaacgcttgcacaccgtcctgctccgccaaatattcgatgacgagtggacaaagagaatgcaaaagccgccgtggcatgtggaggagtatggacaatgaggatgcaaaagccgccgtggcgtgtgcgagaatggaagatgggcaagccgccgtggcatgtgtgtaaacaatctcctctccaagcacacacctgtttccaccaccgtttaaaccattttgtctctgttgtcattgggtggtggtgtgtacaatgagaatccaaagcgttacagtgagaagccgaagtgttacagtgaatggtgtatgtgagtcagctccgccatatcccatcagaacacactatagcctctcaatagcttctggcgcctggttgagcatccggccaagcgcatcacaggcgtcacatgcgtcattgaacaaagggaaaagcaaacccctcaggacggggccggttctcgtggtggcattcaccgggaagctgacgtcccattgtccatacgtgttgtcagagtctcagccatggaatgtagtgtttggcaaaattgcggagagtgtttgccgtcacgccccctttgataatgtactcggttgtgcgctccttgatagcccgcagctcggcaaacatgggatccaggaatgtcctgtcccgatcccaatacacatcgccgtcagaaggaggttcctgcatcttcttctcaacgtatactgtaattccatccaacaaggctacaagcaacgctgtgccggtatgaaagttgtagcacagatcgtcctgactgccgcccggcagagcagcagcagctgcagccattaagtgagcccgaatatggcggagcgcattgtgaaaggaacgcatgacaccggggtcatttagcccggccaccggctcaaacaagtctccagccccctgcaaaaaatatgcaagagtcagcatgttctgttttatttcttgcatcattccatcttacagttgttctcaaattaaagtgggacaccctttataatcgaacttgcaggtcgttgctttttggcgacgttgggggatcctcaaaaaatatttgtagtgaaccacggacctgtaagagggttgatcacccgtcccgaaacgcaccagaatgccgccggcaaatgcctgcttcgtgggcatgtctacgctcggtcacgccccctgcgaaatacagaaatgcatgcaaccctacagtcagtggaacagtaaaatgaaacctcccaataaacggtatgaggcggcgacagacgttatagtgtgcgttttgccatccatgttcgagatgcacaagcgtgcgtggatgcagaggcgacactgctcaggtacatgcgcggtggttacgattccagaatccagtcacgaagagatgtgggcacatcaatccctattttaaacgtgttcacatgaacacctctgaaaagactctccatctcgggaacaacaattatttcaacaaaaaataaatactgaagaaagccggaggctcacatcaatccctattttaaacgtgttcacatgaacacctctgaaaagactctccatctcgggaacaacaattatttcaacaaaaaataaatactgaagaatgccggagactcacatcaatccctattttaaacgtgttcacatgaacacctctgaaaagactctccatctcgggaacaacaattatttcaacaaaaaataaatactgaagaatgccggagactcacatcaatccctattttaaacgtgttcacatgaacacctctgaaaagactctccatctcgggaacaacaattatttcaacaaaaaataaatactgaagaatgccggagactcacatcaatccctattttaaacgtgttcacatgaacacctcagaaaagactctccatctcgggaacaacaattatttcaacaaaaaataaatactgaagaatgccggagactcacatcaatccctattttaaacgtgttcacatgaacacctctgaaaagactctccatctcgggaacaacaattatttcaacaaaaataaatactgaagaatgccggaggctcacatcaatccctattttaaacggaaaataaacaataatatgttgacctcaataagatgcatatcgataacttgttcaaggtgtgcgacaatctttacctatcaggccaagaagcagctctcaaccaccaactttgtaaaacgttgcaattcaagcttgttgtgaactgcacaaaccacacaccgtacataaaaccaaggaaccccaacacaacatacattaaggttgctgttgaagacaactgcaggcaaaaagaggtcacgaaactcacatcccatctaccatatattgttgaggtgatgcatggagtgttaagtcaaaacaatgtcgtgcttgtgcattgtcggttgggaagacaacggtctgcaacagttgttgctgcttatctgatgtgggaaagatgcataacgatgacaaatgcgatcaagcacattcaaaggttgaaccccgccgcattccaaccagaagccaactttcaacggtcccttgaaatgtttgaagttcacctgaggggcacggtcatccatggcggtgcatccttgtcccatcacgatgacaaccatgaacaagatcagcgtgaacctggggtgaagatgctcctagtgagattcgaacctgcgcctctaactccagtgcctcgttttgggtagcggacctgcgtacccggatatttatagcttttgtaacaaaacaaaagtttggaatcgccccatgcatgggatcagacagtgagtcagcacctgaattccactgccccactccgtgggtcccgcgattcccctttcataatcccgaaatagttgtcaagcagacttctgcttgaggtttgtttctgtagaaagaggagaacgttacacacacatcaaaacaatgctgctactgtagagagagagagggaacgttacatccatctgggggagagggaggacgttacatactcagcaaaacaatgccgagacctgtatggatcaaaagttgtttacactcgtttttattaaaacaattgtttagttgctaatctgtcatcggggttgtagctcagtggtagtgcgtgaggttaagccaattttcttcattccttgatcatgtcgcccactgatgggttcgaatctcggtacctccagtgttttgccaaagttccaccttcagttaatcaagttacctgagttaattaatttaactaagttagtcaatttcctggctgcggatatcttgactgaagacgcgtccaccgcgatccacagctgtcacgatcatacgacgaattgtcacagatccaagtgttgttccgtctttcatgtcaatgttgatgagatgcggtatccaggacgaaagtctactcgcgcacatagtggcctgctgtatgtctttcaacaccttggcatttccagttttggcaggggctttgatgattttcgtctccaccaagaaaagtgtgtttatagcatgtgataatacaaggggggcgtccccgttggcgcgcttgaagcagccgtcatctaagacgtactccacagcaacgaggaacaaacgtgacgatggggatgtgtggtgtttttgtttaattaggtggcgcaatgcgttatactccaagacgcttggatcgccggaagtagccgatgacgtccgcagtgcattgagacgtctgactcggcagtggaggcgatcaataaacttggatgtgtcgagactgtccatgtccagcgcccttcctattttgcggactgggtttgaaatgggctgacaaggttgtgtcggcaacgcgtcgatgaagactcgtttcttcgcgcatacgtggatgtggcaatggttcttattcgtgtgtgtatggctgtaatctgtatggattttgcgttatttgtagatggaagaaaggaaaggaggagggtggtgtgcgaaggacgcgctagggaaaaggatgaggaggagaataaggttcgttacagggtctgatgcgttgtttacaccacttccacgagacgatgagtggcgatgatccgccaccgtgtgtcatgaatggacggacggacggtctccatctcgggaacaacaattatttcaacaaaaaataaatactgaagaatgc

SEQ ID NO: 253 - DNA, 20930 bp, unidentified
  misc_feature 1..20930: note = Fanzor polypeptide
  source 1..20930: mol_type = other DNA
ttgggaggttgcaacagtagttgcctcgtttgctttccgaaaataactaaacttcgaaacgctgtcgataccaagcagagcccccgtattcatggaaaaaatacagagaatggggtctagttgacgtggtttttaagttgccacgtggtttcgcacgatgaaaggcacgagcacgtgactgaccatgtgattccttttcctctggaggtgttcgcggtatcgctctgcgatcactcgaactgccttactgacgcgcagccaagacatgcaaatcttctcgaagaagacttcctggatttctgtatcaaagtaagagatcgacagtgtatcggagccaaataagtcgatgttgatgtccaatccagatcgggtgatgtacatcctctccattattcggtagatggttggattgtcttcggacacaaacaaggctttcagcgcaaacaatttgtgtctgttccttttgtccatatacaatatggagtcaaagcattcagacatgtccattccatagatctgattgtccacgaactgagagaacgctgggaagaaagcgtctccgaatgtgaacaacaaagctaatccgttgggaaagataatcagagacggatcttgtgatttgtatgcagcattagcaagttgcaaccatattttctcaccgactgttgacattattagttatttaacgttgtggatagagttgggttggttgttttattgctttgctcagatggaaatggtttcaattttttattttttaggtaatgcatacagtcaaacgcccccagtagtgtgtctcatgcttgatatgaactgtgcgttatccacacgaagaaatcaaaacataacaaataatcaacctaaccacacttgccaagccatagatcccgtaagtgaaccagaatacaacatgagggaaatagcaaaacagtcaattctgcttgaggaacatctactcgtcagagacaaatactgcgcagactgtatcaagaaacatttcctacactgcattggtcttgctgaagaagcggcgatgctggtgtgtgggaaaaagcaagggaaccatttaccatacttaaacgaagcaggaccgttttacaaagccaaattcaatgaatggctaaaaaaatgccccatgtggactcaggaaagcgcgaacacgagagtgaagattgcaggagaaataagggatttcaggaaagctatagtgaacgtgtacgcatcatgagcgtgattttttcaagaacctgtccagctcgaagcggtttcattttagtatttcgatgtctgatcgcacactcgaggttggcttacctctcgaatcgatgagagtgctgtctaggtaagacgagcagttcctctgtcaaaagaaacaatatgttctttgttattgaacaataaagagaagctttaagcggatgtaggcaaagaagagtcaacatcagacaacaaacaatggacgttgtacgcagaacaattatcaacataccatcgtctttcttccgctgaaaaattatctgcatccgcaacagtaatagaccgcaaaatacgcttcaacatcttagtcagggtagcgttattcgccttcaacactgcaagtttttttctagattctgcaagtttttttgtatatttaatatgagatgataagatacttatagtctcgcgttgagattctgcaatactatttctagattctgcaatatcttttctaaattctacaatctccttgatattatcatagtataacataaccatagtaacaccaatggttgaaatggttgagaaaaaaatggttgagataccgaaataagagtgtatacccatctctgcttaaaactaataaaaatatataaatgattcatacgagggttacacgggtttatgggcgcgccatgttctggttctcttgttccaaagggccttgtctgggtctggttccctatactactattataatatccttaaaaagagtgtaatagtgtatatgtgtgatggaggtctaaacgattccaaaatgatcctctccctattgtcaagcagaagcctgcttgagacaagcgatgtgtgtgggtgagtcatctgttggcgtggagctccgctttgactgcttttgcagtgtaagaaacttattcgtaaaagagcatccaacagtgcatatcgtcgtcgccgtttacccaacggtgttgaggatacacgcatgctaagtaaccaatgccaaagttagtcattgtgaccatgtgtgagtagccgaagctgctgctcaagaggatgcgtattcccatagcggtgctgatacggtcgatacttggcttgaactctacagcaactgtgcagagccatataaggagttgggcaccaggatggtgcgctccatgttggttgaccatttcacacaacaaatttgtagccgcctgaattttcgctttacttgtatcgcacacatggtcgcaaagtctattttgcagtccatccacgccgtttatgtccactaacctaccatcactatgcgagggcagtgtctgcgtgagtggtagcactgcttccgcagggacatccaaggtaatcaattcgcatactacagtcagagacagaatttatgggacacccttaccggtgacccttgaacccaattgattgggtaggtcagctaaaggttttgtatcaaagtcccaatccttcgtgtccttcatcccgtatttcagcatttaagctggcccagaggataacaattgtaagctgctaactgacccaggtgggtcggttggttgagcgcccacatttgcctctccggaaactgtggtttttggggtgggcgatgatgagggcacacaaaatgtcgccggtcgctctttcccgtccatccacgtcgtcagaagcagaagaaggttcttggcagcgttcacgtctcggttccaggttgcaccacagcgcacattggatgatgcgcttttgacactgttgcgacagtgcagtactttgtggatcttgacgttcttcaccaccgtcttctgcttctcaatcgttgttgttgttgtaggagccccgttgatgagggaggggggctcgttttgaactctgcgccagacgacgctgtctgccttcatgttgatgagcttctggaagcagccgtggcaggtacaagaagtgttgcgttcgtcgacgtttttgaacagaacattctgacgacgtgaaaggcacttcctgatctctttcacgggtccagaacaagaacgactgatgccatagccctggttggaccagttgccgaagccaacaatggtcttctgtgcttttggagcaatcacatcgcatacattttcttcgatcgtcttcttctgtgcttttggagcaatcaaatcacagaccttttcaatcgtcttctgtttacccacataccgaaagaatcgcatcgatcggtaacctctgctggctcgatgttgaaggagtgtcgggagagcgctgaggtaacctctgacatggtcctgcatgtcgtgcatactgctcgtagtcggcgatggaatggacttcacgaggtcttgcgtatcgacattccatttgttggtgcgacgattactggtattgtacccagctgcttcgctaaagcgggcagagctgaaagactcgacgcgaccggcagaagatgctacagtgacgatatctttcatacccgggtcgacaccgactcgcagagaagcgtcctggcagtcttcgagaattgcgtctttgggataccccgcgttatctacagcgacatcttcactcgcctgatgcttcatttggacggagacccccttgccgtcgctgaggattcggttgtcaaaacgagaccctttcgtctcaagtccttggacattgaagtactttctccacaacatggaatgattctcgtgacgtccatcgccacggaagctctcgagcggcgaatcgcccatgctgagaagcttcatgagtgtcatggacgatataaggacgtaagaaatggtgaagccgctcttgcgtggaaggatactgaacagacgggggcgtttttttgttgttttctcttttagatccgctcccaactctgtaagcacgtgatgaaacagtctcattgtcaggtgcgctcgagtgttgaactgcttcccccttggcagcggcaagagatctctcaggcgtctgacaacgtctttgatgaggttcgcatgcacgagactcgctgggatgattttgtcgatatccgactcaggatactggaccactgccttgacaatcttattgaaatgtttcttcaacgagggatgtttaaagcgcaggtacttgattacaaccctgtccacgtttgcccagacgctgttgcatgccatcgtcgccatttgtattgagacgtctgagattacctgtccccattgacgaacgtccacctttaagtagcctgctggcctgagagcgtcgaaagcaaccatgctatccttcaagctttgtcccagagtatcctttcgaacgttggatgtcgagacagcaaggatgcacctgtaataaaagtttcgatccaggtgcggcaactgcttcacgtcaaagtctacatcatcgaggcatctggtgatatgaaaatttgcgaataagtatgcctctgcaactgcgtggttgattacgagtaccatgctttggatccttgagcagatttgctgccttgatacatccatgcacagagaattaagcgtcttcttgaccaccatgatgtccagatcgtcgtcgtcatctccattgtttgtcaccacccccatcgagatggagggagggagtgttcttttcttgtcttgatatcatcatgtactacaatttccttataccataatacacgaatttatggacattccatttaatgttactgtaaaaaataatagtggaattgaacaattatatgctcgtattgatagtttcatgaagactagtcgaatttgatagtcatagaacatggtgtaacattcaacttccttgtcacagatttactgagctcattccttctctttctagtcagcagctgcgtattcccatcgattttatgaatcactttgttccttacgttatcgtcttgtaatcgtttcttctggttctctttttgagtcctgatcatgtcttcgtctatgactttgtcattatcttcaacttgtatagaccttaataccttgagatcacatggttcggcggctgaatgcctctgccacgctcgcggtgtactctctcaagtgccaagaacatgtttaccatctcaatagcgacaaccgtctggacgtcattgaattgagaagtgtttgttgacatttgttgttgttgctattatttattacatgctgaatgctattgtttaaactaacgcaagtacatgggcgatgaaccaaattttgccaaggcgagagtgcttgaaagatttttttttagggcggaccatatttgagagaacacttggatttttttaccatatttgagagaaccgcatgtgccgtgcgcgtgcgcgcgtggggatgatgcttgacaacgatacgccaccgcattgccgtgtcatgtggatgatgcggattgggtcagcttaaatgctgaaatgtctctgattgtacgagaggcgttttgggctactactacattgtactcaccaacgggagtgtaattaattctttcaagagtctgcgtcggcacacaacataactagggtttgtattcacgtgtctccatgtttcctgaatagtcgctgcggctctgcgtcttcgcactaaacggcacgcgtcttggacggataccaacatgttgcggtttctactcaataaatgccagtcccatggtttgtccgggttactcgagacaatgtcccaagtggctactccgggattcgcactcaatccaagccagttccacggattgtccgggttactcgagacaatatcccaggtggctacactggggtttgtgctcaaataataccaatcccatggtttgtccatgttactcgacacgatgtcccatgtggctacactggggggtgtgctcaaacaataccaatcccatggtttgtcagggttactcgagacaatatccagggtggctaccccgggattcgcactcaatccacaccaatcccacggcttgtccgggttcgtcacgacaatatcccatgtggctactccgggattcgcactcaatccacaccaatcccacggcttgtccgggttcgtcacgacaatatcccatgtggctactccgggattcgcactcaatccacgccagttccacggcttgtccaggttactacacacgatgtcccatgtgacattggggtttgtgctcaaccaataccaatcccatggtttgtccaggttactcgacacgatttccaatgtggctacaatggtgtttgtgctcaatccactccaataccatggtttgtccaggttactcgagacgatgtcccaagtggctactccgggattcgcactcaatccacgccaattccatggtttgtccaggttactcgagacaatgtcccatgagattacactggtgtttgtgctcaaccaataccaactcaatggtttctccaggttactcgacacgatgtcccacgaaatactcgcgtttgagctcaatccataccagtcccatggtttgtccaggttactcgacacgatgtcccacgtgacgacactggcgtttgtgctcaaccaataccaatcccatggtttgtctgggttactcgacacgatgtcccacgtgacgacactggggtttaagcacaatttactccaatcccacggtttgtctgggttactcgacacgacgtcccatgtcaggtatggattatcactcaagtgaccccaatcccatttgcattctccggcttttactcgatccagtatgtgactgttaatttcgatgtcgagcattatataaattctcacggttgtgttgttctcaaataaagtaaagtgggaccattctttatgtaaagaagtaagtaaagtgggaccattcttttacactacagtcgacggaatactaaaatgaaaccgcttcgtgtacggtgtaacctaaaggtgtagaaatccacggggcagtggaacaccaatacgattgtgaatcaacaaattgcaagatgttaacgagaatatccattgaaggaccagccgcacttaagcgatcgcctcttccccggtaccgtggcccaaaagaacacggggtcttgatcgtgctgagtttcctgttgaaatattcgcatgtcttgaagcgttctttggcctccttcagcagaaatgcgctgtccgggccgttcacatttccaaaataattttgagcatgtagggaagggaggatgagtgactttgataatcgtttgcggcagcttgaggcggactacaaagtgttgttcgaggaacaggcaaaccagcgtcaggatatccaagccttacgggatgccacgtccacccagatccagcgtctggacaaggagatccaagcagtgcgggatgccacgtccacccagatcgagcgtgagttggaaacggcatgggccgcggcgtaccatgaactgcaagggatgttgaccgatgctcagttgacccaaggaaaactggcaacattcggcatgcacaaactcacaccccatcttgcttgttgaaaatccttgcttgccatctcatggagcagcctcctgcacgactcgctagcttgagacatcagcaccaaggaatcacaaatccgctccataccatgtttcgcaaccagtcaaaatcggccgggaggcaggaacgcccattcattgtcaaagctttgcatggggggggggagttcatgaatttgcttggtgtgtttgccttgccataaaaataatgagagcggtaggtaatgtatacctgaaaaatgcatacgtattacgtccgtgctatatgcacgttgcaatatgatcaattgatagattggtttcgatcgcatcctaaaaatatatgctggcctctgcagatgatggactggggtgacgtgtttccagatctgtacgatgttctagacattgatgagggtgctgttgatcaagaaattctgagggcgtttcgcattcaagtggtcagggttcatcccgacaagctaggtcctttggcatctgaagatgaacgaacagcagctgccctccgcacacgagttattctgcaagcgaagaacgtgttgctgaacaccgaaagccgcaaggaatatgacagtgagcggcgaatgagaaggcaaggggagcagcaatccaagtctggttttagtccgccggaggaggcatctgctggcatggcgcatgtttgggaggtctgggccaatgttgttgtagaagggtttgccaagcagtttgaggcaggagctcgaggcgagcgagtggtgcagcttttgggaacgattctgctgccagccataggggtgggcttgggtggggagagaggcttcaagctagggctgacactgtctactgtcttcaataccggatgtatttctgtggtcgtgaaggcgctctcttccgaggaccaaaagttgtttttccaggctctggaagtgttgtgtaccaaaatgccttgagtaatacagttgttgagaaaagtccgcagctgaattcccctgtcccactccgtggggtcccgcgattcctctttcatacttgccatttcccgacatatttgagaattcccactttatttgagaacaacataaaggagcttcttcattgatctaataataattttgacgtgaactgtcaaaatgttgcaagaagaatatgaaagagaattacgtgtgttggtggaaaaaacatcgacccccgtccgaagcctggtaggttccatcaccaatgacttaactgtgacatagtttagcttgaaatggaaaatactcgaaattcttgggtatgacgtccaggtcattcatgtaagcgagtatggttgcggtagagttttcccctgcccactttcgtcaatcacccgcccctctctccccatccgtgttcatgtggttcagcctttgttacactcagaccggtcaataatgttacagtatattgaatcaattacaattctctatgtacaacttggacagacggtcgattgttgtacacatgtacacattgctgcaaagtttgaggagagtggctatacttgcgaatgtaagccacatgacagtctcgaggtggatctcaaaccccactaaaaaagtgtacaaccggaataaacctacaaaatcggatgtggtcatagagttcttaaaggcgtcattaaaaatagatccattcgcatctcttgctgttcttcgtcataaggtaaaggatgctttcggatttgaggtatcaaaagaattgattcgcgttgtgataaaaaggcttgggctcacaaagaaaaaagcaaagttcttctccaggcctgataacttatatgagaaaaccacgtcattcataagccaaagggaacggttaaaagaggaagggaggacttttgtatcgatcgacgaaacttcatttggaagacatacgagagacgtgtttggctactcaccaaagggagagctactggttgtaccgaggttgagacctagggtgacgacaatgtcggcactttgtcttattcaacaaggaaaaggagacatttattttaacatcaggcaagggtctttcaacacgcatacttttgttgagtttttagataatttggactgtccaactgacacagtaattatacttgacaacgttgcttttcaccactccaagaaggtcaaaacacttgcagcttcaagggggtgggagctcctatacactcctccctactcaccttggttcaacccaatagaaggggtgttctccatcgtcaaacgcgatttctataaaagccaagatgtgtataaggctttgagttctgttaaagagaaacacgtagaggtttttttcgaaagtcattgaatacaatttctggaccttgatacaaggaaatagatacattggctactaaatggagacgatagtcaataaagagcctccggacaagcgtacgcgaccggaccgggcggccaaaattaaggacaggaaaaacggcgaggagaacgtggtaaagtgtacactgagtcggatcatagcggataaggacaacaaggacgttatcaccaaggtgattaaggagcgggtcgacagcgtatccaagaggaattatcttgccggtgttgcggtgaaccggatattaaaagaagtcttcgaaggggtaccagatgcgcaacttcacactgtaagtgtccctagcgtcgaccagaacttcattcggcagcttatggtggggtcgagacaggcgcacatggagacgagggacgccacagtcgaaaggttctttcacaacaactattggtttagggagaagattgaggggcgcgaggtaattgtgaaaaagaagaaacaatacgtgggtgccatcgctcgctacgatggcgatcgaaacctgtatagccacgcgtcgaagaagtacctgaccaatttcaataaccactacagagtccatctctccacatggatcaagaagttcgtttactcgaaggaaaacaggatcttggccaaggagttcaaagatgagcacggcattgacgagaccgtattccaccgatacctcctctacgatatccactcttggggagtaaaggaagacctcatagcgatacattcgctcctaccggagcgaacaaagatgttgctgaagattcagcactcgatcatcggacgggacgagatcaaccgacagtggcttaagagcgtttccaacagcgccaagatgatccggtacaacgtctttatcaatcgatacctcgaggccacagaggacgagggctacgccaagctggtcaacatcgctcccatcccaaggacgtgggtctcgtcgagagtcttgaaaagacgctgacgaacaaggagcactgggagtcagtcttcgatgtggaaaacatccgttctactgggaaaggtgtgtttacatgcaccatagacactgacggcgtaatggcttgtacccactttcttagggccgagaagaaaaagatttcaatcaaggacgacggaacggcgattaagaagcagaccaagactctccgcgagttttccgagtccgaccctaatgtggtggtcgttgcaaacgaccctggccgctgcaacattgcctttttgacttggaagaaaaataaggtcgaagaaaaagataaggggggtaggaagaggaagaggcactgcgagttcgggagcaagagactcacgcgggagcggtactacgttgagagcggggtcttcaaatctagaggtccgaccaagaagtggttgtctaacatccaggactgccttgacgacctgaaggacaacagtcccaagcgcacatctctagagtcgtttgacgcttacgtgactgtaatggtcaaccattgggattctcgatggggggagatgtccaagtcgcggtggggcgcgcagcgcctgcggctctacggtggcaagaaacgtttcttagcacgcttcttcaacgaggtccaggcggatgtcggtgagaggaaaacaattgtcatcgcatacggttcttctaagtttgcccctggtggcaagggtgaactttctgtccctacaacgagcgcgttcaatgcgtttagcgaccgtttcaaggggcgagttgccgtcattgacgaattccgtaccacaaagatctggcacaaggacagcaccaccgtcctccagagtgtgcagtccgaaaaagaagggcgcacggttcgaggcttgctatggtgcagttccaccatggagaacagcaagttgtttgtaaaccgtgacctaaatgcagccattaacatccacaattgctttacaatgtacccaacccgccccggaattcttgcgaggccaaagaaatattgcaaactggaagttgtggtaggacgcacaattgattacaagctgacaggttctttacagaacgcagtgtcgagcgaagtgtagaagataaacacatacaagaggattttgggggactcggcatattatgtaacataattcccttgtccgagtgtaagtccaccacccatgccatgcattcctttgtttgtgtgtgtcagtcagtcagtcgagtagtcggaaccatcccagcaagtgaagaactactacatcgatgtaaaacgcgaagatgcaattgctggattgaatggcctgttcggagtgtcacgcgaggactcaggtgcacgcctggtggagtacatgccatcccatgaccaaccaggtcccccgcatctgaacatggccaccagagagagagggaacgttacatccatctgggtgagaggtgggaacgttacatactcagcaaaacaatgccaagacctgtattgatcaaagttgtttacactcgtttttattaaaacaattgtttagttgctaatctgtcatcggggttgtagctcagtggtagagcgtgaggttaagccaattttcttcattccttgatcatgtcgcccactgatgggttcgaatctcggtacctccagtgtttttccaaagttccacgttcagttaatcaagttacgtgagttaattaagttagtcaatttcctgtctgcggatatcttgactgaagacgcgtccaccgcgatccacagctgtcacgatcatacgacgaattgtcacagatccaagtgttgttccgtctttcatgtcaatgttgatgagatgcggtagccaggacgaaagtctactcgcgcacatagtggcctgctgtatggctttcaacaccttggcatttccagttttggcatgggctttgaggattttcgtctccaccacgaaaagtgtgttgatagcatgtgagaatacaagggcgtccccgttggcgcgcttgaagcagccgtcatcgaagacgtactccacagcgacgaggaacaaacgtgacgatggggatgtgtggtgtttttgcttaattaggtggcgcaatgcgttatactccaagacgcgtggatcaccggaagtagacgatgacgtccgcagtgcattgagacggttgacattcctgcagtggaggcgatcaagaaactttgatgtgtctagactgtccatgtccagcgcccttcctagttggcggactggctttgaaatgggctgacaaggttgtgtcggcatcgcgtcgatgaagactcttttcttcgcgcatacgtggatgtggcaatgactccaatctcaaaagaatgctttacatatccgtctgtgtggcgtgtggaaagagcgagtgagcgagatagaaagatagagagagagaaagagagagagagagagagggatagatattcgcgtgtgtatgtattttgcgttatttgtagatggaagaaaggaaagagtagggttgtgtgcgaatgaagaggatgatgaggagaataaaagaaaaatatgcattctcggggcgaggatgtccttttatgatgcccggctatcgtacctccagcaatacacaagtattgggcatgcctgtgtacgcaaagcgccggtccctttaatctgagtgagtgatagcagaagtctgcttgagacgacacgtgtttccgcgcaccctcgaatcacgagtgtaaacaatatattctttacactagcctgtatcctttgaaaacccctcgcaaaacagaagccaacgttaagatccattcgcggatccgcgatctgggctttccgggctgggctggtactgacagggatgggtgccatgagatattcctactctgccccattgaccagtatgtttcaacttataacttccctgcgtgtccatcaacatcaacagcgtcacctctacccatttcgtgtaaagagaccctgtcgtaactactgtatgtatattcggattttctcatggagacgtcggtggtcctcgtcccgggccgtcgctaccgcatccgtatccacccgaacctgatgtccggcttctcgcccgaggtcctccaccacccgctgctctgggaccgggtcatgcggtacgagggcatcgacgacgcgttccccggcaagtcctgcggcaacacgagccgcatcttcaccgacggcttgaataccctgtccttcgtgggagtcgacccccactgcgtcgactaccaggcgttcatggcggtgatctgtgcctgccagaacgaatgcacggatcacgggacgacgctgcacgtcttcgaacgcaagccgggcgacgggacgcgtcagctggaggtggttgcagaggtgtccgacgaggaagctgactcagccgaccctgggcacgataatgaatgaatgaatggagaaattaccgtgtgaacgatgatcctacagatgaactgatgcgagaggtcgctcgctctgtgactcgactcgactcgactcgactcgacagtttccgccgtgatgtaatgcgagaggtcggtcgccatgtgatgtgactcgactcgcctcgcctcgacagatgccgccgtccttgatgagagtggtcgaaacacgagtgtaaacgttgttgtggcctaatccccccccctgcatccttacatgacacacgacattcgacagtgttccgcatctccgatacattcgacagtgttccgcatcttgcgtgtgtcctccgatacattcgacagtgttccgcatctccgatacattcgacagttttccgccgtttgcttgtgtcctccgatacattcgacagttttccgccgtttgcttgtgtcctccgataccgctgacgatctcgcttcttccaagcttgatgtgaactgtgggctcccctccggtcgcccacccgctcggttcctcgcggaccctttgtgggggctcccctacggtcgcccccagtcgctccgctgtggggaggtgaaaggggctccgccgcttgttatatgttaatgtgagacggttatcatccaagtgttgtttgttatctttgactcgactcgacacaggttccgccgtcatgtaatgcgagaggtcggtcgccatgtgatttgatgtgatgtgatgtgatgtgactcgactcgactcgactcgacagtttccgccatgatgcgagaggtcaccatgtgatgtgacttgacagtttccgccatgatgcgagaggtcaccatgtgatgtgactcgacttgactcgacaggtgccgccatgatgcgagaggtgccgctcgacaggtgccgccgtgatgctaaaaatcaccttacagatggcaaggcaaccatctgcaaaattgtcatttcagatgacacggtgcgcgcattggcagtcggggatgatgctaactatgagaacgagaaggagatcctcatcgcacctggcttcatgattgctcaagtcaagggaacgcgcaccttcacagacaatgggaatacaattatgtgtttcgacatcagaggcaacggggcttaatccatagttgagcaactgtatctgatatgggatatttattggcatctctgtaatctatacagatcaccgtgatttgaatggaatccttgtatatcttgttccgacggtacccagcaaaatcataatagatgcctaaattaaccattgcatgcctgatttctgcatcgctgttgtcataccaaccggaaattgtgtgcattgggatcaatacatactgaacacccataacttgttgtatccggtctggcacatatctgtgtcgcaaggtctctactaagtcagatgatttgtatcgttgcgagcacatcttcgaaggagggattttaaatgccagcctcgtatcaataacacattttggaaggatgtgggaaaaaatgatgtccttagggagtgcacgccagcatttgtccatcctaccatataatttggcctcgatataaaaaaataaacataaaatatcctcaacgctttggtcctccaattcgttgcgactgcgaatctctcgacagcatccgccgctacgcgtgtgtgaggatacggcatgtgtcgtgataaagtgcgttatcctatctatcctatctatcctatctatcctatctatatatatatatctatgctacgtcgtttgtctacagatacaaatgctgcagaccggggtccgctgtcagcgctcgcctggatgtgcgccgcctcacttatgtcaaccagtacacttcccagagggcgattctgagggttcaattcgtcacgtgtgtatacagtttttcgggttccatataaattacgcatatcctgtaaaaaatgtgtttttttcacaaagatcagaatcagagagccttcaagaaacgagttcaataggttcgtaacaactttacattacaagatgcagaagacgtattccagctgtttcaacaaataaaaacaccgaccctgtgggataaagcaatcatgtacaacttcctggatcgtattgaagaactcctagaaataattagatataagcaacacccttactgggaaacaacaccttttcatctcattacactcgacggaatactaaaatgaaaccgctttctgaagtgtacggtacaccttgcggtgtaacctaatgttgtcgcgaccaccggagggggaccgagtggtgtctacaacaatacgagtttttattcatcaacaacaacagagctgctgtgggcaaatggaagaggtcgtcctagacccatcaattccatgcagtgcagccttgcgattgtgagagcagaagagcgatcccggtccgagtaaatgcatgtttctggagagaatcgcagtcctcgtacctctgggtaccgctcgatcgatttttgagaatcgacaagggaagtggcgaagccacccctcctgtgcttctcttgtgcgcctttacgtttattgtacaaccttacccctaagtggtcgcaatcagcgacctttggcatcgttttcgatttcgtgtgaccaaaacgttcaccacccaacctaagcttcacgtctgctgaacaaacacttgggatcttgtaaacacgttctttttctttacccgtctcccacgacataagagtcgttttgaactcatctgtcacagaaacgtcctctttgaaaattcttttacacgatgcgaacatggccccagtgggaactgcaacttctcccggtccagtaggcttcagtttcgtgatggcagatccgtaggccacgcaaaccttcatatcaggaagttctttcatcatgcaccgcttgatacccgcccagaaagagtctttgacctttcgttttccgatgtaacgctgcaagttgtcacgggattctcggcgtcgcaaagccaatctccaccactcgtcagaaaacttagcgtaatttgacaagtacgcggagatcttatccgtcctcgatgtactcaaagctgctccattttcacgcagagactcccacataggaatcatgtcagcaaaacgcagttccttctgccttgtctgcttcttgatacccgacttgtggtaaaatgcaccacgtgtcagcgtccatgtcttatttttatcgtctgccaaatacgttaccgtagcgatgttgctccgtcctgggtccacacccaggacgacgatacccatatcgggcaatatcgttttaagtgagccgtcgtatttttctgcgatcttgataccttcttctttacgaggcttcttacaggtcttcttcagatctgagacaaggacctgtactgtcttgctgtactgcatgctcaaagagactccgtcagtacagatgctgcagtcgaaaacccacccattcttgacaggtggttttctgaagaaggaacctgcgactgtttttcgggcgttcacaagcgtgtcatacaaaccctttgcatgtctgtactcgtcagtagccttgatatccttaacatcatcatcgtacttcttcaggaccgacttgtatgcctcccattcaccaggaccacatgattttttcttcttctgtgcaggcctctggggcaacatgaagctgtcgggattctttacatgttcccacttggaaagctcaacgatgttctggtcattggggaacatgtgcctgaacaggttcacgagggtcttcaggtcaaggctaacatgcacccgttggacattgaagatgggcatcaatcggatacgacgtgcatccatatcctccaaccgtgtctgtatccaataattaaaccggaccatggtcggaaagtccatgtctttgccatagttatcataaactcgacttccatctggaacactcagcatctccctaacttcattgacgtactcttgaacagactctggccatccctccatgttttggacttcttgctgaatagcctgcatcacgtcgtatccccgaatgatcttcgatgtgtccagcgtcttcggggaatttaatttatttaaagtggtggaagtgagtctggccagacgtggtatcaaaggaacccatgcgttgtttgacacgacagtgctcaatgtgtgacctgcatagttcaatacctgatcgaaatagatcggataagacttgatgtagtcagcgtcgtcattaccaattacatcgccgatggagtccttcacagcttcgtacgatatcttgctttcctcatcggggaagattccgtctaccccgatacggagccaatccttccagtaggtatctttcatgttgtacaggtctggaatatccagacctttctctaatagactcgtgatgtggaaagtcagcaccagactgtaccgccgtaacatgcggctcaccacattgacgagctggtccacatgctccctaaacttaccgaattcttcatcgtcaagactcattgccttcttcagggcgcatttcacgacacacatcttttccaccgtcttgtattctggagggggtctggcgatgagaccattgtcttcgcataaacggacaagatcgtccttgttggacttcgacgagtatggtacttcagccaatttcagtagctccttcaatttcgcgactgtcggaggtttcgtcgccatctttcataatcaatacgtcacagaccgctttatacacataagtgttccaaacgtgttcaaaacaacccataataattttatcagtgaggttgccgaatgctaaggaaatcatatcagacacgtgcgtctttgtttcattcggtatgtagttcaaacgacgaaagtctctcttcactaaggtttagcgaagcatagctcaatagcattgaattctggactgtaaggaggtgtgtaacaaatattgacggggtgattattactactgaattattgcacaaactcaatgattcaataaatgcaacgaagtccgtcttcttcacagatcctttcttcacaacgaactctttcctaccatctgaaaaaactgccatcaacaaactgtggtgtacccacccaccagtagttttaaagataacaggttttcctacaggggaatacccataatgtggcttgagacgctcactaaacccacattcgtcaactgatactaaaattttcccagcattgattgtctccttgtacctactacaaaattcattgacaagtggaactaagtcccctttacactgtccacggagtttgctcctttttcttgtaaaaccaatgagttttatgaaacgatacactgttttagttgataatcgtacattgtgagtacttttgaaaaaagcaacaacgcctcttgcggttgtgcattgagttgacaataaaaacgattttaacaaatccttattcgtctcaaaaaggttgcttacaaattcacgtcgttttcgatttacaccaaagcgtttccacctccacagagtagaacgactgatgttcgtaaacacagaattttttaacacacccaagtcagcgaccattcttaacgccaattttctaacggcgatgtcgtacatttatttccatctgatatatgtttcattttactgttccgccgactgtaggcggtttcattttagtattccgtcgactgtagatcgatggacgagccaatgatgaccaccgacgcgcaagcctccgtgtttgtttggtgtcttttggatacatacatatggacatgtttccgccgtttgcatgattgtggaagtctgcttgatggacgatgacaacagtgtttgttcttcatccgttttgcgtgtgttcgtttgtacgtacgtgtgtttgcttgcattcattcattaattcatgcgtgagtcgtgagtgcagcattcattatcatcatgtcgtatccgcaatcccatatacccgcgtgtcgagttccctttgatttgaagcactttttttacgacccccttgttcttcatctgcctgtggaaccacttttctcgatctttactgtccccgctttcgttgatatacatgttgaacaatgcaactctcgactccctgaactcttccgcaaactcgcagttctcggcaaggaacgctttttgtacgaggcgactccccatgtatgtatccatagatgcagccggtatctacatacagctaggggcatttgaaagtgggacaccttgtatttgggggattctgaaaagttgattcgaactttgtaaccgatcttgtcaatacagatactgtcttccggagattgactcaaaacattcaaggcctgtaaagacacagaagttacatgttcaaagtagcctgaaaagtcaacatgctggctcacatcgtgcgcatcaataattattttcaaagcgttccagtaataaaacaattctgctacatctggaattattgggcacgcacatcgatattttagctgcaaaccggacacattctctataggggcttttttttaacctctcgctctgttgtctgggcctaaatttatggtagatgtaaggcatttccaggatgaagtcgatgaacttggattacagggaatctcaaaggcggcccagacagacttcaaaaactatccctatcccatgcgggagaggaacttgtcattcacatc

SEQ ID NO: 254 - DNA, 20975 bp, unidentified
  misc_feature 1..20975: note = Fanzor polypeptide
  source 1..20975: mol_type = other DNA
cttgcagacatctgcgtgaccttcctttgcagcctcacacaaggcccagctgtcgctagcggtcgcccgggccctgtactcaagtccagccacctctggatccatgagaagcttgcagacatctgcgttacctgcattggcagcctcacacaaggcccggctgtcgctagagttcgccatggccctatactcaattccagccacctctggatccatcagaatcaagcagacatgtgcgtgacctgccttcgcagcctcacacaaggcccagctgtcgctagcgttcgccctggccctgaactcaattccagccaccgctggatccataagcaggttgcagacatctgcgtgaccttcccttgcagccgcccacaagacccagctgtcgctagagttcgcccgggccctatactcaagtccagccaccgctggatccatcagcagcttgcagacatctgcgtgaccttcgtttgcagccagccacaatgcccagctgtcgccatagttcgcctgggccctgaactcaagtccagccaccgctggatccatgagcagcttgcatacatctgcgtgaccttccttggaagccgccatcaaggccatgctgtttatatggttcgccctggccctgtactcaagtccagccaccactggatccatcaaaagcttgcagacatctgcgtgaccttcctttgcagcctcacacaaggcccagctggccatatggttcgccctggcccttttctcaagtccagccacctctggatccatgagcagcttgcaaacatctgcatgacctttcgttgcagcctcacacaaggccctgctgtctctagagttcgccctggccctgaactcaattccagccaccgctggatccatgagcagcttgcaaacatctgcgtgacctttcgttgcagccgccaacaaggccctgctgtcgctagagtttgccctggccctgaactcaattccagccaccgctggatccatgagcagcttgcagacatctgcgtgacctgccttggcagcctcacacaatgccttgctgtcgctatagttcgcccaggccctgaactcaagtccagccaccgctggatccatcagcagcttgcagatatctgcgtgaccttcattggcagccagccacaatgcccagctgtcgctatagttcgccctggccctgaactcaagtccagccacatctggatccattagcatcttgcagacatctgcgtgaccttccttggcagccacatagagaagcttgttttcattttggttcgccctcaattgtaggaccccgttcacctgtacaagaggattggacaccaagcatactgctagaaggtcggcgcgcccccctttcgccatcatctctccaactcgctgtggtggttggatcagtccggtaaggggccatccagaaaatctgttgtgcagagttttacacactaatacaatctttgggttggaagagaatagggcaatacgatcaagaatgtcatggggaaacgttgggaatggaaacgatgatcgcgtgtgcgaatgcatgttcgatgaacatgtttgtacaatgcgtgcaagcgcacaggatggtataaataaatactgagttgggataaaccctataaaccctataaaccctataaaccctgggttgcacttgcctggcatgaaagcgacaagcggcacttgcccggcggtatctgcaagcggtacagaatgggtgttcctgcctcctggcgatttttttgaattttccaagcagaagttagagccgtacaaacgactcactcactcgccaaccagagatttagttctccgtggaattgcgattccgaccagaccaggctccgaaaccagtcaaaatacctccgtgaggcaggaactgtactggtgcaaattgtcaatacaacagatattgtcttcaggagattgacacaaaacattcaaggacatagaagttacatcttcaaagtagcctgaaaagtcaaagtgctggctcacatcgtgcgcatcaatcattttcaaagagtttcctgcctcatcataatcaaatatttctgctacatctggaattattgggcacacgcagcgagaaaactgaacacattgctgaaaagtttgaggagagtggataaatacatgctctacggtggcaataaacgtgtctttcctacactcgggcaagggaattatgttacataatatgccgagtcccccaaaatcctcttgtatgtgtttatcttctacacttcgctcgacactgcgttctgtaaagaacctgtcagcttgtaatcaattgtgcgtcctaccacaacttccagtttgcaatatttctttggcctcgcaagaattccggggcgggttgggtacattgtaaagcaattgtggatgttaatggctgcatttaggtcacggtttacaaacaacttgctgttctccatggtggaactgcaccatagcaagcctcgaaccgtgcgcccttctttttcggactgcacactctggaggacggtggtgctgtccttgtgccagatctttgtggtacggaattcgtcaatgacggcaactctccccttgaaacggtcgctaaacgcattgaacgcgctcgttgtagggacagaaagttcacccttgccaccaggggcaaacttagaagaaccgtatgcgatgacaattgttttcctctcaccgacatccgcctggacctcgttgaagaagcgtgctaagacacgtttcttgccaccgtagagccgcaggcgctgcgcgccccaccgcgacttggacatctccccccatcgagaatcccaatggttgaccattacagtcacgtaagcatcaaacgactctagagatgtgcgcttgggactgttgtccttcaggtcgtcaaggcagtcctggatgttagacaaccacttcttggtcggacctctagatttgaagaccccgctctcaacgtagtaccgctcccgcgtgagtctcttgctcccgaactcgcagtgcatcttcctcttcctaccccccttatctttttcttcgaccttatttttcttccaagtcaaaaaggcaatgttgcagcggccagggtcgtttgcaacgaccaccacattggggtcggactcggaaaactcgcggagagtcttggtctgcttcttaatcgccgttccgtcgtccttgattgaaatctttttcttctcggccctaagaaagtgggtacaagccattacgccgtcagtgtctatggtgcatgtaaacacacctttcccagaagaacggatgttttccacatcgaagaccgactcccagtgctccttgttcgtcagcgtcttttcgagactctcgacgagacccacgtccttgaggacgcccagtaggccgtcggtgtctatcgtgatgaaggagtgcttgactgttgggatgggagcgatgttgaccagcttggcgtagccctcgtcctctgtggcctcgaggtatcgattgataaagacgttgtaccggatcatcttggcgctgttggaaacgctcttaagccactgtcggttgatcttgtcccgtccgatgatcgagtgctgaatcttcagaaacatctttgttcactccggtaggagcgaatgtatcgctatgaggtcttcctttactccccaagagtggatatcgtagaggaggtatcggtggaatacggtattcgtgtaatccggttgtacacttttttagtggggtttgagatccacctcgagactgtcatgtggcttacatttgcaagtatagccactctcctcaaactttgcagcaatgtgtacatgtgtacaacaatcgaccgtctgtccaagttgtacatagagaattgtaattgattcaatatactgtaacattattgaccggtctgagtgtaacacaagacctagctgctgtcaagattcacaagggccctgtactcggggccagccgcctctggatccatcaaaagcgagcagacatcggcgtgacctgccttggcagccgcccacaaagccctgccgtctctagagttcgccctggccctgaactcaattccagccaccgctggatccatgagcagcttgcagacatctgcgtgaccttcactggcagccgcccacaaggccctgctggcgctagagttcgccctggccctgaactcaagtccagcgactgctggatccatgagcagcttgcagacatctgcgtgacctttcgttgcagcatccaacaaggccctgctggcgctagagttcgccctggccctgtactcaagtccagccacctctggatccatgagcagcttgcagacatctgcgtggcctgcattggccgcagcctccaaggccatgctgttgacagagttcgcccgggccctgaactcaagtccagccaccgctggatccatcagcagcttgcagacatctgcgtgcccttcctttgcagcctcaaacaaggcccagctggccatatcgttcgccctacccctgtactctagtccagccacctctggatccatcagcagcttgcagacatctgcgtgaccttcccttgcagccgcccacaaggccctgctgtcgatagagttcgccctgcccctgaactcaattccagccacctctggatccatgagcagcttgcagacatctgcatgacctgcattggcagccgcccacaatgcctagctgtctctagagttcgccatggcccttagctcaattccagtcaccgctggatccatgagcagcttgcagacatctgcgtgaccttcctctgcagcaacccacaaggccctgctttcgctagagttcgccctggcccttagctcaattccagccaccgctggatccatcagcagcttgcatacatctgcatgaccttcccttgcagccgtccacaaggccctgctgtcgatagagttcgccctgcccctgaactcaattccagccacctctggatctatgagcagcttgcagacatctgcatgacctgcattggcagccgcccacaatgcccagctctctctagagttcgccctggccctgaactcaagtccagccaccgctggatccatcagcagcttgcagacatctgcgtgaccttccttggaagccacatagagaagcttgttttcattttggttcgccctcaattgtaggaccccgttcacctgtacaagaggattggacaccaagcatactgctagaaggtcggcgcgcccccctttcgccaacatctctccaactcgctgtggtggttggatcagtccggtaaggggccatccagaaaatctgttgtgcagagttttacacactaatacaatctttgggttggaagagaatagggcaattcgatcaagaatgtcatggggacacgtaaggagtggaaacaatgatcgcgtgtgcgactgcattttcgatgttcatgcatgcaagcgcacaggatggtataaataaataatgagttgggataaaccctataaaccctgggtttcactttcctggcatgcaagaggcaagcggcaagaggcacttttcctggcggtatctgcaagcggtatagaatgggtgttcctgcctcccggcgattcttttgaattttcaaagcagaagttagagccgtacgaacgactcactcactcgccaaccagagatttagctctccgatgaatttcgattccgaccagaccagtttccaaaaccagtcaaaatccctccgggatgcaggtcacacgaaatcgaaaactatgccaaaggtcgctgattgcgaccacgtaggggtaaggttgtacaataaacgtaaaggcgcacaagagtagcacaggaggggtggcttcgccacttcccttgtcgattctcaaaaatcgatcgagcggtacccagaggtacgaggactgcgattctctccagaaacatgcatttactcggaccgggatcgctcttctgctctcacaatcgcaaggctgcactgcatggaattgatgggtctaggacgacctcttccatttgcccacagcagctctgttgttgttgatgaataaaaactcgtattgttgtagacaccactcggtccccctccggtggtcgcgacaacattaggttacaccgcaaggtgtgccgtacacgaagcggtttcatttaagtattccgttgactgtagtgcaaattgtcagtacaacagatattgtcttcaggagattgattgacacaaaacattcaaggactgttacatcttcaaagtagcctgaaaagtttgagtagagtggataaatacttgctctacggtggcaagacccagctgctgtcaagattcacaatggccatgtactcggggccagccgcctctggatccaccaaaagagtgcagacatctgcgtgcccttcctttgcatcctcccacaatgcccagctgtcgtgagagtccgcccgggccctgaactcaattccagccacctctggatccatcaaaagagtgcagacatctgtgtgacctcctttctcgcccacaaggcccagttgttgacagagttcgcccgggccaagacccagctgctgtgaagtttcacaatggccctgtactcggggccagccacctgtacatccatcaaaagcaatcagacatctgcgtgaccttccttggcagcctcacacaatgcccagctgttggcagagttcgccctggccctgtacttgtgtccagccaccgctggatccatcagcagcttgcaaacatctgcgtgacctgccttggcagcctcccccaaggccctgctgttgatatagttcgcccgggccctgtactcaattccagccaccgctggacccatgagcagcaagcagacatctgcgtgacctgccttggcagcagcccacaaggccctgctgtgcgtagagtttgccagggccctgaactcaagtccagccacctctggatccatcagcagcttgcagacatctgcgtgacctgccttggcagcctcccccaaggccctgctgttgatatggttcgcccgggccctttactcaattccagccaccgctggatccatgagcagcaagcagacatctgcgtgacctgcctttgcagccgcccccaaggccctgctgttgatatggttcgccctggccctgtactcaagtcctgccacctctggatccatgagcagcttgcagacatcggcgtgaccttccttggcagccagccacaatgccctgctgtttatatggttcgccctggccatgtactcaagtccagccacctctggatccatcagcagcttgcagacatctgcgtgaccttccttggcagccgcacacaatgccctgctgtctctagagctcgccagggccatgtactcaattccagccaccgctggatccatgagcatcttgcagacatctgcgtgaccttccttggcagccgcacacaaggccctgctgtcgatagagttcgccctggccctgtactcaagtccaaccacagctggatccatgagcatcttgcagacatctgcatgaccttcattggcagcctcccacaaggccctgctgtcgctagagttcgccagggccctatactcaagtccagcaaccgctggatccatcaaaaacaagcagacatcggtgtgaccttccttcgcagcctcacacaaggcccagctgtcgctagcgttcgcccgggccctatactcaagtccagccacctctggatccataagcaggttacagacatctgcgtgaccttctctagcagccgcccccaaggctctgctgttgatattgttcgcccgggccctgtactcaattccagccaccgctggatccatgagcagcaagcagacatcggcgtgaccggccttggcagcctcacacaaggccatgctgtctctagagttcgccagggccatgtactcaagtccagccaccgctggatccatgagcagcttgcagacatctgcgtgacctgccttggcagcctcccacaaggccccgctgttcgtagagttcgccagggccatgtactcaagtccaaccacatctggatccatcagcatcttgcagacatctgcgtgacctgcataggcagcctcacgcaaggcccagctgttcatatggttcgccttggccctgaactcaattccagccacatctggatccatgagcagcttgcagacatctgcgtgaccttccttggcagccgcccttaatgccctgctgtttctagagtttgccagggctctatactcaagtccagccacctctggatccatgagcagcttgcagacacatgcgtgacctgccttggcagccagccacaagaccatgctgttgatatggttcgccctggccctgaactcaattccagccacctctggatccatcagcagcttgcagacatctgcgtgaccttcattggcagccacatagagaagcttgtttttattttggttcgccctcaattgtagggccccatcaacttgtacaagaggattggacaccaagcatactgctagaaggtcggcgcgcccccctttcgccatcatctcttcaactctctgtggtggttggatctgtccggtaaggggccatccagaaaatctgttatgcagagttttacacactaatacaatcttggggttggaagagaatagtgcaatacgatcaagaatgtcatggggacacgcaaggagtggaaacgatgatcgcgtgtgcgactgcatgttcgatgtaactacatctttctttattactttaagtacagaatgggttttcctgcctcactgcgatttttttgaattttcaaagcagaagttagatccgtacgaacgactcactcgccaaccagagatttagctctctgcggaattgcgattccgaccagaccaggctccgaaaacagtcaaaatccctccgggaggttgcaacagttgacttgtttgctttccgaaaataagtaaacctaacaggaatttgcatgtaatgggcgttcctgcctcccggcgattattttgaattttcaaagaagaagttagatccgtacgaatgactcactcgccaaccagagatttagctctccgaggaattgcgataacgaccagagcaggctccgaaaccagtcaaaatccctacgggacgcaggaacaaatcagggccgatagttctaagggagtacatacagctagggacatttgattgtgggacaccttttattttggggatttgaccaattcaagctttgtaaccgatcttgtcaatacagatactgtcttcaggagattgatacaaaacattcaaggcctgtacagacacagaagttacatgatcaaagtagcctgacaagtcaacgtgttggcttacatcgtgcgcatcaataatcattttcaaagcgttcctgtaatcaaataattctgctacatctggaattattgggcacgcgcagcgatattttcgcttgagcaaactgaacacattctcaatagcgttgaactctggactgtaaggaggtacaaagagcgggcgtattcctacagaatcgaacgcagagatcgtctcctttgaatgatggaactggatattgtcaaggacagcgacagtaccctgctttacatgtaactctgatacaaactgtacaaattcgactttcttgcaattgtgatcaaggatcttgtaatgaacgatacctttgacagaaacggcagcgacatcttgatagaggacagagacgtcacaccctctgcaagctgagacattgtcaagaatggattggagtcgatcagtttttttatagcaaccttgatatcttcggtaatgacgctcgcccgtttcttccaatgatgttttatattggctttggtgacccaacgttggagtgacgattttgatactttgtacgacagactaactttcctcaagctacgattatagtatttgtagtgaacaaccgcgcgatgtcttacctctgcatcaatcatgataacgtgcacgtattagggtataaggaaattgtccgttagtatggtatcaccaaaataataatcactccctctcgatgggggtggtgacaaacaacggagatgacgacgatctggtcatcatggtggtcaagaagacgcttaattctttgtgcatggatgtatcgaggcagcagatctgctcaaggatccaaagcatggtactcgtaatcaaccacgcagttgcagaggcatacttattcgcaaattttcacataaccagatgcctagatgatggagactttgatgtcaagcagttgccgcacctggatcggaacttctactacaggtgcatacttgcggtctcgatatccaatgtccgaaatgatacgctggaccagagcttgaaagatagcatggttgctttcgacgctctcaggcctgcaggctacttaaaggtggatgtttgtcaatggggacaggtaatcgcagacgtctcaatacaaatggcgacgatggcatgcaacagcgtctgggcaaacgtggacagggttgtaatcaagtacctgcgcttgaaacatccctcgttgaagaaacatttcaataagattgtcaaggcagtggtccagtatcctgactcggatatcgacaaaatcatcccagcgggtctcgtgcatgcgaacctcatcaaagacgttgtcagacgcctgagagatctcttgccgctgccaagggggaagcagttcaacactcgagcacacctgacaatgagactgtttcatcacgtgcttacagagttgggagcggatctaaaagagaaaacaacaaaaaaacgcccccgtctgttcagtatccttccacgcaagagcggcttcaccatttcttacgtccctatatcgtccatgacactcatgaagcttctaagcatgggcgattcgccgctcgagagcgtccgtggcgatggacgtcacgagaatcattccatgttgtggagaaagtacttcaatgccaaggacttgagatgaaagggtctcgttttgacaaccgaatcctcagcgacggcaaaggggtctccgtccaaatgaagcatcaggtgggtaaagatatcgctggagaaggaggaggagataatgcggggtatcccaaagacgcaagtatcgaagactgccaggacgcttctttgcgccagggtgcgctgcgtgtcggtatcgacccgggtatgacagatattgtcactatagcatcttctgacggtcgagtcgagtctttcagctctgcccgctttagcgaagcagctgggtacaataccagcaatcgtcgcacaaacaaatggaatgccgatacgcaagacctcgtgaagtccattccatcgccgactacgggcagtatgcacaacatgcaggaccatgtcagaggttacctcagcgcgctcccgaccctccttcaacaccgagccaacagaggttaccgatcgatgcgattcttttgatatgtgggcaaacagaagacgattgaaaaggtatgcgatttgattgctccaaaagcacagaagaaaacgattgaagaaaaggtatgcgatgtgattgctccaaaagcaaagaagaccgttgttggcttcggcaactggtccaaccagggctatggcatcagtcgttcgtgttctggaccagtgaaagagatcaggaagtgcctttcatgtcgtcagaatgttctgttcaaaaacgtcgacgaacgcaacacttcttgtacttgccacggctgcttccagaagctcgtcaacatgaaggcagacagcgttgtctggcgcagagttcaaaacgagccctccgccctcatcgacggggctcctacaacaacaacaacgtttgagaagcagaagacggtggtgaagaacgttaaggtccacaaagtactgcactgtcgcaacagtgtcaaaagcgcatcatccaatgtgcgctgtggtgcaacctggaaccgagacgtgaacgctgccaagaaccttcttctgcttctgacgacgtggatggacgggaaagagcgaccagcggcattttgtgtgccctcctcatcgcccaccccaaaaaccacagtttccggagaggcaaatgtgggcgctcaaccaaccgacccacctgggtcagttagcagcttacaattgttatcctctgggccagcttaaatgctgaaatacgggatgaaggacacgaaggattgggaccttgatacaaaacctttagctgacctacccattgggttcaagggtcaccagtaagggtgtcccataaattctgtctctgactgtaagtagtcaccaagtcataaaacgcttgagagcaccgcaattcatgctgacactccacctatgacacaggtgacatacaatactggtgcaaatttgtcttcttacattaaggaattcaagtttcatcaagttttgtaaccgatcttgtcaatacaacagatattgtcttcaggaatctgcctaacacaagacctagctgctgtcaagattcacaagggccctgtactcgggtccggacgcttctgtatccatcaaaagcaagcagacatcggcgtgaccttctttggcagcctcacgcaaggcccatctgttgacagagttcgccctggccctgaactcaactccagcctacgcttgatccatgagcagcttgcagacatctgcgtgaccgtccttcgcagccgcccccaaggccctgctggcaggagagttcaccctggccctgaactcaattccagccacctctggatccatcagcagcttgcatacatctgcgtgacctgcattaacagccgcccacaatgcccagctgtcgttagagttcgccctggccctgaactcaagtccagccacctctggatccatgagcatcttgcagacatctgcgtgaccttccttggcagcctcacacaaggccctgctgtcgctaaagttcgccagggccctgaactcaattccagccaccgctggatccatgagcatcttgcagacatctgcgtgaccttcattggcagccgcccacaatgcccagctgtcggtagagttcgccctggccctgaactcaactccagccacggctggatccatcagcatcttgcagacatcggcgtgaccgtcctttgcagccgcccacaaggacctgctggcggtagagttcgccctggccctgaactcaagtccagccacctctggatccatcagaagcttgcagacatctgcgtgaccgtccttggcagccgcccacaatgccctgctggagctagagttcgccctggccctgaactcaagtccagccacctctggatccatcagcagcttgcagacatctgcgtgaccttccttggcagccgcccccaaggccctgctggcggtagagttcgccctggccctgaactcaattccagccaccgctggatccatcagcagcttgcagacatctacgtgaccttcctttgcagcctcacacaaggccctgctgttgctagagttcgccacagccctgtactcaattccagccaccgctggatccatgagcagcttgcagacatctgcgtgacctgccctggaagccacatagagaagcttgttttcattttggttcgccctcaattgtaggcccaccttaacctgtacaagaggattggacaccaagcatactgctagaaggtcggcgcaccccccttttgccatcatctctccaactcgctgtggtggttggatcagtccggtaaggggccatccagaaaatctgttgtgcagagttttacacactaatacaatcttggggttggaagagaatagggcaatacgatcaagaatgtcatgggaaaacgttaggaataccgatgatagcgtgtgcgactgcatgttctacgaacatgtgtgtacaatgcatgcaagagcacaggatgaaaacctaaataatgagttgggttaaactctataaaccctataaaccctgggttgcactttcatggcatgcaagcggcacttgcatggcggtatctacaagcggtacagaatgggtgttcctgcctcccggatatttttttgaattttcaaagcagaagttagagccgtacgaacgactcactcgccaaccagatatttagctctccgcggaattgcgattccgaccataccaggctccgaaaccagtcaaaatacctccgggaggcaggaacaaatgtacaggtgcaaattgtctttcttacttacattaaggaattcaagtttcatcaagttttgtaaccgatattgtcaatacaacagatattgtcttcaggagattgacacaagacattcaaggactgtaaagacatagaagttacatcttcaaagtagcctgaaaagtcaaagtgctggctcacatcgtgcgaatcaataatcattttcaaagagttcctgcctcagaatcaaatatttatgctacatctggaattattgggaacacgcagcgatattttcacttgagcaaactgaacacatttctgaaaagtttgaggagagtggataaatacttgctctacggtggcaagacccagctgctgtcaagattcacaatggccttgtactcggggccagccgcctctggatccatcaaaagcaagcagacatcggtgtgaccggccttcgcagcctcacgcaaggcccagctgttgacagagttcgcccgggccctaaactcaagtccagccacatctggatccatgagcagcttgcagacatctgcgtgaccggacttcgcagcctcacgcaaggcccagctgttgacagagttcgccagggccctgaactcaattccagccaccgcaggatccaacaaaagcaagcagacatcggtgtgaccggccttcgcagccgtccccaaggccctgctgtcgctagagttcgcctgggccctatacttaagttcagtcacatctggatccatgagcagcttacatacatctgcgtgaccttctttggcagccgaccccaaggccctgctgtcgaaagtgttcgccctggccctgtacttgagtccagccacctctggatccatgagcagcttgcatacatctgcgtaaccttcctttgcagcctcacgcaatgcccagctgtcactagcgttcgcccgggccctgaactcaagtccagccacctctgtatccatcagcagcttgcagacatctgcgtgaccttctttggcagccacccacaaagccctgctgtctctagagttcgcccgggccctgaactcaattccagccacctctggatccatcagcagcttgcagacatctgcgtgaccttcattggaagccgccctcaaggccatgctgttcatatggttcgccctggccctgtacttgagtccggccactgctggatccatcagcagcttgcagacatctgcgtggccttctttggcagccgcccacaatgcccagctgtcgctagagttcgccctggccctgaactcaagtccagccacctctggatccatgagcagcttgcatacatctgagtggcctgcattggctgccgaccccaaggccctgctgtcgctagaattcgccccggctctgaactcaagtccagccacctcttgatccatcagcagattgcagacatctgcgtgaccttccttggcagcctcacgcaagccctagttgtcgctagacttcgccagggccctgaactcaagtccagccaccgctggatccatcagcagcttgcagacatctgcgtggccttccttggcagccagccacaatgcccagctgtcgatagagttcacccgggccctgaactcaattccagccacctctggattcatcagcagcttgcagacatctgcgtgacctgccttggcagccgcccacaatgcccagctgtctctagagttcgccagggccctgaactcaagtccagccacctctggatccatcagcagcttgcagacatctgcgtgaccttcctttgcagccacccacaaggccctgctatagtttgccagggccctgaactcaattccagccacctcttgatccatcagcagcacgcagacatctgcgtgacctgccttggcagccgcccacaatgccctgctgtcgttagagttcgccatggatgaactcaattccagccaccgctggatccatcagcagctagcagacatctgcgtgaccttccttggcagccgcccacaatgcccagctgtctctagagttcgccagggccctgaactcaagtccagccacctctggatccatcagcagcttgcagacatctgcgtgaccttcctttgcagccacccacaaggccctgctatagtttgccagggccctgaactcaattccagccacctctggatccatcagcagcttgcagacatatgcgtgacctgcataggcagccgcccacaaggtcctgctgtcgatagagttcgcccgggccctgaactcaagcccagccacctctggatccatcagcagcttgcagacatctgtgtgaccttcctgtgcagccgcccacaaggcccagctgttgacagagttcgcctgggccctgaactcaagtccagccacctctggatccattagcagcttgcagacatctgcttgacctgccctggcagccacccccaaggccctgctttctctagagtttgccagggatctgaattcaattccagccaccgctggatccatgagcagcttgcatacatctgcgtgacctgcctttgcagcctcacgcaaggcccagctgtcgctagagttcgccagggccctgaactcaactccagccaccgctagatccatgagcagcttgcagacatctgcgtgaccttccttggcagccacatagagaagtttgttttcattttggttcgctctcaattgtaggccccccttaacctgtacaagaggattggacaccaagcatactgctagaaggtcggcgcgcccccctttcgccatcatctctccaactcgctgtggtggttggatcagtccggtaaggggccatccagaaaatctgttgtgcagagttttacacactaatacaatctttgggttggaagagaatatggcaatacgatcaaccctataaaccctataaaccctgggttgcactttcctggcatgcaagcggcacttggaactctgctaattatgcttttaagcttgttgatgtcccttcattcggggaactgactggattgtttgatcagtatcgtcttcttaaggttaaggtaacgtgggttcctcactttcgtgatcccacatccggcggaccagatacatccaacatgacagcaggtcctttaatctattttactagatccgatgatggcactcaaaacttgacgactaaacttgaagcttttcaggactcttccattaaaggagttgtggatccttattcggaatttagcgtcactcttactcccaaagtacagtttgaagtacaaaccgcattaactattaatgggcgttcctgcccctgggccgaagccgaccaagcaaattctctaggtccaccagtcatgagccctgaaccctagtatcaggctaatctggtggcagtattaccctagagaattgcttgaggcgatactagatttgcttgagactgatactcgactataaaagcaagcgtatctgcaagcggtatttacaagttagttacatcttcaaagtagcctgaaagtcaaagtgctggctcacactggctcacatcgtgcgcatcaataatcattttcaaagagttaaatatttctgctacatctggaattattgggcacatgcagcgatattttcgcttgagcaaactgaacacatttctgaaagtttgaggagagtggataaatacttgctctacggctctacttcattcggggaactgactggattgtttgatcagtatcgtcttctttaggttaaggtaacgtgggttcctcactttcgtgatcccacatccggcggaccagatacatccaacatgacagcaggtcctttaatctattttactagatccgatgatggcactcaaaacttgacgactaaacttgaagcttttcaggactcttccattaaaggagttgtggatccttattcggaatttagcgtcactcttactcccaaagtacagtttgaagtacaaaccgcattaactattaatgggcgttcctgcccctgggccgaagccgaccaagcaaattctctaggtccaccagtcatgagccctgaaccctagtatcaggctaatctggtggcagtattaccctagagaattgcttgaggcgatactagatttgcttgagactgatactcgactataaaagcaagcgtatctgcaagcggtatttacaagttagttacatcttcaaagtagcctgaaagtcaaagtgctggctcatcctggctcacatcgtgcgcatcaataatcattttcaaagagttaaatatttctgctacatctggaattattgggcacatgcagcgatattttcgcttgagcaaactgaacacatttctgaaaagtttgaggagagtggataaatacttgctctacggtggcaagacccagctgctgtcaagattcacaatggccctgtactcaagtccagccaccgctggatccatcagcagcttgcagacatctgcgtgaccttccttggcagccacccacaaggccgagctgtcgctagcgttcgcccgggccctgaactcaattccagccacctctggatccatgagcagcttgcagacatctgcgtgaccttccttggcagccgcccacaatgccctgctgtctctagaattcgccagggccctgaactcaagtccagccaccactggatccatcagcagcttgcagacatctgcgtgacctgccttggcagccgaccccaaggccatgctgttgatattgttcgccctgcccctatacacaattccagccacctctggatccatcagcagcttgcagacatctgcgtgaccttccttggcagccccccacaatgccctgctgtcgttagagttcgccagggccctgaactcaagtccagccaccgctggatccatgagcagcttgcagacatctgcgtgaccttctttggcagccgcccacaaggccctgctgttgacagagttcgccctagccctgaactcaattccagccacctctggatccatgagcagcttgcagacatctgcgtgaccttctttggcagccgcccacaagactcagctgccgctattgttcgcccgggccctatactccagtccagccacctctggatccatcagcagcttgcagacatctgcgtgaccttcctttgcagccgaccccaaggccctgctgtcgttagagttcgccctggccctgaactcaattccagccacttctggatccatcagcagcttgcagacttctgcgtgaccttcctttgcagccgaccccaaggccctgctgtcgttagagttcgccctggccctgaactcaattccagccacctctggatccatcagcagcttgcagacatctgcgtgacctgccttggcagccgcccacaagacccagctgtcgctagtgttcgccctggccctgtactcaagtccagccacctcttgatccatcagcagcctgcagacatctgcgtgaccttccttggcagccagccacaatgccctgctgtctctagaattcgccctggccctgaactcaagtccagccaccactggatccatcagcagcttgcatacatctgcgtgaccttctttggcaggcaccaacaaggccctgctgtcgctagagttcgccacggccctgtactcaagtccagccacctctggatccatcagcagcttgcagacatctgcgtgaccttcattggcagccgcccacaatgcccagctgtcgctagagttcgccctggccctgtactcaattccagccacctctggatccatgagcagcttgcagacatctgagtgaccttcctttgccgcatcaagcaaagccctgctgtcgctagagttcgccgcggccctgaactcaattccagccaccgctggatccatcagcagcttgcagacatctgcgtgacctgccttggcagccgaccccaaggccatgctgttgatattgttcgccctgcccctgtacacaattccagccacctctggatccatcagcagcttgcagacatctgcgtgaccttccttggcagccccccacaatgccctgctgtcgttagagttcgccagggccctgaactcaagtccagccaccgctggatccatgagcagcttgcagacatctgcgtgaccttctttggcagccgcccacaaggccctgctgttgacagagttcgccctagccctgaactcaattccagccacctctggatccatgagcagcttgcagacatctgcgtgaccttctttggcagccgcccacaagactcagctgccgctattgttcgcccgggccctatactccagtccagccacctctggatccatcagcagcttgcagacatctgcgtgaccttcctttgcagccgaccccaaggccctgctgtcgttagagttcgccctggccctgaactcaattccagccacttctggatccatcagcagcttgcagacttctgcgtgaccttcctttgcagccgaccccaaggccctgctgtcgttagagttcgccctggccctgaactcaattccagccacctctggatccatcagcagcttgcagacatctgcgtgacctgccttggcagccgcccacaagacccagctgtcgctagtgttcgccctggccctgtactcaagtccagccacctcttgatccatcagcagcctgcagacatctgcgtgaccttccttggcagccagccacaatgccctgctgtctctagaattcgccctggccctgaactcaagtccagccaccactggatccatcagcagcttgcatacatctgcgtgaccttctttggca

SEQ ID NO: 255 - DNA, 21440 bp, unidentified
  misc_feature 1..21440: note = Fanzor polypeptide
  source 1..21440: mol_type = other DNA
aaagaagtacttgaacgcagaatattaaaattggagcaggacagcgaacagcaaatcaaattcgcaacccagcggaacactattgccaaaatggaaggcaaagttgatttggtgcaggtcgctgaaaactatcgtcgtgttgaagcgatcgaggatgagtgctgggcttcgaaagtcaccttgaaagcgcctgtacaagtcgaggaggtgtcgtcacatggggtcgcccctccttgaagcacaagttgtcgagccagagccacacgttcatttgtgaaatgataaaccgcgcgaagaacggaaaaaacgcccgcaaccatcacaaacgtgaccctcgctcatgtgatcatgaacggattcgttctcgccaatacagtcaacggaagcttcgtgtacggcacaccttgcggtgtaacctaatgttgttgcgaccaccggagggggaccgagtggtgtctacaacaatacgagtttttattcatcaacaacaacagagctgctgtgggcaaatggaagaggtcgtcctagacccatcaattccatgcagtgcagccttgcgattgtgagagcagaagagcgatcccggtccgagtaaatgcatgtttctggagagaatcgcagtcctcgtacctctgggtaccgctcgatcgatttttgagaatcgacaagggaagtggcgaagccacccctcctgtgcttctcttgtgcgcgtctacgtttattgtacaaccttacccctaagtggtcgcaatcagcgacctttggcatcgttttcgatttcgtgtgaccaaagcgttcaccacccaacctaagcttcacgtctgctgaacaaacgcttgggatcttgtaaacacgttctttttctttacccgtctcccacgacataagagtcgttttgaactcatctgtcacagaaacgtcctctttgaaaattcttttacacgatgcgaacatggccccagtgggaaatgcaacttctcccggtccagtaggcttcagtttcgtgatggcagatccgtaggccacgcaaaccttcatatcaggaagttctttcatcatgcaccgcttgatacccgcccagaaagagtctttgacctttcgttttccgatgtaaggaggtgtgtaacaaatattgacggggtgactgaggaccaatttcttatggatactggcattgtccattattactactgagttattgcacaaactcaatgattcaataaatgcaacgaagtccttcttcttcacagatcctttcttcacaacgaactctttcctaccatctgaaaaaactgccatcaacaaactgtggtgtacccacccaccagtagttttaacgataacaggttttcctacaaggggaatacccataatgtggcttgagacgctcactaaacccacattcgtcaactgagctcttagttcctctggaagcggcacgcccctctccgtgaggactctgacgcaggtcaggctgtgcatagccatgccctgcatggccctgagtgtaacggggttaattttaaaccatttcattatattcccgatagagtctgtgttgacatgcattataacttgggttagtattgacatggcgccatattttttgtatagttcttgctgatctgtatctacgtatgatatcacatatgtcttgggaagatagcaacatattggggtttctgctcaactcataccagtcccatggtttatctgggttggtttgtataatctcccacgtgatattggggtttgcgctcattccaccccaatcccacggtttgtctgggttggtttcgataatatccatctttatgacagggtttttgctgatccagttccagttccatggtttatctggattggcttcgatcatttcccacgtgatgtagggttttctgctgatataataccagtcccatggtatatctggattggcttgtataatatcccatgtgatactggggtttttactgatcaaaaaccagtcccatggtttatctgggttggcttttataatctcccatgtgatactggggtttttactgataaaaaaccagtcccatggtttatctgggttggtttgtataatatctagtgtgatgttcgggtgtgaactcaatccaccctattcccacggtttgtctgggtttgtaatgacaatatcccatttaatgcatgggtttctgctgatccaataccaattccacggtttgtcggggttggcttcgatcatttcccacgtgatgtagggttttctgctgatataataccagtcccatggtttatctgggttggcttgtataatctcccatgtgatgttggggtttatgctcaacccaccccaatcccaaggtttactgagggttgtaatgacaatatcaatcgttattgtagggtttctgctgatataataccagtcccatggtttatctgggttggcttgtataatctcccatgtgatgttggggtttctgctgaaccagttccaatcccatggtttgttgggattggattcgatgatatcccatgtgatattggggtttgagctcaataaactccaataccacttgtgttccatacatttgacccgtctcgagatgtggttatttatttccactgaaatcattattaatagtaataactaaataatagatggtaatagatagtaatatatccacaagtatctttatgctccgatttgtacctgattttaaaagattgtggtgatttcgcagaatccgtccgtacattcaaaatccatgaactcggtgaaaatcgttatccattatccacgcttattacatggtacatacttaaccttactatctccttgtttgtttttgataatatttttaatgcattgtgtaccattaacattccaaactgtgcgttctacatatttgccacctactttaacggatgtctttgttccagtatttacagctgtatttgtcttcttagttgttgtcttcctagatccacctccatattgtcgtgcttcgttttctgtaccgcatgctaagaaccagcttcccccactttctctctcatcactagcttttaagccactatttgtgttttccttagcttcattacaatcattcatggaattgtacttcctatgttctattccttgcgttccagccccccaatttctgatcgtgcctgttaccatttttatatatataatacaaacatttatttttcaatggccccacaatatccggtactctttctctttcatttacagcattgatttgacagctaaagggagttgcccagctgtgggagtctgcttgaacgatcccataaccgggcacagagcataccttgcgcgactcagcatcgcttctccacctgatgcaaaacgccttggtcagcaagctggtccttgtgggcatccagatacccgtgcaagcagcgcatcatctcttttgagagcaggtcggaggatgtggccagcagcctcggtagcacctcccgctcataggcattgacaaagagcgggtggtggacggagtagccgtagttgttgcggcggaagtcggcgtcggcgcgagtgtgcacaaacatcagctgccaaggggtttgcacgtccacacccggcccgcctgacatgcccgggaaggtgctgcaggtgtgctctatgatgcgctgagaggccccggccaccagttcagtcgacacgaccaagcgcgaggggtagcacacatcatcctctagggcaaacgcacgtcgcagggctagattttcatccagccgccagtctgctggagtaggtagctgatggcccagtagctcggcctcatcagcggcctgctcataatccgcctcggtgcgcagaaaccttttcgcccatttggcagtcaggcgatgagcaaaccccagcacgcacaccgcgtccccatccaccagcttccttgcgctgggaatgaagagctgcatcggacccccctcaggtgccttggtgaccatgaacccgaagtctggcaggacctcagcctcaccgatgcgctgcgagggctgcgaggggatgtgttcagccagctcactaacgttgcgccccgctgttagccagcccaggtccacaatcgcgcggggaaccggccgagtggacagactggacggcagcacgtctgtgccgtagccgcaccgccacttctgttgcacgctggcgggcatgaggcagtgcccagcgctgccccacaacacccctacgccggcaggtgctgcgactggaaagaaggtgccactgctgtgccccgttggctcttcccacagcccacgcatgagctttatgcctgtgtacttcccgctgctctgctcaagcagcacctcgttgtcactagctgcaccacggatcagcaccttgcctgttatgtggtccaccggaaaagtgcgcttgtaggttccagtgcctttgatgacaatcggcttttcagcagcagcctgcttcagcatgtcccagttgccctccatgttgctgcccatgttgttgatatatctgtagtgagtgggaacgcggacagggaagtcacgaacgaagcggtaaacgtcccaattacgttttttatctcagagatgtcggtgagaggcgttggccaggcagagaatccatgattctcaggatatgccagccacattgtaacccgatgtcttaagtcgctgactcacacgcacgcacgcaccgccgcggatgattatagatgatgatgcatgcatgggcggcttgtgtgctcttgcgcgtgcagggaaaacacatacacgcggacttttggggactcatcatgtaacgtgcgggttcgaggtgccttcacgacagcgtggatgagtgtatacctgcactggacggtcaacagattgaaacatattccgggtattagcccagaaaacaacggaacgtcagtggacatcgtgagaggaagtgactctcgcgcggttggtcaacttttcaaaagcctcaaaagacaggggtatatctctaaaccctggatatacaccgtaaggtgtgccgtacacgaagtggtttcagtttagtattccgttgactgtgtatcaccgcttctgcactctgctacatgggtccagaataggcatcctgcatcatgccactggtgcttgcaaacatgggcttagatcaagcctggatatcctgcttgaagcaggtaggtgtgaaggtcgtagttgggggtgatgccgatgcgcatgattgtggtgccaagtgcgcccttcacgacccccagcagacggccatgcttgtcgaccactggtctgcctgaaaacccgtcatctgcgtgtgcagtgatggccactgagccaggcatggtgctggatagtgagcccttggagcaactgggcttgttctctgtgcctgtgtaccccagtgcgtacactgacgccatgatttcaagatcagtggaccaaaggctcgtggcagagcgggaacccttcaacagaatgaggtcaggcacattgcctggaggtgagggggccacgacctccaaatcctcctcaaagccgtcggttgggtaccttgccttaaaggccacagccggtgatgtactacctaggggcttgccgcagaacccctgcatgtgtcctgctgccacgatgacttccccatgcatgaagccgctgaactgaccaactaggcttccgtcctgactgaatccaagcagcttcactaccaatggtgacaccttggcatacactgcctggtcgagcatctccactgcagcaccgacatccaccgggtcaacaccatcatccaagtttatccgaaacctggccatgttacaatcagaccggtcaataatgttacagtatattgaatcaattacaattacaactttctatgtacaacttggacagacggtcgattgttgtacacatttacacattaatgggcgttcctgcctcccgggcgatttttttaaatttctaatcaggatttagagcctcctgaacgactcgctagcttgagacatcagcaccaaggaatcacaaatccgctccataccatgtttcgcaaccagtcaaaatcggccgggaggcaggaacgcccattcattgctgaaaagtttgaggagagtggctatacttgcgaatgtaagccacatgacttgatgagatgagagaggtcgccctgtgagtggctcgactcgacgggtgccgccgccgtccttgatgagatgagagaggtctccctgtgagtggctcgactcgacgggtgccgctgccgtccttgatgagagtgtgactgactcgacagtgcattgtttctgttcctgcttgaccctaacatgttccaacctccggtggtcgcgacaacattaggttacaccgcaaggtgtgccgtacacgaagcggtttcatttaagtattccgttgactgtaggggtccagatacagagggaagggaagggaaggggcccacttgcgagtaccttatattaatgtatggaatgtaatttatggaatgcaaccattccaattcgtatccacaacggaaccaatgacccatgatgttttttagccaagcctttgctccgtcatacagtttgtgtttgtctttgtcagaaggttcttgcattttgtttaatgtcttgtgtaattcacgaaccattgaaaacgagggcccaattcctattgaagatgcaacggcgggagtcgtttcctcgtcagtgcaaataagttgaagtatggtattttcaaacatgtaagcacctcgccgaatttgatccacccataatatagccaagattatcctaccatcaaatgtttgtactgattgtatatttgcacacgccataataatggaatgctttattattttgtctcgagccatgacgcaccgatataaatccccaaaagtctgcatgtatgatgtgttttttctgcttctcctttatcctagtctggttttcgaataacaaattttgctgcgcttacattcattcacattcacgacgaattcgaggaccagcgcgcaccaatctgaatggaggagcgcggtgcatggggattcagttgctgactcgcacagtgaatacgtggggttccgccaacacattcaactgattcctgaataccacgagtagactactgcttgacaactcagttggatttatgaacgggaggagcgcgggcaccgtgtagcggtgcatagggattcagctgatgacttcgctcactcagattaaagcaattcacaatgaagatcttctaattcgtcttcctcttgttcagtccagaaagcggtttcattttagtattccgtctagtgtaagcgtacgccgaacaagataagtaaacgtgaacccttggttgagcttgagcccttcatgtcagagccacaagtatacctcgatttatatgaattctggggtgtatacaacacttgtttccgacctgaggatggatattcatgccacgaagtgttcgtgcctgatgttgactgtgcgattggtgcgggcggtacaatggaggaggcttttgcagctgccaaagaaaagctgactgacatggtcagtgatttcatgtatcgcggcgaggccatctcgccgccatcactccccgccgacatcatcaaccgcagacagcaggacaacgagcaatttgccggcttcgtggtcaccttcgtcggagtcgtcattgtttccaccctgccaagtttatgtggcaggccaaccacgtgaactgctgccgtgccatgacgtgtgaacaccatcaatgacatagttcaatccgccatcgatcccgacaaatatgccgtgatgccagtaccccaccgtctcatcccaaaccgcaatgtgatcccccggctcggccttttgtgccagcgtatcgcagtcgcattcgtcacaagtggcaaaataactagcagcccattcgttctttctttggatggctcgggacaaaaatcgttcaatgtccatctgcactgctatgccaccggacggtacaacctgcatttataaggatgtatacctatttataaggatgtatacgccaatgtcaagctgatggctgattaaaaaccgcatgcgaccatgcacaacaccgagacgcgacattggaaatgtagtgtaaacacaatcagatacacattttacacacttacacatttaccaacatgaatcctgaagccgccggcaccatgtccatgagctacttgaaacgccatgtgtacgagctgaggacgtccatggatccgaacatcgttgtcaagctccagagcctcgatcatgacatggcacgcatatgggttgagaatgcggagggcgtttgtgtggacacacatgaggtcagtgtgcatgaggcaactggcgaggagcttacaatcaccaatgaggctgttcgcgtggagaggtcgtatatcatcaagattaacaagtcatatgtggtggcgttcatgggcagcacgatcctcaagattcacaaacagcagcagcatgcactgttcacagcgaatggtgctgatctgaagcgcatttgagtgggtagcaaattttgcctaaaggggtcacagaaacctggggcatcgaccgcgtcgagtcacagagcgaccgacctctcgcatcatgacggaacctgtgtcgagtcgagacccctggcaaaaacataggggtgagatgtattcctaaatcgtttttttataacccacaacgaaacacagtttagcgaggacaccgatgaatacatcgacagccaaggcgacccatgcatgtctttgccagcgggagagcgcaaggattgcaaacaataggtataacgtgccatgaacagggcggagtttcgaccaccagatcttcccgccatctggcgccacctctatccccgttttccgaaggcctccaaagtatatgacaaagaaccctattgctggcacaagggccaagacgcccatacagctagggacatttgattgtgggacaccttttattttggggatttgaccaattcaagctttgtaaccgatcttgtcaatacagatactgtcttcaggagattgatacaaaacattcaaggcctgtacagacacagaagttacatgatcaaagtagcctgacaagtcaacgtgttggcttacatcgtgcgcatcaataatcattttcaaagcgttcctgtaatcaaataattctgctacatctggaattattgggcacgcgcagcgatattttcgcttgagcaaactgaacacattctcaatagtgttgaactctggactgtaaggaggtacaaagagcgggcgtattcctacagaatcgaacgcagagatcgtctcctttgaatgatggaactggatattgtcaaggacagcgacagtaccctgctttacatgtaactctgatacaaactgtacaaagtcgactttcttgcaattgtgatcaaggatcttgtaatgaacgatacctttgacagaaacggcagcgattagcgtcaatttggacattcgcaatgtccgagaaatttggatatttaaacgtttgccacgttggcagtaccctctgcgacaagtgtcaccgatgtaaaaacccgcctcatcaatgcttatcaaatccgatgtcggaacggccagatactctttacaaaaactttcgacagaagatttgtggtcattcttgtgtcgaacagttttgtatgcgcgcttgcgtgtgtagccaagtctgcgtgtgtagcgtccaaacgtttttggagacatcttgatagaggacagagacgtcacaccctctgcaagctgagacattgtcaagaatggattggagtcgatcagtttttttatagcaaccttgatatcttcggtaatgacgctcgcccgtttcttccgatgatgttttatattggctttggtgacccaacgttggagtgacgattttgatactttgtacaacagactaactttcctcaagctacgattatagtatttgtagtgaacaaccgcgcgatgtcttacctctgcatcaatcatgataacgtgcgcgtattagggtataaggaaattgtcagttagtatggtatcaccaaaataataatcactccctctcgatgggggtggtgacaaacaacggagatgacgacgatctggacatcatggtggtcaagaagacgcttaattctttgtgcatggatgtatcgaggcagcagatctgctcaaggatccaaagcatggtactcgtaatcaaccacgcagttgcagaggcatacttattcgcaaattttcacataaccagatgcctagatgatggagactttgatgtcaagcagttgccgcacctggatcggaacttctactacaggtgcatacttgcggtctcgatatccaatgtccgaattgatacgctggaccagagcttgaaagatagcatggttgctttcgacgctctcaggcctgcaggatacgtgaaggtggacgttcgtcattggggacaagtaatcgcagacgtctcaatacaaatggcgacgatggcgtgcaacagcgtctgggcaaacgtggacagggtcgttatcaagtacctgcgcttgaaacatccctctctgaagaaacatttcaagaagattgtcaaagcggtggtccagtatcttgactcggatatcgacaaaatcatcccagcgggtctcgtgcatgcgaacctcatcaaagacgttgtcagacgcctgagagatctcttgccgctgccaagggggaagcagttcaacactcgagcacacctgacaatgagactgtttcatcacgtgcttacagagttgggagcggatccaaaagagaaaacaacaaaaaaacgcccccgtctgttcagtatccttccacgcaagagcggcttcaccatttcttacgtccctatatcgtccatgacactcatgaagcttctcagcatgggcgattcgccgctcgagagcgtccgtggcgatggacgtcacgagaatcattccatgttgtggagaaagtacttcaatgtccaaggacttgagacgaaagggtctcgttttgacaaccgaatcctcagcgacggcaaaggggtctccgtccaaatgaagcatcaggtgggtaaagatatcgctggagaaggaggaggagataatgcggggtatcccaaagacgcaagtatcgaagactgccaggacgcttctttgcgccagggtgcgctgcgtgtcggtatcgacccgggtatgacagatatcgtcactatagcatcttctgacggtcgagtcgagtctttcagctctgcccgctttagcgaagcagctgggtacaataccagcaatcgtcgcacaaacaaatggaatgccaatacgcaagacctcgtgaagtccattccatcgccgactacgagcagtatgcacgacatgcaggaccatgtcagaggttacctcagcgcgctcccgaccctccttcaacaccgagccaacagaggttaccgatggatgcgattcttttgatatgtgggcaaacagaagacgattgaaaaggtatgcgatttgattgctccaaaagcacagaagaaaacgattgaagaaaaggtatgcgatgtgattgctccaaaagcaaagaagaccgttgttggcttcggcaactggtccaaccagggctatggcatcagtcgttcgtgttctggaccagtgaaagagatcaggaagtgcctttcacgtcgtcagaatgttctgttcaaaaacgtcgacgaacgcaacacttcttgtacttgccacggctgcttccagaagctcgtcaacataaaggcagacagcgtcgtctggcgcagagttcaaaacgagcccgccgccctcatcgacggggctcctacaacaacaacaacaacaacaacgtttgagaagcagaagacggtggtgaagaacgttaaggtccacaaagtactgcactgtcgcaacagtgtcaaaagcgcatcatccaatgtgcgttgtggtgcaacctggaaccgagacgtgaacgctgccaagaaccttcttctgcttctgacgacgtggatggacgggaaagagcgaccagcggcattttgtgtgccctcctcatcgcccaccccaaaaaccacagtttccggagaggcaaatgtgggcgctcaaccaaccgacccacctgggtcagttagcagcttacaattgttatcctctgggccagcttaaatgctgaaatacgggatgaaggacacgaaggattgggaccttgatacaaaacctttagctgacctacccattgggttcaagggtcaccggtaagggtgtcccataaattttgtctctgactgtataccttagatacataggtgtcgcgagaaaggcaagaatcacgaaagctgtcctgattcctatgcacccgatccagaaagctatttgtcttgaaatgttgttggccatattgttatcatttaagttttgttttttgaggaagatttcaggttgccttgttccacatgtatctcgaggaaagcggggacagtaaagtggtaattccacaggcagatgaagaacaaggggggcgtaaaaaagacatcacggttgttctcatcctcaaccaaccaacctcaaaactgcttgtcaagtgatatatgtcgccaacacttggatgagaaccaccgtaccacattaaacaagtggcggagcccctttcacctattcccccccagcggagcgaccgggggcgaccggaggggagcccccacaaaggagtccgagaggaaccgagcgggtgggcgaccggaggggagcccacagttcacagttcgaccgcgatgtgaacgcttccaggaacatcctgatgcttacacttcaccaagtctttgggagagagaattccaagatgaggtcttcacatcaagtattagacacactactgtgtaactacagtcggtggaacagtaaaatgaaacatccaaaaaccggtataagacggtaatatactaaaatagttgtatagaggatggacacaaagaccgtatcggagcttagggcgatgatgctcactaatgatgctatcgaagctgatgatgctatcgaagaactctgccgccgggctgaggtaaccgaggcagctgctgctgtgcctcctcagcctgaacatccgacggcaattgttgctcgcactctcttttcatgcgcagctcaagctcgttttttttgtatgaggccgattttgtaaaaccgtttcattttagtattcagtcgagtgtaactgtcaagtcttacacaatgtgtatgttgtttgtaaaagattcacttgtttgtaacacttgggtttattagcactgtaacgcttgagcttctttctcactggaacgcttgggcgttcccgatgtgccgcctcaagtagacttctagggcacatcaacaaagatcccgtgttcttttgtgccacgggatctttgccgcccgttcctcaaaaaacgatataaatgaaatgtgctgtgttcggaaaagcgtactccactctggtaaatgacgtcaaccatgtggaccactgatcgacacttgtacacttatccattctgccccaaatggcacggtttcttttgatttaagcaggaggaagggtgccatgacgatgaatttccattcgaatacgtcctggcgcttacggagcgagttcctgaaatagaaacattgagcatggttgcgtacagcgcacctcagatcgtgagagtccctcgggtcatggtcgacacgctgtgcgaacgacaactgcacaacaatgtagagatgcattgtcttcacgaaatcgtcgatgcgttgactgtcgcactcgaacgtttcaacggcgactctgatacgcactccaagtttcaaacgatcaagcaagacttggagacagcgatatcgaacacacaggcgtcgtgttcgaaaatgcgcatccttcttcggaacaagatgatgaagaaagagctcgtcgaagtcgcgtgggcttctgaacgacatattccctggtgcctcgacgaagaagaaaaaaatgggttgtaacacgattcacgtaaataagatgtacagtagcatgaaaagtcaaagtgctcacgatgtgagcatcaataatattttcaaagcgttcctgtaatcaaataaacacccccccctgattgtgcgccatacgtttgaatcatcatgaatttattgctgtgatattgtagagaaatggatcccccgactcgcgagcaagtcgctaagctgcaaaactgttattgggacgtcttggaggagaacgcagagttaaagacctccgtactggaaaaggatgagctcattgctcgcttgcgccggcaactgaacactgctaaccacaaggtggctaagctccaacaactggtcgacccgaagatgttccttgcctctacagtcggcggaacagtaaaatgaaacatatatcagatggaaataaatgtacgacatcgccgttagaaaattggcgttaagaatggtcgctgacttgggtgtgttaaaaacttcagtgtttacgaacatcagtcgttctactctgtggaggtggaaacgctttggtgtaaatcgaaaacgacgtgaatttgtaagcaacctttttgagacgaataaggatttgttaaaatcgtttttattgtcaactcaatgcacaaccgcaagaggcgtcgttgcttttttcaaaagtactcacaatgtacgattatcaactaaaacagtgtatcgtttcataaaactcattggttttacaagaaaaaggagcaaactccgtggacagtgtaaaggggacttagttccacttgtcaatgaattttgtagtaggtacaaggagactaatttgtgaatagatacttgttcaaatgcaatttatgtttattgcaaacctgaaggaagtgtagttcatctggatgtagtccaaagatgtcaacgtatatgagggctgtttcgatgtcacatggacatgtgtgactcatgttacaaattgcctgcaagaaataactttccttatttaccaacaatctccctggttctccagttgttcgcatgtgaggcagatcaatttctatgtctttgaagtcttcacagatctcattgctcagactcacaggtatattatagcattcttcacgtgaaagaactctatccacctcagcaacacgttgagtggaagcttgaattaccatgagacatttgtccatatttgatttttcatacaaaacgttctgacgttattcgtttattagtgggacaccctttatacaatttggcgagacgtcggagtcatctgattaagatcacccagatgtctgagtttttggcacattcataccaatctggatggtgcccctcaagcgtaagccacccctccgtacgaacgaacacacgcaaactgaggaacactgacgacgacgatcgaaaaacatctgactccacatgcaaacggcggaaacatgtcctcgtctccaaaagacaccaccgcggattaatgtgtgtcgcgtctttcgcaacctcattcactatggtccggtcatccaaagaaaccgtattgtatcaagcaggctcctgcttgagaatactatgggaattcttaaggggggatagcgggtcccgcggagtggggacagtggaattgagctgctgactcactgacttatcccatgtggcaccatcaagcaaggaacccagctgcggcttggctgttccgtatacaaattcaaaaagacccatcttaagaacagaagagagtgtagtataattcaaatataaaacaaaaaaaatcgcgtattgtcatcacctacgtgcgaggatatttagctttgtaatagcatggatcgatacagaatatacaactgcacgaaaagtataacagcaagcagctccagaatgcccttttcctgagcggaagatacccgaatagccttacgtaatcgtccatgtattcccatgcccacgtgtttgccgtgtacgtcttttctatctctacaatcttcttcaatcgagcagcattctggtcgtactcaattttggcaccagataataggtggattgtcgtgccgtcaaacgtgaacatagtcttattcatcacgtttgatgtacgcctgaagtagaatgtctctttgtacaggtcgagtatttctaaacatttattggcgtcatcctcattatcgaataccaccattccatgtaaaataaacgtgttgctcctgtcattccacgtactacctgaaactgtgaaacacgcatacatgcttgtctccaacttcttgaagttatccattgtttctgtttgggtgcgcaaaagcaatatactagatttttttttttcttgaatttttttttttgaatttgtaagcaaactttgtgagacgaacaaaggtttgttgaaattttactgtcaactcaatgcacaaccgcaagaggtgttgttgcatttttcaaaagtactcacaagtaatgggcgttcctgcctcccggtcgattttgactgatggttagatgtgactgttgttgacatcaagtgttgtgatacggttctcatccaagtgttggcaacatatatcacttgacaagcatgaggttgattgcttgaaatttttcatgtcatagcacgcattgttctttctcatcagcacaccatacatcggaaattccttgtgaatgtaagcctcgtacactattcccacgatacttgttgtcttatccaagtcgttgtgcgttgttgggttgtctacggttacaattaccacttcctcactctaggtaaaatcattgggaacttccaggaaaaaggcaacgttgtggtgatgggtgacttcaacgctcgggttggtcttggtgtggacaatgatgataccgagttaggagatgaaccagtatcccaaaccagtagtacagcccccaaccaaaccattcaaccgaggtgtagcatggacacagctccccccaatcgattggggggggccctactccagctatgtgtagtaactggtcttatcatccttaacggtagaacagaaggtgatatgcaaggtgcacataccttctttgcagatggcatggacaagaaatctgtcattgattatgcgctagccgcccctagtcttctcaacaccccaggagtcaagtttagtgtggctcccaagcatgactgccctctcaggcccgggggtggaaagtttgaccacatgcctatcacactccacataccagatgctgcccttaggccttctcaaggtactattagtacacctgctggtggtaaaccttcgcccaaactgaaatggaaagacaactatgtccagatgtatgcacacacaattaagcgtgatccagacgttaaccgattacttgacaatgcactccatagctcatctatggaagattcagagaaggggattgctagtgctattgaactagccataagcaaatgcacaccatgtcacaaacctgtagctaagcgtaagcacgggcccgtgaacgcatggtatgatgatgaatgcaatcgtgctagacaggcagcaagccaagcagaacatcaacatggctctagctctgacttggctggttctatgcacaaggagtacaagaggattctcagaagaaagaagaggaagtggctagaaacacgcatggagaaccttcatacgaatcttcggcataatccgaaaagtttttggaaagacgtgcgtgagcctaacaaggccactacggcagatatcacaattcatgattggactgattattttgcagacctctttgatgtgcaagtaggtattgatccaagtctggatgctagggactttgtccctcaagctgatggacctcagatagaggccgcaccaacatggttatgtcaagactttaccacccaggaggtgttttctgttctccaatccctacggaaaaactcctcccccggggtagatggtatccctgcagaatggtacagatttgcttcccatgaggccaactcccgatttgtacaagctatgactaacctgtttaatctcatctggaagacttcttaccctagccaatgggctgcagctgccttggtacccgtacccaaatccaaaggcagtgtgtatgacaaggacaactatcgaggtcttgcggtgagcaactccataggaaagatcttctccctttgcatgctacgtagactagatgattggtcagaagaattcaacctcagagccgctggccaatatggatttagaagtggtaggggtactgcagatgcatcattcattcttaaccatattgtagataaatatagagaaaagaaaaaccactctttgtggcttttgttgatttcaagaaggcttatgattgggtcaacagagacttgctatgggattgcttagcaaggctaggagtcaaggacccctatctcagtattctgaagtccatgtataatcatgttgttttccaagttcgcctacatggggacattggatcctcctttccatcccttgtaggagttaaacaaggagaccccctatccccactcctattcggtctgttcattgatagaattgaatcgttcctccaatccaagctcccaaatgtaggggctgagcttaggggaaagattctgcaactgttactttatgctgatgacctagctataatggcagaatccccggcagatatgcaagcgatgcttgactgcctgagagatttctgcgaggctactaagatggctgtgaatataaagaaaactgagattgtcgttttcaacaaacaattctgtgatgaggcccgcatggatcctgattacagatttgtctatgatggagcacaactttctacaaagttatcttttatctacttgggatccctctttgtggatggtgactcaagcaatcgtgcaaaagctgctttttctaggatgctcactaaggcccaaaaggcacaccacatgcttcgtaggcgatgccatactatggagatatacaatattgatattctcacccacctgtttgattctcttgtacaacctatcctgaattttggctgtgaggtgtgggctccttctattctgaacaacacacttatctcaaatgaccatgcttgtgagaaatggcatagaggtatacttaaacaaatgttgggtgtttgccaatctactacatctaatattatcatggaagagctgggtagaaccccgttgtgttttgcttggcttaaacaagctttgcgcttctggaacaagaccatacataaagaacctgaggatctcattagaatggctcttgaggaatcttttgactccaacactggctgggttcatgacttgcgttgtgctctccacaagctaggatccagtaaaaacatcaacattttggaggctgtcgatgtcgaaggtattatgtctgaagtttttgagtcatggaggtttaagtacccaagtgacaccaatgcagttagagacatccctgatgagagaagggttggctttaaacgcctccgataccaaaaatggttcgcagccaacagcaatgatgagaatggcttgattccctttacatccgccttacataagcaggatcagattcgttctatagcacagtttagaatgggttcccattggctgaacacagaaagaatgagggtggtggatagagcacacatccctcgctcaatgagacactgtcaaatgtgtgggttccaaaaaactgaggatgaaatgcatatgtttgagtgccctttttataatgatattcgcctccgctaccagaatctgtttacagatatttataggcatgtccatgaggataccgacttaaccgtatggaatgtggaattctgcgattccacattcggaacctttatgaatggaaatggcactaagtctttttggagcaacctagccgactatctttctacttgtagaagagcaagacaggaagccctggactgcttagtggcaccgtaatttattatcccttttttttcttcttgagacttctcatttgttagcttcttacctccgccactgtaagtggttgagatctgggtcctgctctaaggggtttaatacctacgccaccaaaacggtggttgggagtttggtttgtttgtcctcgacacacccctgatgtaatggggttttttgctttgtgggtgctttttctttttgtttaaagcacagagtctcatacaccctcgcggtgtcaagtagactttaacatgtaatgtaatgtaatgtaatgtaatggaccctacagtgtacgtgggattctggtaaggtaagcaatccatgtctgaagatcgtgttttgaaatatacaatataaaccctaaacaattatcagcatggaaagcgcgaaggagtgctagtctcacccagctacgcctgcgacctccgtacgtacagcacgacgggttttgcaacggatgttgagcgttttaaggagtcgctgggagaaggattcagctgcaacgttatgggcggcacttccgaggttccaaaacgggacctgagagccgccatactgcatctcctgcagcccggcacggatgtcgcagttctgctattctgtggccatgggacgtggagtggttcaacgcaacatgttgcccttgtctgttcgtttgggcagcagattacagcacaggagatcgaggacatcgtagcacagcaagggttcaccggcacgtttgttcgtgtgctgaacatgtgcgatgaaggttcaacgcaacacgcatctacagtcggcggaacagtaaaatgaaacatatatcagatggaaataaatgtacgacatcaccgttagaaaattggcgttaagaatggtcgctgacttgggtgtgttaaaaacttctgtgtttacgaacatcagtcgttctactctgtggaggtggaaacgctttggtgtaaatcgaaaacgacgtgaatttgtaagcaacctttttgagacgaataaggatttgttaaaatcgtttttattgtcaactcaatgcacaaccgcaagaggcgtcgttgcttttttcaaaagtactcacaatgtacgattatcaactaaaacagtgtatcgtttcataaaactcattggttttacaagaaaaaggagcaaactccgtggacagtgtaaaggggacttagttccacttgtcaatgaattttgtagtaggtacaaggagacaatcaatgctgggaaaattttagtatcagttgacgaatgtgggtttagtgagcgtctcaagccacattatgggtattcccctgtaggaaaacctgttatcgttaaaactactggtgggtgggtacaccacagtttgttgatggcagttttttcagatggtaggaaagagttcgttgtgaagaaaggatctgtgaagaagacggacttcgttgcatttattgaatcattgagtttgtgcaataactcagtacttccctaatgtattcacggtaagtggggtacccgccatttctccgaggattcagcaaggaagcgaatcatcctccgagaagccctgtgatgcaacatcgtgcaa

SEQ ID NO: 256 - DNA, 21875 bp, unidentified
  misc_feature 1..21875: note = Fanzor polypeptide
  source 1..21875: mol_type = other DNA
tctttgcatacttggtggtagcactcgaagtagtaggagacgacgacaacgtgatcatcttgtacgttgttgtggttttggtcttaggtggtggctctttggtcttaccgctttctacagcgccgcctgtcttaccattggttttcgtgacagtgaccgtggaggaggacgtgtgtgggggaatgatgtactgtttacgacgcgtcgaagcacgtacggtgctgctactactattattataataacgctccgttgcacttgttgccccgagagttttttttagagcagcagacctcttcttcgcaacctgtttatccacactactatatcttggtacttttgtaacttgcggtggtttgttggtgacagtcaccacttttgtggtgggtgcttttaagttacttttcgtgttgttgttgttgttgttgttgttgttgttgttgttgcttttgggtttaccttttgtgtgtgtcgacacccggtttggttctttcttcacaactactagcgtagcagcacgttgtgttgttgttgttgatggctgccgcattaggcaattgtagtagtagtacaataagtttgttgcataattttggagcaatttttttccacttcccaagatgaattgtgattttcactttgctcgtctcttcttgacataaaagacatgtcacgacgcacaagaagaggagcagaccgcatggagatctgatgatgatgcatgatgtattgatgtcccattacattaaaaacaaacgcaagaaaataagtgtaacattattgactagctcgacagtaacgttggtgcgtgcgtaagttgcaagaacaaaaaaaaacgcaagaggaggtaccccgcaagctgagcccccgctcctccgaacaatgcggtttgctgtttgtttgccagggtttgggtcagggtttggcggggggggggggggggggggggggtatatataccggtgaggtgttgttgtgttgttatgaatgaagatgatcactcctcctcacatctcgttgttcttaccacacatcaagcaaaatctggcgcttactacgaccaccaccaccaacaacatttcggtgtcaccgcaccacaccacaacagagcatcagcatcagcatgagcatgagcataataataatggactactccttgttccttgggactggcgtggactgagctcgaacacaaacataactttggagatcgtacaagataatccagacaagccatgggactggcgagcactgagcgggaaccccggcgtggcggcatcgtgggagatcgtgcgggacaaccccgacatgccgtgggactggtatgatttgagcatgaaccccaacgttgcgacatcgtgggaggtggttcgggacaacctggacaagccgtgggactggtatggattgagcaagaaccccagcgtggtgacatgggagatcgtgcgggacaacctgaacaggccgtgggactggtatgaattgagcgggaaccccagagtggtgacatcgtgggagatcgtgcggtacaaccccgaccttccgtggaactggcggaaactgagctcgaaccccagtgtggcgacgttgtgggaggtcgtgcgtgacaacccggacaagccgtggcactggggggcgttgagttggaaccccagcgtggtgacatcatgggagatcatgcgggacaaccctgacaagccatgggactgggaggggttgagcagaaacccgagagtggcaacgcgggagatcgttcgtgacaacccagacaagccgtgggactggtcctggttgaacagaaaccccggcgtggggacatcgaggagggggttgggcgtgcgggacaacccttacgaggcgtggtggaacaggtcctgcttgagcatgaaccccagcgtggtgacatcttggggcatgccggacagcaccgacgagccgtgtccgtggaactggtgggcagtgagtcataaccccagcgtggcgacgtgggagactgtctctgaaaacccttaacaaaccatggtgttggcggacgctgagcaaacgcacagagatgctgttgtcggatttagaaagggagaacatcatctgtaagcacctggcaagcaagcggatccagagggcatggagacgagcagtcttggaccccgggtacaaggcatgcaagaagaggttgaggcgagaatttgaagaaatgtaactcactcacctgtacccgtccgtcctgtctgtacctgaggccaaacaaacgtcggcaatgaagctattacacttacaagtccactctcctccgtcagttcggcggattttttcacacagacggactttcactttatcagatcgaaccggtaaaaacggttcaaggaagtcttgtacaggtaacgaaccagacgatcgtaaacctcttcaggattgctcatcatcatgtggctgctaccaccaccaacagaagaaccacgctcaacgtaggtgcacacgcaattccaaatacaatctacaaagtactcgtgtcgcgaataccactcgtcaagcgacatcacggaggatcaccacgacgacgggggggcccccctttaacatcatgcaccattatttcggatctcaatctcaacatatatattgttccaaattgggtaaacccttatgcaaccccccccaccgtacatttcaacattgagaaactttgaagaggggggggggtcagaaaaaaaacaagtttctttcttctctcaaatactcgaaacggaaacacttctcttgctcctcctccagatgacaaatttactacttcttgatgtagatggacatacccttgcaagttagcacaggcttggggacgaacgtcgggttatcgtagatgacaactttattggggacgaacgtcgggttatcgtagatgacaactttattggggacgaaggtcggtttatcgtagatgatgagagataccttgggttggggcgcaatgattgcgatgaagtcaaagactccaaacatttcttatgataaatgcagacagagagaagtacgaggaaacgtacggtgtgttgttgtgttctctcttattccgaaaaacctttcaattttttttgtctaaaaacgacattacatacattcttaaactacgactccatcaatctcatctgttgctgctgaaaatacgagcttcccgccggggatgtgtgaggattgatggacacaccaacaccaacaccaaagccgccggggatgtgtgaggattgatggacacaccaacaccaacaccaacgccgccgggtgtgtgtgaggattgatggacgtgtccgcttccacatcagaaggggccgcttcagagttgcacgacttctagcaaacactccacattcgcgacaccatccctcgcggcccttttcactagctccttctccacatggtctatcgacgccttggccaggttaatgaacccacgagtgatggaagtgcgaccacaaccagccacaaccttacggtacatggcgaacatctccatgcgagagtttggaacgctgttgaacaacgggtgcgccgcagtctgattgcgatgctggcgcactttgagcacggccgcgcactcccgaagcatggtgttgaaccgtcgtgttgacattgaggtaccccctccgtcgtcagcttcgtcctcgagcacgaagccatcacttgcttcggaccatgcaccagacgtctctgactcgaacgcttcctgcagggggcacctcatggccaagactgcggccttgtgctgtggcgtccccttggcccatccaaactgttctggctcattgacaaaggtcaaatatgaggttgcagtgaagtcaaacggctcccgtgcaactgcacccatggcactgtcttcggcctggctgttgcggtacgttcggccctgccctgatccccaacacttgaccaggcggtccatcaagttagatacctctggcggacccctctgcagagccctgagcaacgccgatttaaagtatagactcgatatattccatgcgtcagcaaccagaagcggcacggtgctcccgccctcttcgacttcgagcgcgatctgtgtcagaacctgctcattgattgagccgtcgtcgctacactcaatccccatctcgccagacttcatgtcgctggcgttcatcaccacgtccgtgtacggccacactcctcctcctgtgtgtgtgtgacctaatgctgtcaccatcctgcagccgctagtcgtgcttcaaggcttgcgatgttactctgcgcaagttgtaaatcggcatctttttcttggatggacttgatcaagtagggaatcaaaccggtatagttcacacgtgctatattcgacccccatgccgtgtaatccggatcgagggatggatccgatgaggatggtatcgtgtagctaaaaatgacgttgctgtcggcatcctcaggaatggtcaccaagtggcgcaactcgggggcgtcatagaagatctcctgtgcaatcaatccagattcccttacaaaagaggcgtcatcgttcgtcgcgaagtcgatacttgaccatttgttgtatgtttgtggtctgagctttttcagagtggatgtggcgttctcgatgaacacttcatctgttttgatccagtcgtcagaagaaggcgtgaacgaggctgccgttgcagaacccgtaacggagagagtcccgctcatgttagcattgactccgtagatgctcgaccatcttcgagcactatttccaagtgggcctgcagttgcagtattattaggatacaaactattcgcataaacacttccattattgatccaattcaagtatagatttgctgcgacattcgacgtgtctctatagtaagaatcgatattcgtaccattatttgtagtatacatatccaacttccatgttgataagatacccccggacatagctattttcgcgcctcgaatttgagaacgttggtctaactcaaaaaacagtgcaccgtttggtgaattttttgtattgaatttagcgtcaactccatcgtcatatacattgtctactccgaccataagatcattcaaaaccgccaaggtccctgtagcactgacgtttcctgtgacagcaacaccagcatcattcacgagtagacggtgtgctccgttcgtagagaacccaagagcgttcgcaccgtacctgtacatgccggtgccggtatcggagttgaatctataggcagggtttattgcagttccgttgttgacctccaatactccttgtaacaccattttattgtagtaaatgctgcacatctctacttgagtattgttgttgctgccatacgaaaaccgatgtttcgagtttatattacgtgacacgtaatcaaacgtgttagatgtgatggccagactataataattgctgtttgcactcgacttgttgtcccacaacacaatcttccttccgtttgcgtttgatccgaagtcgataactttgttattgggaatgatgacattaccaattccgaattccgatcccagtacaataacgcccgctcctgatgtgtgattcaagctgagagtggacgcatttatactgaacggtttcaggttgttggatagtgaaggaagaacttgattgtcattactcaatgtcacattcctagtagatgtaagaaaaccgcgcgtggtattcacgtgcatgagtacacgaggttcatcgtcaggtgcagatgcggaattgcgtgcattaaacggataggtggcaaacaagtccaatgtcccactgtgtgtcacattagacaaggttgggtttacctctaaaacgttcctgccggaccctgtaacagcaatggcgccggtgcggcccctgacaacacttagagtaccagaagcaacgttgttggcgttgagtgcggtcagtccacctccgttcccggcaaaggtgccgccgaccacggtcaggttgctcatggtggcgttatcgctaagcacgttgctcctgctacctgtgccttgggatacgccggtgccgcccctggcaacacttagagtaccgctggtgatgttgctcgcctcggacgcaaagtcttccgtggcgatgggcatgagtgatccctcaggtcccatgacgaagttatcatccgcctcccggaacatgagctgataatctagttcatcacctctatccacggagattcccgcagtccccgcggatacaccacttcctacttgtccggagttcaagatcacgatattgtcctgaacggtcatggtctgcgcgttgactatgaattgggagccattgatggtcaagtccccctggatttgacagttcccctggaccgtcatgttcgaggacacgttcgtctcgggggcatttatttggacgtctgaaactgcgccgagcaccacccgtcctcctgacccgcttgccgtgacgtccacgaccgaattgagtcccgaggttttgatttcgacgcccttggtcgacgtcaccgtggacgttccgagtcccgtcgtcttcatcatgatgctctggtctgtgtcccccttgatcacgacagaaccttcttccgtgcccagtacgggtgtgtccccccccatgtacaatgatgtattttgggatgagaggtggatggaatcgatccatgcctccttgaaaggttgtataacactcccgatgtatagtgtggactgcgttgcgggaataaggttggacgcgacgatgacatcgttttcgacggtcagagttccatgaacgatcagccctttgtcatccacggttgccttgttcacccctcccgacacgacaccgatgctgtcaggggagacattgtatatgcctgtgtccgtatcgtccaaaaacgatagagacggtgcgttagacgttccggagagcgcacgcacacctttgagaggcgggtgcaaatcgttcaccaagttggacgtcgatgtagcccttgtcgcgacctcgctaaagcgtataaaggtcgtcatgatgacgacggcctgtgtgtacccttgatcaagaaaaataataatcggaataaacggaacaacaaccgtgcacaagcaagatacagaagaaagatggtgatggtgatgacaacccaaactggattaaggtgtattgggagtattcttcaccaatggtgcttgtgctgcatcgcttggtgtgtgaagccgctggcatcgaaaataaagatggcacgccatcaaagaaaattgtggttctggcgccaagccacatgccttattgcttatgattgaagcggcgcgtggatgacactcggtcgtcaaagcagacatgtaaattctgatgatttccgtataaagagtttgcattacatttttgtaaaaccattttttgtaaaaccatgtaaatatattttgtcaaggattcaaaaaggtcgcgccatgatatccattttcaattaccgaaccgtaccgctgggcacccccgaccacctgacccatgtgtctcttttctttgccaagacccgggcgcggcgtgccagtgggggtggtagtagtactgaagaagccaagaaggtgacaaagatgtacctcaccacgctggcacacctttcgattgcacgtaagatgacgaatgaaaatgaaaaaacgatagccacccagagcgcgccgcactcctggtgtccaacaacgactttgtcacgcaagagctcctctctacacgacgacgtatgcgaccgaaccaggggggtttcccacacccacccattctccccccactcacgctcccacccccatctctatcattatgtgcggagcatgtcccactaaacgttgccgaatacatggatgctaccatgggtctcgatgtggtgatactcgccgcccccctctgcgacctggccaacaggcctgactgtgccaaggacatgcgctgcacggtcacgctacaactcacataccgccaacccagctcggacgaagtgatggtacaaatcgtcagacgcgactagaagaatcgcgactcttcttcttcaaattttaaggaccgccgccgcccatgaagagaacgtcgcccgggaggtcccctgccacctttatgcagagaggtcgaattgcaacagaggttgaattttcctcctctagcaggtgaacgaacaaacaccgtcctcctgactcatcatctggtagagagaagcatgccaacgcgtgccatatgtgtcggcggggggtacactcctcttcctgagaagaagaagaagaagaagaagaaggagaagaagaagaagaagaccagtgcccctcgatcgtcgcgcgcatgagacgcggtcgctcgttcttcgtctcactgaacgcgtccgaagcgatggccctcagtgcggctactatgttggggtacgtgtttgcatccgaggagactgggtgagctatccacgaaccagcagcggtcttgagaacattggaactgtctggtgccaagtacgacgtacttacttttttttccactggtcgaatggccagctgccattgctttgcaaaagaagaaaacgagtttgaatgggggtcgttgatcgctctcacatcctccatcagcaaggaacagaactcgcggcccacgcatgggggcggtaggagccccctggatagttcgttgtatatttttgtcccctcctcctcctcctttcgtgacatcatggcggagggtgtcgaggagaacccttattttttagtgctactacgaggaggacgcgtgtaatcataatacaatatgcaacaatatgctagtacaaaaaaaagcagcatcgttgccgctagtagtcgtagcacaatctgtaatggcatgatggatggtggagctcagcaacgtgtaatataatcatgtttcattttattgacaaattgtaaagaacgatacgatacaatccgaggctttctttcagaagtcattgaatacaacttccggaccttgacatacagctagggacatttgatagtgggacaccttgtattttggggatttgaccaattcaagttttgtaaccgatcttgtcaatacagatactgtcttcaggagattgacacaaaacattcaaggcatgtaaagacacagaagttacatgatcaaagtagcctgacaagtcaacgtgttggcttacatcgtgcgcatcaataatcattttcaaagcgttcctgtaatcaaataattctgctacatctggaattattgggcacgcgcagcgatattttcgcttgagcaaactgaacacattatcaatagcgttaaactctggactgtaaggaggtacaaagagcgggcgtattcctacagaatcgaacgcagagatcgtctcctttgaatgatggaactggatattgtcaaggacagcgacagtaccctgctttacatgtaactctgatacaaactgtacaaagtcgactttcttgcaattgtgatcaaggattttgtaatgaacgatacctttgacagaaacggcagcaatcagcgtcaatttggacattcgcaatgtccgagaaatttggatatttaaacgtttgccgcgttgacagtaccctctgcgacaagtgtcaccgatgtaaaaacccgcctcatcaatgcttatcaaatccgatgtcggaacggccagatactctttacaaaaactttcgacagaagatttgtggtcattcttgtgtcgaactgttttgtatgcgcgcttgcgggtgtagccaagtctgcgtgtgtagcgtccaaacgtttttggagacatcttgacagaggacagagacgtcacaccctctgcaagctgagacattgtcaataagggattggagtcgatcagtttttttatagcaatcttgatatcttcggtaatgacgctcgcccgtttcttccgatgatgttttatattggctttggtgacccaacgttgaagtgacgattttgatactttgtacaacagactaactttcctcaagctacgattatattattgtagtgaacaaccgcgcgatgtcttacctctgcatcaatcatgataacgtgcgcgtattagggtatcaggaaattggtatcaccaaaagaaaaataatactccctccctcttaatgggggtggtgtcagaccaaggagacgatgacgatcttaacatcatggtggtcaagaagacgcttaattctctgtgcatggatgtgtcgaggcaacagatctgctcaaggatccaaagcatggtactcttaatcaaccacgcagttgcagaggcatacttattcgcaaattttcatatcaccagatgcctcgatgatgtagactttgacgtgaagcagttgccgcacctggatcgaaacttttattacaggtgtatccttgcggtctcgacatccaacgttcgaaaggatacgctgggccagagcttgaaggatagcatggttgctttcgacgctctcaggcctgcaggctacgtaaaggtggacgttcgtccatggggacaggtaatcgcagacgtctcaatacaaatggcgacgatggcatgcaacagcgtctgggcaaacgtggacagggttgtaatcaagtacctgcgcttgaaacatccctcgttgaagaaacatttcaagaagattgtcaaagcggtggtccagtatccagaatcggtagtcgacaaaatcatcccagcgggccttgtgcatgcgagccacatcaaagaggttgtcaggcacttgaggactctctttccgctgccaagagggaagcagttcaacactagagcgcacctgacgatgcgactgttccatcacgtgcttacagagttgggggaggtcggacgagcggagccaaaagagaacaaaacaaaaaaaagtcgcccccgtctgttcagtatccttcctcgcaagagcggcttcacaatgtcttacgtccctatatcgtccatgacgctcatgaagcttctcagcatgggtgattcaccactcgagagcatctgtggcgatggacgtcacgcgaatcataacatgttgtggcgaaagtacttcaatgtccgaggtcttgagacgaaaatgtctcgctttgacaaccgaatcctcagcgacggtaaaggggtctcggtccaaatgaagcataagggtaaagacgatgtcgctgacgaaggagataacgcaggctatctcaaagacgcaggtataaaagaaagtacgagcagtatgtcagacctgcgggaccatgtcataggttacctcgcagccctcccgatcctcctacaccaccgaggcagcagaggctaccgatcgatgcgattctttcgatacgttggcaaacagaagacgatcgaaaaagtatgcgatgtgattgctccaagggcgcaaacgaccgttgttggcttcggcaactggtccaaccagggatacggcatcagttgttcatgttctgggcccgtgaaagagatcaggaagtgcctttctcgtcgtaagaatgttctgttcaaaaacgtcgacgaacgcaacacttcatgtacatgtcacggctgcttccagaggctcgtcaacatgaaagcagacagtgtcgtttggcgcggagattacagagagtcccctatcgacgggactataacttttgagaagcagaagacggtggtgaagaacgtcaaggtccacaaagtactgcactgtagagacagtgtcaaaagcgcatcatccaatgtgcgctgtggtgcaacctggaaccgagacgtgaacgctgccaagaaccttcttctgcttctgacaacgtggatggacgggagagagcggccggtggcattctgtgtgccctcgcctccccctgaaaccccagtttccagagaggcaagtgtgagtgctcaaccgaccgacccacatgggtctgtcagcagcttaccttgttatcctttgggccagcttaactgctgaaatacgggatgaagagcacaaaatgaaatcgcctttagctgacctacccattgggttcaagggtcaccggtaaggtgtcccacaatttgtgtctccgactccgatgaggtttagggttttaagcctgatgaggaagcaaaaaaaaactaaactacactactactaaacatggtcaaactacatcagacaacctatggggaggtggatgattcaccgctggagacagcggatgtggtggcgtcggcgtcagatgcttgaaaagcgcgggctcgagaggtgagcgaggtagacggattcgacctcatctgctcgagcagctcctttctagctttatggtccttgagcgaaaccttgatcttcttctgcttggacgcggtcagcagctctggattcttgaagaaccagtgcgcgtcgcgtttgcagcagaactgcaagatcatggcgtcctcgaacttaaagggcttgccgccgtttctgacagagttagaacaaaagccgtcccctttgacgttgacggcatggcagacctcttcgttttcgggtagcgctcccagccccagaatgaattcagagtagggcatgcaaggctcctttgctttcttcccagcggccaacttcagttcagccatttgcttgttcatgcgttcaatataccttgcctgttccatgatggtgttttccaaattggcaggagaaagagaagacatgttttcgagtaaaatcgagtaaaatcgaggaatcaatcggcaaacagttgtgaaccgtagtagtaagcagtgtttgtggtgtggttgttgtgtgttctagagatccggaaaaacaattcaatttttttctgggcaaccttaccttactcatcatccccacaacatgtgggggggcacaacaaccaccaccaccatccccgctcgtatatctccttatactcccgctcttctactgttttttgtctgggcggtctctcaaagaaaatgactgtctaaagaaggaggttgcatgatctgggcataccagtcccatggcttgtcagggttgtcacgcacgacatcccacgatgtcgccacactgggatttctgctcaacgcattccagttccacggcttgtcggggttgtctgagagtatgcaggacgtatgcgcgggagttcctgcagtgcagaaaattttcatgattatagataagaaatgatgatgtcctccctgatgttgtttaattacggcgcattgggagccgtaattggtctggtcattgcatctgcgggcgtcattacaatgtatacaagtgtccatgtgtatacagaacatgacagaacaatttgacgacccattacggtccatggcaagcaagcccgtccaagtccgtgtatgcccatgcaaaaattgaaatttttgaagttcacctgttctgttccagatttttctcttgtttgtgtgtaagaagcgaagcaatggttctttacgacttggaacacctcattcaaccgacctcagagaaggtgtgtgggccggtacaggactatcagcatgtatagcggtgctctcacgcgttttatgacttggtgactacttatgtactcccttagaactatcggctctcctgagccagcttcccgtgggactgagtcatcttgagatgattcagtggcagcttcctgtcacctacgtctccggtctgatctgtaccctgttaggttcctgtctaccgcctcctttcaccacaggtgcccctttatgggtctcctgtgtctgtaacgttatccttgtctccgtgtatagattggtgcgtctgttccgctgctttaatctactgtccactctaccggagtgatttcaagctgataggttactgggctcctcatcactagcactgctttgataatgcaacttccgcgagggcctcctgccggctttgtgaaacttaccaaacttaatggtgtttcatgggctcgtgggatccgcagtgtcattgtgagcaatggatgcgaccgaatcctcccaacgggggtgaaggttcctctagattggctagacgactgcgcgccagcggcctctgctgccggagaggagggtccttccgccatcaaggaagtaaccccccccgatcaatcctccaactttacggttccttctctcaatgttcgacgcctgtcctctgatgttgaggatgtcctgatgaagctgtgttgtgtacagacacagatcatccgttgtgcatcagacccgcagcctcattgcgtccccttcaattatgatgaagactactctactactactgatgatgaggaggacttgaagagtgctacgagtgctgactccggtggcgtgaccccatctgctgctgccactcgtgtctttgagacttccgctgtttcgccggtgtatgagcctgctgatcagcagatgcctaatcgagagctttcgcctgtgtatcagcctcagccttcgtcggcgcctccctttgagcctgttcccccggcttacccggaggtggctaagcccactttcttgaagggctttgcttctttttcctctgcatctgcccccatggagcgtggcctccctggctaccacactcgctctcgcgaggctgctgtttcctctgcacgcacctctgctgctggtgcctccctggaaccccctccgcctccgccggtggagctgcctcctgcccctggccctcctcctatgctatatacgcggtcatgcgaatcttgggagcatctgctcactggtggatctcctccgactttgaacttgcgggactaccgcctgatcaaccaggatcgacgggatggtgagtccttgaaccgctctttgtacggtcggatggatatgcaggctacgatggcaaatgttagtgtgaagctgaggcatcgccgagtgatggctttctctgagcttggtaccaggtgtcgttcttttcttggtccagtcacttctgggattctgtatcccccagatcatggtgtttcctttggtggtacgaggcgtagtgatcacgagaagcttggttatcagtttgtgcgagtgcctgtccctctgtgtcctgttagcccagatttcgagctgcttatgagtgttgcgaggtccattcctgtgattaggaacatagacgaccagcgcgctcttgacgctggtcttgctgcggagtatttcatggacattcgtaggtccttggctcctgtcccttctgcgaatggagctgggtctaataccctcattcatggtgagtctcggtttgatcctgcactgttggggttcagtgcactgcctctcgaacgtcaggagttcatgtgtttaactatgatgctcgcgaacatggaggacgatatggtcaaggtataccaggactttgccacccctcgggatatccttttggatatccggaagacgcagtctgatgcccttgcctctagagtccctctcatgcgtatcgaacttcataatgcgcacatgggcccttctgaccgtgtcgatgatttctttcgcatggttcgcagtctgtgcactgacctccgcagtgctggacatcctgtcactcagcgccacgccatggaaaccattgtgaatgggatccgtttgatccgatttgaatcgctgcggatccagtacggtatgatgttggctaacagacagactgtagattactggtcttgtctggaggcatatcggtctctcgacattttgaacattgctctccccaggtccgactccaggcatcctggttggtcccgggacgctccccaggttcctgccaatgctgcgtttcagcgtgggcagggatctggttctcagggttctggttccaacaagcgacgtctggattgcacttggggcccatgcctcagcaagacgacccactcggaggatcgctgtttcacgaagcatccgcacctgcgtaagaccaagcctggtgcaccggttaccaatccggtgcccatggccttggcccttccaggtgtgcttactccgcggcagctggcctccttgcaggctcagattgatgggtatgctttggacaagaaataggaggtacgctctgtccttttctcttgcactgcgaaattttcaaatgtctgcagcccgagcctgtctgagggtgtctggcatgttgattctggagctgggatgtcaatcacaggtgatatgtctttgttcactgtgtttcatgcttctgagactgggccagcagttaaatttggtgatggtgtggttcaacggtctgtgggtcagggttctattgtgttatgtagtgattggttaccaacaccaatcactttaaccaatgttctctacatcccacactgtccggtgaacctcatgtcagtaaatgctgttgcccatgctcacaactgcaagatttcttttgatagtcttagttgtactgccacacagggatcttctgttctgtggtctttccctgcctccagtgatggtgtgtacaagtttgcatgtaggccttgtcacacccctcgtggccgtttgtatggtgctgaagattatccagcttttgctcttgatgttgatgaggatggtggagttgtgatccctaccactcctgaatggttgtggcataggcggctgggtcaccctggctatgatgccatgcacaaccttgtaaggaagggtttggttcagaacttacccctcactctccaacaggtgcaaagactgtctaagatcccatgtgatgcttgtcagaaggcaaagggaaaacgtatcccttttcctaaagaaagcaaaactaggatccgtgccccattacaacgccttcacttggacatcatggggccatttaatattaggggcttgcgtggggagttttatgttctgtgtctcactgaccaatactctggctatgctgaggtcttgtgcttgagaaccagggatgaagctcccttagcagttcaaactaccatcctcagatggatgactcagctgcatggatttgttttcaagtgtcttaggtctgacagggctaaggaatttatagtgaagtggttcgaggattggttagaatcggttggtgctgtgcatgaattgtccatggcttacactgctcagcagaatgcgactgtggaacggtacaatggggtccttcagaacgtagctaggagcattcacttggagtctaagctcactaagtccttctggccctatgccttcctcgccgcgtgttacctacgcaaccggctgcctaatcagggtgacaagactccttatgagttgttctttggggttctacctgatgtatcgttattgcgcgtgttcgggtgcccatgctatgttaccttagtgaatgggaagaagcgcaataagcttgacgaaagggcgttatctggtagactggttgggtattctctggtgagtaagggttattttgtttgggttccgaagttgcgccaggtggtagagagtcgtgatgtgctcttctatgaacagtttagctataactgtatccctgggctttttccctatgatggatctcagtatttttctcgcacccctgccgctatcatcggtaaagggcttgatactactgacaatgtcctgggccctttaccaaccccgattgttgaccgctttactggtcatgggatgacgatgcgtcccaggccaggtaatgatggtgctgtatcgcgtgcggcggcattgggccagggggagtctgatgttccttcaagctctaatttattcgaatctcagggggtcgccgggccttcctctgcgccacgtttcgtcggtgaagtcgtaggattaggacagcctcgggtcatagtggaacctagtacaggtccactgcccactagtcgccaccccccgtccacctattcggatagctcgcgggagttgttgatcacttcaccccctgctatacctggtggtttataccggaccaggcattgcgacgatgtggccgtcacagatgatgtgagtgatgacctcgaacactggtccgggtcagatactgcgtatggctggggtgttccagtgtacccaggcttcgacgatttagaggcaaaggaggccggccttgttcaaccacgcatgagtgctgcgctgggggctttattaccggttactgctgatactgctgatatccccgctgcccatgtacaagtacactgcttgtgcgtgggggcttttatttctacctctactgaactctcttataaagctgcaatgttacctaccaacccagacagagatctctggctgcaggctatgaaggatgagatggcctccctccatgctcatggcacttgggtcctcactccacagcctcctaggcagaggattctatctggcagatggttatttgtcaagaaacatggggctgatggttctttgcgttttaaagctcgttttgtagttcgtggttttctgcaacgtcctgggctggactaccatgatgtatatgcccccgtctcctctaaagcaggtcttcgtgtgctccttgctgccatcactcatagaaaaatgtttgtgaggcagctggacatcaagactgcattcttgaatgccaagctggaacctggtctggacctgttctgctaccagcctgagggctttcatgaacttggtcctgacaatgttccccttgtgtgcaagctaattaaatctctttatggtttgaagcaggcacccagggcttggagcaaagatgtaaagcaggttttggttgcccacggttttaccatgtgcaaagctgaacctgctctgtatttcaggagggattctactggtgggtggagctatgtcctgacctatgtggatgactttatctgtgattttagtgagctgcataggtatgccttgctgatcaaggctatggaagcagctgggtgggaagtcaaggaaatgggtgtacctgtccagttcctttcattggacatgacttgtacacttgattctgacggcaggtgtgttaagatcgacctctcccagcactcctacattgttgagctggtggagcagtttggtctcactgctgctaccaagcccaagttttcagttcccatgtccaagtgcactgtcactgatcctcctggagaacctctggcctctaatagccagtacctctctcttgtgggggctttgctgtacctggctacctgcacaaggcctgatatttcttttgctgttagctacctgtccaggttttctgctcaacccactgcccccctgtgggctgcagccaagcgcttgcttttgtatttgagagaacattcccatctgggcctcacttacactcacagccctggtttctcttttactgtctttagtgactcatcctttgctgatgatgggtctgacaggagatctcagactggctatgctgtgcttgctggaggctgccttgtgacctggatgagcaaaaggcaacccactgttgctgttagctccagtgaggctgagtatcaggccctgtctcagactgccagggaggtgcaatggttgaaaaagttgagaattgatctagggctgccttgtgacctggtcaccattcagggtgacaacttggggtccttgagctgggccaatgactgtcagctgctccctcgcaacaagcacattgatgtcatccatcactatatccaggagctggtggaggatggccaggtggatgttgcctatgttaacactaaggacaactgtgctgaccccttcaccaagccccttgatcctatggtgttctggcgtttcattcgcatgtttggaatgactgcttctccttaaaccattttttttggttacatgtattctagaattttggttacatgtattctggaatttttggttacattttagggtttctttggttacatttaaagtttctttaagttattattgattggcattaggttcctattcccggatcgggttttctataccgttgttacccgactttgatatttagttgtcctcttatatccacttggcaaattttggttctttgccttgcttcataccttcccttaccccttcgggtttcatttgaagtttctctcgattttttttttccggagttctttgattttttttttttaatttgttacatatagttctatgtcaccagtgccataggtggagtagtacttttgtatgtcacctgtgtcataggtggagtatcagcatgtatagcggtgctctcacgcgttttatgacttggtgactacttatgtactcccttagaactatcggctctcctgagccagcttcccgtgggactgagtcatcttgagatgactcagtggcagcttcctgtcacctacgtctccggtctgatctgtaccctgttaggttcctgtctaccgcctcctttcaccacaggtgcccctttatgggtctcctgtgtctgtaacgttatccttgtctccgtgtatagattggtgcgtctgttccgctgctttaatctactgtccactctaccggagtgatttcaagctgataaggacactgaagccctgtttctgtacgccaccgtgcgcggcatgcgcatgaagcgcatcctggagatcggtggtttatccgggtactctgccaccaatttcgtcaaggcgttcgccaaaccggaagagagcgtgatgtacaccgtggacattcaacccgttcctaaaatcgcgcaaaaccacattgttctgcgcaaagatgctcgtcacaataaatcgtcggacgtgggagacgccccactcgacctcgtgttcttcgattgccatcattttgacgtccagatggacgtgtacgatcggctggcggctcaaggtttgatcacggatgccaccgtgatcgcgttgcacgacaccaacacgcaccctgccaaattcttttcctttgggtacgctttgaacggcgatccaggcgaatgggtgcaccaggacgtcgaacggagaatggtcaaccaatttgtcgaatcgaacgggtaccacgcgttctcactgcacacgccactgtcctcccatgatgcagagatgccttatcgacatggtcttaccttgttgcaaagattcaagcgcctcgagacgtaaaagtttcctcgcatgatgagcgagaggcgccacagaaaatcgaacagaaaatccctgttcttcgtaaaggacagagatgggggagggggggggggagttgaccccaatgatacccccccccccccctcaatcaagtaagtggtggtggtgtgcaagtgtttcttgatgacaagtactgcacggtgcggtcgctggagcgcacaaggatagtgctaccaaaaagaagccctgcatccagagtgaacgcatctataccatctctctgtacgagcatcagaacatcattcatggaaaagaagggtggtgaaggcgcggacaggccatagtacatgccagtggtggacttgaacaccaccgagcacggagcggaaaggaacgcaaaagagagacgcggacacagcatcgcggacacaaacgctgtgtccagcacaggcgccttaacgatcacacgcatcaacaattcggaagaaggacccccccccgatgaagggggaacaacatacggactcggatgaggcggtggtggaggaggagacgaccctactactggcggcggcggtgaaggaggaggaggaggaggagacgcccctactactagcggcggcggcggcggagtaggaggaggagacgaccctactaccggcggcgtcggtgaaggaggaggaggaggaggagacgcccctactactagcggcggcggcggcgactcaacgtgtgtttctcgagaaatgacaaaatcgcatgtgggacaccatgcgtgtgaaagggtcgtatgtggagtacgtgcatacaaagttgttgccgcataatttgaatggagtattgcaagggggttgcaggtgtatgcagaaaatgctactcaatatactattgtagttagactggatgtttgtcacgacaatctcagcgaaacccgtgtagttgcgaaagtaaattccgccacccttgcgaacgccgttgatagacacaa

SEQ ID NO: 257 - DNA, 21005 bp, unidentified
  misc_feature 1..21005: note = Fanzor polypeptide
  source 1..21005: mol_type = other DNA
gatgtgagacatcggggtctgggcaatccccatctttgccgttgttgagcaagagaaggttgcaacaggagcgaacgtcttgaggcgcaataccccacgttcagtggaggtacttgcatctattctgtgccctgagctgcagcgaccctttcgtggcgtgccgttgcaccccgagtgaaaactttttatatataatatatatatacatttcaatgataaagacgtcgagaaacggaatttgcgatgatgggaaatccggagtattgtacaaggatgatgatgtgcgaagtaaaactgttggccaattttttgttaaaaagaagaacaaaacagggaatatgaaactagtactttataagccattggacaataaacgggctgcaaataaacaaaagggtggggcttttgaaacaaaaacaactagtagtgtaattgtacggaactcaaccgaatttaatgcctatattacgtatatagaaaaaggtagtggttggggtgattttaagattgttaaaatgggccaaggcataaaatatttcggtaatcgatttcagaatttggtagatcacattaataaccaaaaagaatacccgtacaatataatgagtgggtagtaacaatcagtcatcctacaagtagggctgacaattgccaatgaattcgtcaattcaaacatgagtgcttgacatgacagtaacattacaatcaagaacaacctatgaatttgacaaggaaagtacttcacaaaaaacaaactcactaggggttgtcggtcgtgttcgaaggaagagagaggagaacaaaacaaaaagaaattatgcagtttcggggatcgtcgggcctttatcatgtccggcgatcgattgtaccgccgccagcactacacaggatttgggtgagggggcttaggccactacgtttacactcgtttttagaggaacggcgaccactctcatcaaggacggcggcatctgtgtcgagtcgagtcacatggcgacctctcgcatcacggcggcacgtgtggaagatgcgcacccaagcgcttgcgatatcggcaccgactgtcgtcgtgtcatacatcgcattttatgcaatttcattcaagaagtacggtggtgctataggtgataaagcgtgtgctttgtggaacgcaaatttattcatcctaccggtcttcttgattacattctcttggcttgatgacgatgaaccataccaggcatacatttcatattccgcacatatgtccctggtgttcatttcagctgtgtgttttggtcgttaaggtctgggttcaaggtattgtcaaacagtttagaagatggtgtgaccataacgctggcggcggggcacttgttgtatgggagctgtttccggcatgatcagtctgtaatccacgatctcaatctgagtcccactacaactgtcgggtcatatccatatgtcgagaccccttcctttcccaacagagtgataaaaaaattgtcaaagtgatatggcagcggaacacaatgcttatgcatgtactgcaaaaaagcaatctttaaaattttgtaatccatgtaggcgcctgacttcttctcacattgctcgaaaaggcagcaattatgtcgtttagttgttttcttgtctccataatgtgtagttacacacagaccggtcaataatgttacagctcaaagctttatacagttgttcaatttggcctgaatttattttttctcatttcaggatcgaagcaaacggaacggaggaaacatgtcgcatagtcggtgcattagatagataggataggataggatagatagatagatagatagatattatagatagatatgatagatagatagatatgatagatagcgcactctatcacgacacaggcggcggcttgcgtatcatactcgtccatctggtatccacggaggcttgcgcactcactcactcacagggtgcgaaggccccccaaaatacagaacgaacgttttttgtaaggttcgagagatacgtgaataatttatctcatacaaagaaagaatgtcggcactgttcgccgcccctggtcatcgggaccgttgcgggcacgctcatcggcacgatcggagccggcgccggcgcgctcctggtcccgtccctcatgttcttcgccggccagtccatgcagggcgcagtcggcgtgacgctggcgatgcagactctcccggtggggatcggcggggcgtacttgtactacaaacagggactcatcgacctctgggtcgttgctgccgtcgccatcggcatgctcgctggaatcctcggcggcggggctctggcgacctcgggcgagatcagcccggtgaatctcgagctactcctgggcgtcgtcctggtcgtcctcgggggcgtcaccatcgccaagacgctcctcggctacaccactgttcaccctaaacggaacagctaatgtacggatgtacgtgcacgaatacactacgcatccccagagccccgcctccccatcggaatttgtgctcgttgttgcttgtgttgctaccacgtcagatgccacacagctccatcacgtgtaggcgagcgatcgtcacggcggcgttctggagagaatcgcaggcctcgaacctcaatgggtgagccgttctcacgcctcgccgcagccgttgcgctgtccgtgacagctccagctctcactcccactccaacacataactcatcttgggattgcggtacaccgccgtcttttccttgccagtctcccacgcaaacttgaaaaataaacacaaccatttcgccagctctggacgtggggcgaagaaaggagtagagtcttgtatcatcgagtgtgtggcgcaggtacactcggacaagggaattatgttacataatatcccgagtcccccaaaatcctcttgtatgcgtttatcttctacacttcgctcgacactgcgttcagtaaagaacctgtcagcttgtaatcaattttgcgtcctaccacaacttccagtttgcaatatttctttggcctcgcaagaattccggggcggattgggtacattgtaaagcaattgtggatgtttacccaacaccagcttcaagattatctcgggcaatggctgtggcttcagtccccataccccgtaggcgtcctgatgcacgaatggagcgaagcgcggatctctagattgcgtctccaacacagagtacagactcggtttagccattctgaggagttgggctgtgttggtgctcaggagaatcgtacagagaatccacctactttagatgctttgccacgaccttttttttcgactcagtactacctcatactttttgatatgactttttgttcgcaccaccagtttgatttgcgttagctaatgcatcatctatacgttttgtttatgttgcagtttgacttgccttactttgttctcatcctcaaccaaccaacctcaaaactgcttgtcaagtgatatatgtcgccaacacttggatgagaaccaccgtaccacattaaacaagtggcggagcccctttcacctcttccccccagcggagcgaccgggggcgaccggaggggagcccccacaaaggagtccgcgaggaaccgagcgggtgggcgaccggaggggagcccacatttcacatcaagcattagacacactactacacactactgtgtaactaactgtcaagtcttacacaatgtgtaggttgtttgtaaaagattaactgtaacacttgggcgtttccgatgtgtcgtctcaagcagacttctagggagtatgaaagaggaatcgcgggacacacggcggcacctgtgtctacatcagattggtattacaccatcccacaattgctacctccatgaggtgagctgagtccacaaagagcgagcggaggagttcggtactgcaccactcttcaacgtgactgcagttgcatcatccacctccagcatggtcgtgctgcaatttctcctcacaccagtgaacatcccacgcacaagaccattcatggcatcaatattttgggtggtggcaccgattccaaactcttccaggagcgccttggcaaattgctgctcatccatgggagagttcacaagagtggcaagagctcgaatgacaacatccgtccaagtgcgcgtcggactgcaacagcaagagataaacgaatgttgtgtgtcatttgctagcatgtgctacggcaagtagtgtggcgtaacacatatcgttcggctatcatcaggcaagcatgtacaaaccttagcctctcgatgcgacgctcatatgccgctcttgcagccgggtgttgtgcaagcaaagcatctagttcagcgtcgccatccatgacctgcaataaagaacatgaatggatactttttatcccccatgcagtcaaagccatcaaaaaatccgctatcgagcctccggcattcttcagtatttattttttgttgaaataattgttgttaccgagatggagagtcttttcagaggtgttcatgtgaacacgttgtcacactcgcatcatgtcgagaccactcgcatcacggcggcacctgtgtcgagtcgagtcatgtctttagtttgctcaagcgaaaatatcgctgcatgtgcccaataattccagatgtagcagatatatttgattacagtaacgctttgaaaaggattattgatgcgcacgatgttagccatcagtttgacttttcagggtactttgaacatgtaaattcagtgtctttagatgccttgaattttttgtgtcaatcacctgaagacagtatctgtattgacaagatcggttacaaatcttgaattggtcaacttttcagaatccccaaaatagaaggtgtcccaatatcaaatgtccctagctgtatgttttggttgcgcaagttgtacatagagaaatatatgtgattcaatattaacaggtataagtgtaacccccacagatgcagagacaaaagcgtgccatgctggtcagccccagttacgccacgcctgggttggatatcaggactcgatacgtgatggagaaagcaggagtgctcccccgtgacctgggcaagtatagcactgagggttttgaacgcgcgacgcagcagtgctacgccgccagttagggccgggtttcagttttgaaacactggagggcgaggtgttgtccagcgctgtattggaccacctgaagtggttgttgtcccacgacacagaggtggctgtgttgttgttctgcggccatggcatgtggcaggggtcgccgcagcacggtagtctcgtgtgttcattcaagcagctggtcacagctgaggcaattgagtgcgtggcggcgaagttcaaaggcacatttgtgaggttgctgaacatgtgcgaggccgagggggagtctatgtggcaggatgggaaaggtaccagggacgcagtaaggctgcgaggtgctccgatgcaagggggggcaggcgcgccaagcacctactacggcatgacagtggcagccacgcagcagtttggcaagaccactggtaacagccggggcagcaagttcggtgttgcactggggcgcacgtttgatcaggaggtgctggtgacgtacgatgggttcgagacggcattggacaagtattggagtggggcgcaagtacggatgacgcacgcattccggggtgtgttcgggacgcccgctctcccggtgggttcttgttgcatcactaatgatgatgcgggttctgagtctgagtctgaggtggagttctgagtctgaggtgcctggggaagggttgcaacagttgactcgttttctttccgaaaataagtaaacctaacagagtggggagtgaagtgacgtccactttcttggataccccatcaacgtctctacccactctgggtttaatgtattgagttttctcgcctctttcacatcagtaaacccaaattgagcttggatttctttgtcaaaaaatacacgcgtcactagcattccattccggcgaccatctaacgagttctttggataccaattagataaactatgtagtggtgtaggccagtaattctttcgcacccccctgttcgtccattcattctcacacacgcacggcattcttcagtatttatttgttgttgaaataattgttgttaccgagatggagagtcttttcagaggtgttcatgtgaacacgtttaaaatagggattgatgtgagcctccggaagaattcttcagtatttatttgttgttacaagtacaaaggacatttgcatttggagcataggatttagaattcttcagtatttatttattgttacaagtacaaaggacatttgtatttggagcataggatagtcaacaattgctatgtatgtagcatcccgcttgggaatggaggacatgtcgaaaatcattatgacatccaacatgatgctccctgatatcaaactaagagatgatgatgatgcaacaagcgtcatacaacgatacttggagtacatgaagcacatggtaactcatattctccctactgcgttgccggcttgacacgaaaactgagaatcttatccaaagtacttttcgttgctttgacgtcaagggacccccttgacgcactctatcacgacacatcatgcggcatcatcctcacacacgcacggcggctttcgcatcctcctcggtgtccacacatgccaaggcggcggctccatgtacacgcaaacggcggaaaactgtcgcatccacacatccattcatgatgtgtaggggatacctcagttacatcttctggcattgtattgtccagtcgatcgggttcaacacttcaaacatttgttgatcggtaaagacattgataaaggaagtgcatttgcacgttcactgtgccacataatttcccccacatacatggaaagcgattgcctttcttttcctcgcaggaggtcaacaacatgtacccaacccttatagcggttgcaacaaccattgcgcttttcatatacttccaccgtcgtgcttaggcctatcgtgctgaaaatgaagctaatgcccggcgtgaggctgaggaccgtgccgacaatgaagctactgcacgtcgcgcggaagctactgcacgtcgtatggaagctactgcccggcgtgcggaagctactgcccggcgtgaggctgaggaccgtgccgacaatgaagctactgcccgtcatgcggctgaggaccgtctcaggcaagagttgttgtcgttctcgcctgatgacgttgttgctatgactcctaaacatattgcggagtataggacggcgtgtgcttcggttggggtagcatctcatttggatcagcatgtatttcccagtagcagtcaaggtggaggctaggttgtcgtggactgttcaccgcgaggagcacctgaagttcattgataaaatagaatctgcgttcaacgctcgtgcttagcttggtagttcagagaactcgcggacgaggcgccttcggcacaacacatacgtgggatcggagatgctttttcgaaattgggtttggatgagttggatagcgtttttacgcctaatatggtgggcacgccacgcttgttggatctttctacagtcactctcatcgatccggatggttcttcatgcatgtctgatctcatgtgacaaatgattcacacgaccccacggtgctgcgatctttttactgtcacccaaaatgggggagggggcgtggcctggtgttgttgcgggacatttatgttggcgtttgctgacaaagattctcgagcttgatgatttggataacgtgtgggccttcagcatcacctcagaggatggagccaatgaggttgtccgtgtcacacttgcccactattgtgacatggaaactacccacttggcagtgcagcacaacggtggggctgtgcctgtggatgtatttccagaaccaggcacatttgcagctagttggaatgcatacgtggccttcaacatcttcacccagtcagatccgtgatggtcatgatactgactgagttgtaagatggtgtctcgaccggctaggggaatgctgcacgggtgagagacagacacgatgacggcacgacctttcaactgcatggcattgtgtaacaattggcggccttgtacattaaaaatatggatgtcatcaaatgctagcacattgaaaccgtcaagtgaaggtgattctgattcagacagtttacacaacgttgcctctggtgtatgtaaagcatggtactccttgttatgttctgtcatgaccaatattagagtggttagtgaatgttgagcaataagttgagtgatagcgtgactcttcccactttccctgcgccctaaaatgtacattacttgtggcttacaagttgtctgtgtgatgctcatttactcatttttattttatttcgaataatagaatttttttatttcgaaaaaaaaatacgccgacgcatctgacgcaaccttattcactgtggtacaccaaagaaaccgcacgatcacaagcagactatattggattccttaaaggggcgccacggagagggccagagggattcagttgcagattttattaaacaagcggcggagcccctttcacctcttccccccaggggagcccccacaaaggagtccgcgaggaaccgagcgggtgggcgaccggaggggagcccacaggtcacatcaaccagcagacacactactgatttacacacacacacacacacgcaacgccgcggatgatagatgcaggcaggaagggaggttgttgtcagttgtgcaggggagggacagcaagacgccgccgtcaggagaacaagagacacacacacacacgcatggaacacacacgcacgcaaacggaccgcatgcaaattcacagggttttaggtacatacagctagggacatttgatattgggacaccttctattttggggattctgaaaagttgaccaattcaagatttgtaaccgatcttgtcaatgcagatactgtcttcaggtgattgacacaaaaaattcaaggcatctaaagacactgaatttacatgtttaaagtaccctgaaaagtcaaactgatggctaacatcgtgcgcatcaataatccttttcaaagcgttactgtaatcaaatatatctgctacatctggaattattgggcacatgcagcgatattttcgcttgagcaaactaaagacattctcaatagcgttaaactctggactgtaaggaggtacaaagagtggtcgtattcctacagaatcgaacatagaaatcgtctcctttgaatgatggaactggatattgtcaaggacagcgactgtaccccgctgtacatgtaactttgatacaaactgtacaaagtcgactttcttgcaattgtgatcaaggatcttgtaatgaacgatacctttagcagaaacggtagcaattagtgtcaatttggacattcgcaatgtcctagaaatttggatatttaaacgtttgccgcgttgacagtaccctctgcgacaagtgtcacctatgtaaaaacccgcctcatcgatgcttaacaaatccgatgtcggaacggctaaatactccttacaaaaacggtcgacagaagatttgtggtcattcttgtgccaaactgttttgtatgcgcgcttgcgggtgtaaccaagtttgcgtgtgtagcgtccacaagtttttggagacatcttgacagaggacagagaagtcacaccctctgcaagctgagacattgtcaagaagggattggagtcaatcagttgttttatagcagccttgatatcttctgtaatgacactcacccttttcttccgatgatgttgtatattggctttggtgacccaacgttggagtgatgattttgatactttgtacagcaaactaactttcctcaaactacgattatagtatttgtagtgaacaaccgcgcggtgtcttatctctgcatcaatcatgataacgtaggaaatgtgtataaggaaatgtgggtgcaatattatatcaccaaaagaaaaagaatactcaccccctcttaatgggggtagtgcaagacaaaggagatgacgatattaacatcagcgtcgtcaagaagacgcttaattctctgtgcatggatgtatcgaggcatcagatctcctcaaggatacaaagcatggtactcttaatcaaccacgcagttgcagaggcatacttattcgcaaactttcatatcacaagatgcctcgatgatggagactttgacgtcaagcagttgccacacctggatcggaacttttattacaggtgcctccttgcggtatcgacctccaatgttcgaaaggatactctgggccagagcttcaatgataccatggttgctttcgacgccctaagacctgcaggctacgtgaaggtggacgttcgtccttggggacaagtaatcgcagacgtctcaatacaaatggcgacgatggcgtgcaacagcgtctgggcaaacgtggacagggtcgttatcaagtacctgcgcttgaaacatccctctatgaagaaacatttcaagaagattgtcaaagcggtggtccagtacccagaatcgaaaatcgacacaatcatcccagagggcctcgtgcatgcgatccacatgaaagaggttgtcagtcacttgagggctctctttccgctgccaagagggaagcagttcaacactagagcgcacctgacaatgcgattgttccattacgtgcttacagagttgggagaggtcggacgagtggatccgaaagataaaaaaacaaaaaaaagtcacccccgtctgttcagtatccttcctcgcaagaacggcttcacaatttcgtacgtcccgatatcgtccatgactttcatgaagcttcttagcatgccatgccatgaatgggcgttcctgcttcccaacggatttccaattttacaatcactttttgggggtcttttgatgctttccaaatgcaatcttacgataaaatcgtaagattgtagtcaattttgacaaaatatgctcgaaatgagcttgaaagacggagaaacgtacagattgcgaatgttacaacgttgaaatgccatattttgtaacaaaaggtgttaacatcaattcgtgtcttacaattataattgtaagaaataaagggaaagcggacggttataagtcggcaggcagaattcagcttttacatcttacaataaaaatcctaagtataattcattagtaaaaaacggctatgtgtcaaacatcttcctcatcctcctcctcctcccccccctcctcgtcctcctcttcctcctccttctccacctccatgcccccatccccatcttcctcctcctccatctcctcctcctcagcaatgtctacattgtctccatccgattgcacagcctctgccttggtgtccttctcaatggattgacaagctaggagcatgcttgtgtggtactttctcttgatcttcatactaatgggcgttcctgcttccgaacggattttttattttactgaaatcttacgataaatattgtaagatcgttttcgcaaattaattgattttgcttttttggtggcttttacgaaaatatcttacaatttattttgtaaaattgttttgttgtattcctgagaaagagactattcccttcaatttcaattgtaacattgatttgctcgtttggagagagagaaagtattggaatacaaaatcaattgtagaggacagtcaagaggaaggtgaaagctgtttacaaagtcttgaacgcattgctcataattatttatctcacaactcacaactcaacagttcaaaattacaacttagtacttacgactccgaaatctgtacttatgtgtacctcataatttataactcacaactcagaacttatatgtaccttatacaagtcagaactaataactcctaacgcaggacttattattcataatttcatacctcatagcctcattatgtacataacacaaatttatatccttaaatctgcaaactgccatcctagaatcctgaaatcactcaaaatgtgtgttggatggtgcaaacaagtacactcgtgaaacttgtgcacaatgctaatgttgaactgctgccaacaagtccattggtgctaacttctgcacttagtgctgacagatcatgtgctaactgactcgtcttgctctgggaacaagttggcacgcaacccaacgagggctaaatctaacttcttggtcctcatcagcccttttactgttcctgcactgatgcagctttccagaaccttctccttgcaggcctcgaactcgtcctcaggccaatctgcggctttcttctcgcgatatgtctggagacacgtctctagcttttgcatcatttcctcactgggctcagcagggttgtcgcgaaactctgtgtcaatgtcttcctgaaccagtaccgccgtcctcacccttgtttcatcatctgcatcagtacaggcttcgagacgtgatagaatagcctgctccgtttttgcaaacatgttcaaacgccatgcagcagccccaagcttctgagtgatacagtccaagccaatggcgttcctcctctctagcaaagccgctagcatgcccgaggcatcgccagcttgcatgcacatcacatagttgccaacggagctaagctcccgcacaaagtgacggaattcggcgacacttctcctgcggtatccaacttgtttgggactcatcgagcagccgctaatgtcggggcgtccaatggcacttttctgtgcgtcaataggcggtaggaagaccgtgatggcagcggcaagaccagaagaagaaatggaagctttcgaggacgggcccgcttgtcccgcaccttgatgcaagatcccagagatggcgatgctggtggaatgtgtcttgaagtctggccccatgcgtgtaatgtgggtaaggcgaatgtcagccacgccagcttctttgaagccacaaggaacctgctgccttcctcttggttggtgtacacgaccacatggcacactgaggcaaacttccgattctggcctgctaagttccgcagcatgttgatcacatcagtcgaactccaagattcttcatcgacgagccacaacggtcccttttcatcgccagtgagacaggggtcgatgatcaccaagtcgatcagtttgccaggcacctgcaagagtaaacgaaatatgtacaagtcagttagattatgggttggaagacaagttgaacaacgtgatgctcccgactgtgatcggaaggattatgtgtaatggattttgaagtggtgaaaagacatgcttaacacatcatcctcccgattatgatcgggagcgtcaacttttcaacttgtagtctatcattttaaacatctacgcaccttacggatttcatcacactggaatgttttcgccttcatgttgtaaaggtgcgcgctgactgttgccgtctctagctggacccgaccgactccaatctggtggtcagcgtccatgaacactgctgtagctgccgacatcaggtgtggatacatctgtccaccatcgtagagacggaaaaagcgttcggaaggctctccccttttccacactggcaaatcaccgtactttactgccaatgacaacaagacctcctctgtcaggttcaacatcggaatccctgctgctccatctttcctccgccttgttaagtccatgacgaggaaacccacgactcccctgatggtgttcaacgcatcgagatggatactgcgaggcggaatggggtgtgcgaaaagcagttcacggcaggcctcgaggaacttggacatatcatcacagattggttgttggaggccgtctgtcgccattgggtactcctggtcaggctgaactagcaacttcatgtcgtcaatgctagcggccagggtactgataatctgtgcctggtttttttgctggacccttgtcctgatcacagaaaaccacctgtcgagaagctggtttagcgcttccttgtctgtcgcgaaactcagcagacctcccacttacgtgacctcggtgatggttagcttgggcatcaaaacttcatccctaggtggtataccataccaatcccttctctgggcggtatagtccctcagccacccggagaagacctgatgtgcgggaatcgaagcatcggatcgaatgcccccgatcaagatttcagaagctgccttgctgctgaaggcgatgccacccagctgaaggggtttgttggtaacggcgggttccgcgttattgcccaagaaggcgtgcatgtgcgtgaagccctttgcctcaaggtcaagcggcgaaccagaattgaagcgtaacttcaagtcgtcacgaaaggacacaggcgagacattgtgttgcttgagaagcctgtcgatgatgtagatgacgaagcccgctgacacttctgtcttgtaatgaaccaacgaagccttgtatgccgatgcaaacgtctgcgaataaaagagttttcttgtcatgataacgatcatactaggaagcatctcccgatcataatcggcagcatcatccaatgcaagaagggattcgccttggtggattcgccttggtgggttcgcagctaaattgaaatgcgtcaatgggaatatcgcccgtccatgttgcttttctcctaacccccacggtaataggcacaagcttgtggtccatcctatcttctggccaagttgggtattgtgttttagtgtacaccaacttctgagccccagagtacatgggctttaaatgcacacattccacttctccatccactggtagtgatttgacctccaccacgtcccatcctctcaatccgctagattcatccatttgtaccttgaccacagcgacatgaccaacaaacaaatcagtagtgggttcgtatgctattcttctatccggcttcgtcccttgtgaagaatataagtacaacacatcatcctcctcttgcctttccatatcagtctccaaagtgtgtgcgaccttcatagtcttggcaatctcgttagttgcttgccagtgcattcaattcgatgtagcatcgacgttgcctttcggcaggttcgagctcggcgaattcatttcgtcgttcgcgaattacatcctgtgggagtaacacgtgacatatgttcttgcacttacaggtaataagcttgtcgaatttattcgcggtatctgagttggtaactgtgtcgatctcttcggcttgcacggtttcgatcgcatcgttgccactggaattctcgaaatctagtggtcgacgtcgagatactggcaacgtaggctcaagtggcgtatgcccaattctattcccggggaaggggtagcgtccattttgccccttcccctcaaagaaactaagcctgccaagatgataagaaggaatcaactgtgggcctgccgtcgggtgagtgatcgcagttcgtgaatagttagaggccataattcgacgctgtccaaagtcctataatatccttgctatgtcggtagtatgccaccgaaggaccctaacgaggtgaattcttccaagaaaccctttcttcctaaccaacctccgcaaaccgactcacgtcataaacaaacgcggagagacattttctccaacttcgtaacaacccatgcacgcccgggttgttctcgggaaaatacctgagcagcaacctgtgcaacctaagcctttacgctttggtgctgtagcgctaccgcgacaagcagatacccagcctgcgcaacctcaacacccagctacagtgcctgcgcaacctcgacaaccagctgcagtgcctgcaaaacctcgattgttggaacctaggactctgtccttcaattcagttgagagctttgcgaacagtagcatgtcccctccaaaaggtggtggtgtcacaagcaagtctaaaccagtcgtggcaaaagataagggaactcgttttacggagttacctaaggaacgtacaccagcagctgatgcggtaacaggtaaagaagtacctacgggtccagtacccgttgattgggatgacagacctcacaagcctgatggaccccttggatttaccgagatcgctagagatgaaagtgatgtagactccaaattgtattgggcaccatatgtcaacttcggctacatgagtaatgcacaggagcgacatggtgtgcacaagataggtattgtcgcatgggacagtgaacgagatgcgcttcttcgcgagagtatgaagtccccctatcagctctgcatggatgacttgatgaacattggaggagggacagcaaaaggtggaaagcaaatcttaattccgtccccccattcagtcaagtaagttcagatgggtgttgcttatgaatttggactgtgagtatgccgagtacatgatttctgaatcattcgctcgttgggtttgtcaatgctcccgattatgatcgggaggactgtgtgtattccgagtttgtttttctcaatcatttgctcgttgggtttgacaatgctcccgattatgatcgggaggactgtgggtattctgagtttggtttttctcaatcattcgctcgttgggtttgacaatgctcccgattatgatcgggaggactgtgggtattctgagtttggtttttctcaatcattcgctcgttgggtttgacaatgctcccgattatgatcgggaggactgtgggtattctgagtttggtttttctcaatcgttcgctcgttgggtttgacaatgctcccgattatgatcgggaggactatgggtatgccgagtacatgttttctgactcattcgctcgttgggtttgtcagttctcccgattatgatcgggaggactgtgtgtattccgagttttgttttctcaatcattcgctcgttgggtttgtcaatgctcccgattatgatcgggaggactatgggtacgctgagtttggtttttctctaaatctgaatcttattttgaatctgaatctgaatctgaatcatttgctttaccaacctatttgtcttccgcagggtctacaatgacagtactgtggaagtaaaactccaatcggacgggaaggatttgggatgcggcgtcatggacgaatggaccaaggagcgcgaagtgccaatgaacatcgaagtcgttgttgttggaccagacttctatgttacggctacgcacgctcactggttgaggtttcgcggcgaatgcaggcatatgtgcggagcagatgcattctggtcgacactcacccttgcggaagtcaagacagcccagttgcttgaagtcactagcattcggaggcccatgtcaggagccctatcatggataccagttcacattcaggctcttgggttggtggttgacaatgcgcagcaagcctgtcagggtcggcgagggcgaatttatcgccgacaaagagcttgaggaaactagggcgtgggttgagacatgcgaaggaaagctcatgagcgatttcgaggagtttggtcctagcgacaggaggacgtcacctcgatgtacaccaaaagggccttcacctgacgccggtaagagagcaatcgaacggactgtactgctgcacaggtcaaattttcaaatctgacatgtacatttcgaatgttacgtacgcggtgggatgtacaccgttcgaaacaaccattgtatgctgaccgcacttgccgctttcaattttgataggatattgcgtaacttctgcactctttacatttccttcaggctgcgcgaagaaggcaggaaggaagcaacgatatcagcccactacaatcaacaaagaggacagatcgccgacaactttgtaagttcatcgtattcaaattgttatctcctttcgcaatcgatcacttgttcgcgtgaatgaaccattgcagtcaagtctgttccctgcatcgtattcatgtcgatcgcatcaacttaaacacgcgcgtcactgattttgtataccatcctccttatctcgaaaatagtcgatgcgcattgtttactccgcactatgtatatgtcctcccgactataatcgggagcattgacttagttgattagagaaagattgcggaagattgaacattgaacatccgatgtcctccggactatagtcgggaggacatcggatgttcaatgttcaatcttccgcaatctttctctaatcaactaagtcaatgctcccgattatagtcgggaggacactggatgttcaatgctcaaacttccgcaatcattcactaatcaagtatgtcaatgctcccgagtataatcggcaggacactggatgttcaatgctcaaacttccgcaatcattcactaatcaactatgtcaataatcccgagtataatcggcaggacgctggatgttcaatcttcaatcttccgcaataatttaccaatcaactatgtcaaagctcccgagtatagtcgggaggacatcggatgttcaatgttcaatcttccgcaatcttttctaatcaacaaagtcaatgctcccgattatagtcgggaggacactggatgttcaatgctcaaacttccgcaatcattcactaatcaagtatgtcaatgctcccgagtataatcggcaggacacttgatgtccaatcttcaatctgccgcaataatttaccaaccaactatgtcaatgctcccgagtataatcggcaggacactggatattcaatgtttaatattccgcaatctttctgtaatcaactatgtcaatgctcccgaccatagtcgggagacactggatgttcaatgttctgacccctcactaagtcaaatatgttttatcaatcccttcaggtttgctgatcccaagaagaaccctgctggacccaagggcaaaggcaagcgtgctgaatcgcaggctgcagacaatgcaccagccgcaaagaaacaaactcctgtacccgaagccgagattcattcctcggaggaggattcagacttgaactcaagaagttctgtcgaccctgtgaccgggccatctgacgacgatgatgcacccaaaaccgctcctaagaaaagaggtcgcggtcagcctggttctcagaagaagactaagaagaaggcgaagagatcaccggcaggagagaagaatgaggacagcattgtaaacatcgaaggtaatttggctaaggctaaggctttcctgaccgacaagcattttggtggagagcattcattggactgcaagaagttcctccctccaaagctacctgtcagaacccgtgtgttggaccctgttcgagttgatcaactcctcgccaattttttgaaaaccacaatggccactgggaaggtattgttcatggacatcagcaaggacctgaagaaggtatctccaggttgggctaatgtggatcaaagcagcctggccctgacgttcaacaccatcaccaatgtgaaagttgagttaggcgagccatgggtcatcggagggtaccacagctcccaagcctttatcaagtgggcagaaaaccgccctaatgaaaagcctctgcgcaattgcttcgtgtaccggttgtcagaggtggagggtgccacgtacataaagaagcttcaaaacgctcgcattctttcccttttggacaacacaagcggccagtcgactaaggggtacgactctcagccatttttggtttctaccttcttgtggcgtgaattgtaccttagggcaggctgtcccgctatcttatcacgtctcgaatcatgtgttgttgcagacgaggcaacgcaggcgaggacggcggaactggtccaggaagacatcgacgcagagtttcgccacagcccagctcagcccactgaggagataatgcaagagctacagacagatttcaagacctgtcatgagatacaagggtggatagacgagcagttcgaggcctgtaaggagaaggttctagaaacctgcatgcagcagtgcagcgattgtacaggcgatgttgttacccaacaagttagcattggccctctttctacaacgtgatagcctgttcccacagccaatctagagtagacaatattgtgtcaggtagcaccatggcgtcagttagcacatgacctgtcagcactaagtgcagaagttatcaccaatggacttgttggcagcagtgcaacattagcattgtgcacaagtttcacgagtgtactagtttgccttatccaacacacattttgagtgatttcaggattctaggatggcagtttgcagatttaaggatataaatttgtgttatgtacataatgaggctatgaggtatgaaattatgaataataagtcctgagttaggagttattagttctgacttgtataaggtacatataagttctgagttgtgagttacaaattatgagttacacataagtacagatttcggagtgataagtactaagttgtactttcgaactgttgagttgtgagttgtgagataaataattatgagcaatgcgttcaagactttgtaaacagctttcaccttcctcttgactttcctctacaattgattttgtattggaatacttcgaaggaactttctctcttcccaaacgagcaaatcaatgttacaattgaaattgaagggaatagtcactttctccggaatacaacaaaacaatcttacaaaataaattgtaagatattttcgtaaaagccaccaaaaaagcaaaatcaattaatttgcgaaaacgatcttacaatatttatcgtaagattttagtaaaataaaaaatccgttgggaagcaggaacgcccattatgggtgattcgccactcaagagcgtctttggcgatggacgttacgagaaccatacaatgctgtggcgaaagtactttaatgtccaaggtcttgagacgaaaaggtctcgctttgacaaccgaatcctcagcgacggtaaaggggtatccgtccaaatgaagcagaagggtaaagaagaggtcgttgaagaaggagaaaacgcaggcta

SEQ ID NO: 258 - DNA, 3201 bp, unidentified
  misc_feature 1..3201: note = Fanzor polypeptide
  source 1..3201: mol_type = other DNA
ccatccatcaacgtggtcagcccatgcgacatggacaagtatatctgacgtacaaggatcaaggtgagaaactcaagccttgccaaattagggcgctcaagtcacgaaaatcgcacaacatgcagttagagctatgggcatgtggagcccacctacatctgcagcatctgagtgagtgagagtgcatggatgccaacgtgcacaacgaccagcaaataagtgaccatcgtcaaaaccgtcaacgacgaccaagcgttcgttctgttggctgcagcgtaccccgcgcgccgcacagtcacaacgcccgatcttgggaggaggccatcgtgtcgcgcttcctgcaagccttcacccggagatgatcaagacgggcaatttcttggagcatgaaacgataagaaagcgggttcaaccgttcaagtcctaaacattactgggcagtcccaacaaaaaccagataaataaataaacgagttttcatagacagccgtcggaccgaccaaaacctacacatagcatcaggcatggctttaaatagtcagcacctcacaaagaaacacaacacttcacaccaaaccaagtcacagacagacacctatgcaaggccctctgggtgagaccaatgaacgcccgtggctccacaatccacgcaacactgcaatcgtcaggcaccggacccgccagctcattgaggctggtggagacacctacatgccatcaagtgaggccaccaaatactttggcgtgacggcagcctgcctgcgcaagttggctgatcggggcaacctgcgcatgcgccgcattggcgacaagggcaagcggctctaccactgcggcgacctcctctctcaattccccgcagtcacgcgctctgaggatggacgcaccatccagaccacgatgaggccaccccgcaagcgcatcgcctacgccagggtcttgagtgagaagcagcggcccgaccttgagcgccaaatcgctgagctccgacgcctctgccccgaccacgagatcgtctccgaagtggctagtggcctcaacttccggcgcaagggtctctgcgccattctggaccgatgcttcgcgggcctggtcgacgaggtcgctgtgctgcactgagaccgacttgctcgctttgccatggagctgctggagcacgtgtttaagcgccacgacgtccggcttgtggtggtcggccagggcgatccagctgcggccgccactctcgacgccctcgatccacagcgcgagctggccgacgacctcatcgccgtcaccaccttctttgtggcgcgacaaaatggcctccgctctgcggcgcatcgaagagcacgccgcgatcgagcagccctggaggaaggctgaggaagcatgacaagcgagccttctgaggaagaaagcgaggaacgaggcggcagcgaggaaagcgaatgagatgagacagacggcagcagcagcagcagcagcagcagcgacgacggtggcgggaggcgaaaaaggcaaaggacgagtaggaggcggcggcggtggagggaagtggaagtggaagggaccgcctggcgctgaggggggtggtgatggggagggtgggatggtggctttcgacggtaagacgcggaagatatgcgtctttccaacggcccaacagaagacgctcctcaagcgctggatcagcaccgtgcgctggacctacaaccagtgcgtcgccgccgtgcgcggacggcagtgcgcgccgaccaagaaggcactgcgcgctcgcttcgtgaccgagtttggcctgcgagaggcggaacggatcaaacgcgccaagagcggggtcggcggcggcggcgacgacgacgacgttggtatctcgtgggtgttcgagacgccccacgacctccgcgaccaggccgtgggccagttcgttacggcctacaagaacgcggtccaggcacacgggcggggcaagttcgacatcgcctttcggtcggccaagcgcctgcagcaggagacggtggtcattcgctcgagggactggaaccggacccgaggcgagtacgcgccgatctttggcaacaccgtgcttcgctcgagcgagtcgctcccggccaagatggaccacgagttccgggtcatgcgcaccaagctcgggcggtactacatctccataccggtgccactggatgtgaagcatccgatacagcaacagcagcccgacgcggtgggagggggtgataaccaagcccccgccgtcgcgccacacgctgctgccgccatcgatccgggcgtgcggacgcccttcacggtctatagccccgacgaggcgcgcgtctacgagctgggtgccaacgactttgggcgcatcaggcgactgtgccaccacctcgacgatctcgtcagccgcacgaccgaccgcgacgttagaaagaagcggcgccgccggatgcgtcgggccgctgcgcgtatgcgccggcgcatacgcgacctggtcgacgacctccatcggcgggcggccaagtggctgtgtgagacttttgagaccatcatctacctgcactacgagaccagcaacatggtcgtcgggaagagcaagcggcgtgggctgcactccaagactgtgcgcgcgatgctcacctggtcgcactttcggttcaagcagcacctgctccacaagatccgtgagtacccgttgggatgccgcgtggtgctggtcgacgagtcctacacgtccaagacatgtggtgggtgtgggcggatcaaccacggcctgggcaagagcaagctcttctggtgcgagcagtgcggtttccgcacggaccgggactggaacggcgcgcgcaacatctggctcaagttcctcacggaatggtgcaacggcagcagccgcggcaacgacgatgacgacaaggagcagcagcagcagcagcagcaataagcgtccgaggcaaaggcggtggacggccgatcctctggactttggggcttacacccctccgccgagcgaaccaaaaaccgctcggtggtgcatggatctggtgcaggacgaccgcgggcatgcccgcgtgaagctttgtattaggtttaaatttaagcgttctccttcgattagcgctgatggcacgcttgacattcccaagcacaacacaaccagcgggggcaatttgggttgggttggctcggcaaaaatcggttgcatttttgttccggcgcctgaagctt

SEQ ID NO: 259 - DNA, 16512 bp, unidentified
  misc_feature 1..16512: note = Fanzor polypeptide
  source 1..16512: mol_type = other DNA
cgccggcacggccgagtgccgcaacgcgtggttcgacgccgtgatcgggctcgagcaggccaaggacgagctgcgcaacggtttcatcttcccgctgctctaccccaacctctaccccaaccgcagcaagggcgtcctcctctacgggccgccgggcaccggcaagacgctgctggccagggcggcggtgaacgagctcaagagcgagggcgagggctgcattgcggtgcggttctttgcgccgagcggcagcgacatgaagggcaagtacgtgggcgagaccgagacgcggctcaaggcgctgtttgactgcgcgagcgctgctgcgcgcgagctcgctgccgagagcaggtcgcgtggcgagggccgacgcgccatcgccgtcatcttcctcgacgaggtggagtcggtggcgggcgaccgcgcgcaggacgcatcgggcaccatgtcgagcagcgtgacgacgctgctgcagctgatggacggcatccgggcctatccggacgtgatggtcatcgccgccaccaacctgccgtggaagctcgacccggccttcctccgccgcttcgacactaccatccacgtcggcctccccacgttcgacgacatacgccgccaggtggacaagctactcacggcgcacgtttccgattacaagagcccctacacggtttctagagacgagggcggggattcgtcgtcatcttccgaatgcaatgcggaatacaacgaagccaacgacaacgacaggctgtggctgacaccggcctacaaggagcggatgccgtacctgagcgacgcggaggtatcggtggtcgtgaaaaggtgcgcctccgagaactactcgggtgccgatatctcgcgcctggtcaaggacgccatacggcgagcggccaccgacgccaaggccgacgggcgattcgtgcgggttatcaaccccgactacgtcagcggcaccgcccgtctccctgagactggcgtcactgtggacagcctgtcgagcacggtctttgtcgatagcgatgggtccgactactttgcggccaatccgtctctgcgtccctactacatctggcttccggtcggctgctggggagccggtcaggttcttccgacgagcaacgtcgccagactcacgaaccaggcgacggccaatggcgcctcgttcgacaagctcacgctttacggcgagcgttcgatgcgggattccccggtatacgattcttacgtgagctgcctggacgaaacgctcctggccagcagcgggctggtctcgctgacccaagcgttccgcgaccgaggcgccgaccggcgcatcagcgatctcctggttcgcgaggacaacgacgggtgggtgaacgcgttcgccaggctcgaacttccggtggtgcaggaggcatccaaggctgtcataccgcccgctttcgagggctggtcggccgagtctctcgcggcgctgaacagtgcccagctgtgggatctggcggccgactacgtggcacgcaccaaaaccgcgaaaacccccttggatgatgtcaccacgattctcaggggactggtgcttcccggcaagagggacgtgctcatggtctatgtggacgtcgggcgcataggcacggtatcgcagaggaaagcggtgaccgtcgaagacgtctggctgctcgtgaagaacatgataggcctgggccgctgggcgctgcgcctcggcaaggcctggttcggcatgggcatggagccccggtcgcgctacttgggccaggaggacaccctgtatatcgaggacggccctggcctcgagcgcctggttaccggatacacgaccgtgagcgagcactccatttacgacgtccgctaccacccgctgctgggcagggacggtaatgccaccgcgagcggtgacgtggacaccgtctggtcgtcccaaacgacgctgcttatcaagaactttttcgttccgccggcgaggttcaagctctcggccgccggcagggtgctaaaggtggcaaagaaggacgccgccgggcgcatgctcaaggtcaaaaaggacatccccgcattcaagcacacttacgagagctaccggatcttcaaccgcaccttcacgctcgaccaccgtctcagcgacctcttccttcgtcagaccgcggctgggttcagcgcaatcgccgagctctcgtttgccgtggagcaggcgggcgacgccgccgtgataccggatgcgttcatcagcgcgtccctgaccctcgggaccctgctgaacaggaagatgaatgacgtcgcgctggccgaaatcgaccccgatgcgctcgaagacctcgtgttgccgggcaagggggacgcgctgcgcgtctacgtcgacctgggcatgatcggcgcgttgaaggacggctggatatgggcgattcccaagaaccagcagctgaaacaggcggtcattgatgccatgacggccgtggccgacgacgcgctctggaacctcgtaatcgccgcgccggtcaagagctggtacgctaatatcggcagcaaatggtatggcatcaagccggcgctgctgaacccgatcatcgccatcgatgacgagggtacgatctcgccgaaggtgctcaatgcctgcattaccgaaaccacgtcgatcgccgacggctccatctacgaccccgaactacacccgctgtttcaaccggctatgtggtcaggtcgctctttcgacatcgacgtcaccgacgccatcaagggcgtgcgggccactgccgacgaggacgcgggttcgacaacggcgaccggatgcgacaagcgcatagccgacaacgcgcgcttctactcgtggaatgtgacctacggacacttcagggcggccctcaatgccgtcaagtcgaccgccgacaccaagctcgtcaaggcgctggccgcctacgcccgagaccccaacgatcccgccgtagtcgactacaagcgaaagtcaatggcgtgagggaatcgctttttttattgacattacgaataaaggaggtcgaccggtgtgtgtgttgaaagatgctcaaatccacctgtaggcccacgggccgcgacccgatcggatgctggagtgccagcgatagaatcgtgtcaccaccgcaaccgccaacgcctcgaactggcctcagcatcttgacgctgctgggagcgccgttggaggagcccgtccgcgtgtttcgcaggcccgcgccacggccccttatcgccgccgtcacaacaccggtcatacaacggctgaaccaactggagctggcgccaaaggggcgcatcaaccattttctcgccgtacgggaatacctacggctgcttgatcgcatgcgctacgaggccgagctgctgcgctacgagaactttgttgtcgattgtataactgtcgagccaacggtagacgatgatgttctggccgctcgcatccggctgcgcaatgcctacgaggacgcagtgtcacgcgtcgcgagagctcgccagaacagtgcgcccgagacgaccgacccttccgcgaccttgcgggatcgtctgatctctctcgtcccgcccatagacgtctggcccgtcgacccatggcgcggcatcgccctcgatcccctggtgaacgagagcgacctccccaaggatctgggtgacacgagcggaaggctcatgacaatctcgctcgaggctagcgaccagcagcgtcagagcgacccaccgactctgtcggtgctcgtcaagcaggtaaaaagcgccatggccgccattcgggaccgccacacgatggcgctcattcagcgagccctccttatcaagttgcgaactgccgccggcggcgagaaacaccggctgctcgtgtcgggcctcgcctttgccgcaggtacccccatgccgacctactttaggcgtgtctacgttgatccctacgtttaatgaaaaggatctgaatgtaaaagagagatagagaactctacacaaaacgaccctcgctattgacgccgctcgcgtcctaaacattactgggtagtcccaacaaaattcagattaatgcctcagactgacgaaaacctacacgcagcatcaggcgtggctttaaatagtcagcacctcgcaaagaaacacaacactttgcaccaacaccgagtcacagacagacgcctatgcaaggccctctgggcgagaccaacgaacgcccgtggctccacaacccgcgcaacaccgcaatcgtcaggcaccggacccgccaactcattgaggccggtggagacacctacgtgccgtcaagcgaggccaccaaatactttggcgtgacagccgcctgcctgcgcaagttggccgatcggggcaacctgcgcacgcgccgcatcggcgacaagggcaagcggctctaccactgcggcgacctcctctctcaaatccccgcagtcacgcgctccgacgatggacacacagtccagaccacgacgaggccaccccgcaagcgcatcgcctacgccagggtctccagcgagaagcagcggcccgacctcgagcgccaaatcgccgagctccgacgcctctgccccgaccacgagatcgtgtccgaagtggctagtggcctcaacttccggcgcaagggtctctgcgccattctggaccgatgcttcgcgggcctggtcgacgaggtcgccgtgctgcaccgagaccgactcgctcgctttgccacggagctgctggagcacttgtttaagcgccacgacgtccggctcgtggtggtcggccagggcgatccagctgcgaccgccactctcgacgccctcgatccacagcgcgagctggccgacgacctcatcgccgtcaccaccttctttgtggcgcgacagaatggcctccgctctgcggcgcatcgaagagcacgacgcgatcgagcagccctggaggaaggccgatcaagcacggcaggcgagccttctgaggaagaaagccaggaacgaggcggcagcgaggaaagcgaacgagatgagacagacggcggcggcggcagcagcagcagcaacaacgacgacgatgacggtggcgggaggcgaaaaaggcaaaggacgagtaggcggcagcggcggcggcggaggacggaagcagaagcggaagggaccacccgacgctgaggggggcggcgcgacacacgagcctagaaagggcagtggcggtggtgatggggcgggcgggctggtggctttcgacggtaagacgcggaagatatgcgtctttccaacggccgaacagaagacgctcctcaagcgctggatcggcactgtgcggtggacctacaaccagtgcgtcgccgccgtgcgcagacgacagtgtgcgccgaccaagaaggcactgcgcgctcgcttcgtgaccgagtctggcctgcgagaggcggaacggatcaaacgcgccaagagcggcggcggcggcggcggcgacgttggtatctcgtgggtgttcgagacgccccacgacctccgcgaccaggccgtgggccagttcgttacggcctataagaacgcggtccaggcacacgggcggggcaagttcgacatcgcgtttcgctcgaccaagcgcctgcagcaggagacggtggtcattcgctcgagggactggaaccggacccgaggcgagtacgcgccgatctttggcaacaccgtgcttcgctcgagcgagtcgctcccggtcaagatggaccacgagttccgggtcacgcgcaccaagctcgggcggtactacatctccataccggtgccactactggacgcgaagcatccgataaagcaacagcagcccctagggggtgtggtgggcgggggtgataaccaagcccccgccgtcgcgccacacgctgctgccgcgatcgatccgggcgtgcggacgcccttcacggtctatagccccgaggaggcgcgcgtctacgagctgggcgccaacgactttgggcgcatcaggcgactgtgccatcacctcgacgatctcgtcggccgcacgaccgaccgcgacgttagaaagaagcgacgccgccggatgcgtcgggccgctgcgcgtatgcgccggcgcatacgcgacctagtcgacgacctccatcgacgggcagccaagtggctgtgcgagacctttgagaccatcgtctacccgcactacgagaccagcaacatggtcgtcggggggagcaagcggcacaggctgcactccaagaccgtgcgcgcgatgctcacctggtcgcactttcggttcaagcagcacctgctccacaagatccgcgagtacccgggatgccgcgtggtgctggtcagtgagtcctacacgtccaagacatgtggcgcgtgtgggcggatcaaccgcggcctgggtaagagcaagctcttctggtgcgagcagtgcggcttccgcacggaccgggactggaacggcgcgcgcaacatctggctcaagttcctcacggaatggtgcaacgacagcagccacggcaacgacgatgacgacaaggagcagcagcagcagcaacaccattaagcgtccgaggcaaaggtggtgcgccaccgatcctccggactttggggcttacacccctccgccgagcgaaccaaaaacgctcggtggtgcatggatctggtgcagggacgaccgcggcatgcccgcgtaaagctttgtattaggttcaaatttaagcgctcctcttgatcagcttgttcatgctctcgttgaaacatgccacccgatcaccgccggtcggatcctggcagctgtagagcgcctggtgtgcgaccagcaggagctggcgcacgggtatctgggtgttgacgcgggcctgtgtgatggctgcgatctgttcgtccgtataggccctctcccccgtgtgacccttgaccgtctgcagcacggccttcatctcgccctcctccatgatgtcggtgagcccgatgaccgcgtcaaacacgtccgtcagaccgagcgcgctcatcgcctccaggtgactggtggtggccacgacgagcagccggttccgctttctggggtcggtgcccgacggcggctccttgcgcacgagtaccatcagcgcctgcaggatggcgttggaatactgctcgcccgagtagttgagaaagtgctcgatgtcgtccagcacgatcatggccgtttccgacttgtaggcatcgaggaaggcgtcgttgatcagctggtaccgcgagaactcgtcgtacgtcatgcagtccttgggcgcgagcaggcgcgtgaagtcgatgccgctcttgtcggccaggtcggcggccagggccgtcttgccagagccagccgagccgtggatgagcacagacacgagcttggcatcgccctcgcgggcctgctgcacgaaccgctcgatctcggctcgtcgcgtgcggtagttggcgcccgtgtcgatgatgccgtgcggctggtactcggccaagctcgtccgggacctgccaaaggccggcttcgtgcgctggacggccctgtcgaaatgccctctcgtgatcttgaccccggcgccgtcgatcctcccctccgtccggtggcgctcgatctcggacatgctcgcaaagccggcggcctggttcaccacgctgcgcagctcggctccggtgaagttgcgcgtggcctcggcgaccgtctccaggtggtcctcgagttcggcctctgtgcgcccggcctccctcatgcggcgggtatgcaccttgaggatgcccaagcgcgcggccctgtccgggaggccgacctcgatgtggatctcgagacgccctgggcggaggatcgccgggtccaggtcgtctttgcggttggtcatgccgatgacgagaaggttgtcgagcttctccgggccgtcgatcttggtgagcagcatgttcacgatcttctcctcgacgccactgccgcccggccgcattcctcgcctcgaggcgatcgagtcgatctcgtccatgatgaggatgtgcagcgggctctggtccccgagcgtgcgctgtgcggcgatggccggctcaaacagactggccaccgccttttcgctgtcgccgacgtgggactcgaagagctccgaggcgagcacgtgcaccggcttgacgtagttggggtcgctgggatcggtgaacaccatggtggccagcgccatggcgatctcggtcttaccgcaaccgggagggccgtacagcaggatgccccgagccgcgtggatgcccagctcccgccgcaccgagggaggtatgacccgcgaggcaaaggactcgcgcacgatctgcagctgctcgtccatgccggcgatgttgcacttctcctggaaggtgaagtcgggccggaaggcggccggcagtggcaccgaatccttggccctaccgccatgcaggtttgtgggaaccgcggcgtgttcgaggagttcgaacgcggatccatcgtaggcgatcaggtccacccgcgtgtcgccgggcaggaagcggccgtatacggtggcatcgtcaggcgccccgttcaagagtacctctctcacacggaacttgaacgggatgccgtcgtgtaccagcgacaagatctgtccctgcgaaaggtaactggtttcgacgagtttcgcgaacgcccggacgagtccggcctttctcacggcgggccgtttcgaaacgacgccggggagcaagtcaacctcgacgacgacgctggcgagcgtgctgtcgacctctgctcgcgtgcagatgaccgccgtaccaggagaagcgcgcagcgagtgtcgctgacattggttcatctcaatttggccacacggcactcgattcgaaccggcctcgacgacctcgaagacgaacagaccgccgacgcagacaaaggcatgctcgggcttgtcgtcgggccacagttcgcgaacgtcgcttctgttcaggtagacgacgttgggggtggtcgtgggcagtgccggcgagagatcgccggcggtaacatgtagcaatagagatcggtcggcagctgctgtggtcatgctgcgagggcgccgagtcgatgtgaccggatgcatttcttcctgttgtgtaaggttggtttatttcaaccggtagcttgctcccataagccaggccaagaaggccaatcgccaggttccgcaactgacgccgggttttattgcgcctcgtgttgatgagagataaacaggacccgtaggtcattggtatcttggcgacctattcgcgtgggatggcatcaaacgacgctacggccaagctcgtcctcctgcgccttcgccttgcccgtcgtcatgccgtttctttctttcgtctaaccgtttgtagtccttgttcttatgaaacagcaaaggcgatggaccttgaggactctcgggacgaatccggaatatgagctggacgcattgcgggcctccaacgtttgcatagctggggctgtaggcgagttcgtagcccgaaacgtcgaaaatgtcaagcatcaactggatgccctctgtccacctctcggccgcaacatacgccaagcgaaagagggatggatagtggtgtgcagggatggaattgatagcccacggatcatagcagttcttgggctcaacgctgagccatgcgatcaggggagagcatggtttcgggccactatcattttgctgctgctgctgtaccacttcgatgtgtttctcgagcgatggcatgcagaagaaagaagcttctctactgagtctctccctctccattgtactcattgccattagctcattgctgatatccgagtcgcggagaaactgtagcacatagcgaaagaggccgccgtcgcgatcgatgaatacccggccgtccctctccctcggtgttacgcaatggaggttgtcgtcgctgaacatccttgacaacatcgactcgcggctcaatagagtgctccgtgacgtggtgtacttggacccaccgacgttgagatcgatcacctgcatcgtttggtcgtgtcgcacggcggtagagcgagagcgagagcgagagcgagagagagagagagaaagagaaagagacttgctcaaacaagactacgaagcgaaaacggaccgaaattagtgccggtcagaatttgaaactgttgcaacaaaaaggaaaaaccctttgtgagctcacttgacgtttaaaaggtaaaaataccctggccaccggtatataaataccgctcattctcacaccggcaccaacaccagacagaatcacacacacacacagagagaatggcaacacaccaccaaaaactctccctacttgccaagcagcgtgtcgccgttgcgtgggccctcaaagagcggcgccttgcggaggacgtgcgcgtccgcgttccccaataccgctccaggcgtcccgccagcctcctgtggagctccgccttcagcgcatcactcctgggccgcagcgcagtggaacacgttgaccacaacctgctcgactacggtatcacgcagctacccctctcttgcgacaggctgcagcgccttctcgaacccgtcatcacccaagcccccggcagcggcggcggccgggagatccctgaagaggaaccggcatctatgggcaggagcgttgaagagctccaggagaagcctagggaagtgcagatgtcggacgtggcccacccgtctgttcccgaggccccaatgccgaccgaacacaagaagcggagctccaggaccatggtcgtcgaagactcggacgaggaggacgtcacgacatgcctcaagagacggagatacgcggtcaatgaccgctggctcccacgtgggtcccttgacgtactctggtagtcgtatatgaaaacataaaggcttaaaaaatcaaacggcgggcgttagttttgtttcactctgatcgatataaaccgggcgacccgcgtggacgattacgctctcttcatacacaggaggctggccggagcagtgacgctgatcccactgaagccgaagctccacgagttggcgctgttggtgtgaagaggagggcatttgaaacaacaaaaaacaatgccaacccgccattcgtttcagatgcgccatggagaattctcgaaggcaatcaacacattacacacttgacgcttgaataaaacactaggcgtcctccgtcagggaaggccacagatgccaaaatcacccgtggcgccctccccagttctggccacatgaccatgaccagtctttcggatgcgtttgggtccggttatggcccccagtatttcacgatacgaagcagaacacacggcaatgatatttgcaggtgcatggcgaggataaaagagttcagtaggggcgtgttggactgggacaacgccgcctactcccaatcctatccgaacgtcgagatacgcgtgcccgtgctcgcagctgacaaggtggatgccttggaacaccagctgagaccctacctgttatgcattgaccagatcggaggcgcccaccccaacttcccgcctgcttgccagaacacacgttaacctccagccactcgagcagctcccaataaaagggggtcccatctccttcgggtgtacgaccgcctactccacgacacgctcgacgaaacgcagagacaaatggtattgtcgctgagctctctgcgggtagagcgaggagtcatgaaaatgctggacgccgctatggtggtcccagaaaacgtcggttagagtggaatcaaacgcaatacatgctttatttctttgcaaagaaatggggttttcagagctctagtcggcgccgactggattgaaacgcctgggtttcgggtttcgggcgtctcgtggcggtgccttgtgctttggcgattcggtatatcagcttgatgttctccggagaagaggcacggacgagcctgtcgctggaagggtgtacgcggggtggggtactcgcagtagtaacgctgggagtgctggtggtggtagccgattcgtgatagcgagtggactgcatgcggtactgttgtttagtagggtggttgttaagctgtgtgcttgtgtgggaggaaaatatggaactctactgtctcctttatatatgagacttttgttgtcccatgtgagctcgcatcaaccctttttccgtggtagtccacgtgggagaacgtttagaaacaggaggacgattcatacgcacgcaggcacgcttgctgtaaaagtcagcgtgggcccactccatcccctgtaaagccccccccctgcccttaactctctacctccaatgaaacgtgcgcgtctctcatcccaaatatagatggggtctcgtgggttaaatacccgcctctctttcgcattcatccgtattgttttttaaccctaaggacctctatccccatacatacggcaacaaacgccatccataaatgaaggcctgcgctaccacaaacccgtattcgtttgaccagatctctggtgttgtgtcggggccgccaaagtgcgctgtctgtacacgccgttgtcatgtccaccaattgccactggccggcgagaccgctcagctctttgcctgctgtatcgcctgcgagagcagatggacggccgtccccacaccggcgtctctcgcccaagcagcaccaccgcgagcgccaacactcgccgtcaggcgaggcaagaaccaacgtgtggccgctcccattcgcgcgcgcatcaccagcgtccaacaggggttgaagacgacaccgcagctggctgcccagctccggtcggccgcttgtttcgtcgtcatcgacaccaacgcctggatcgacgcaccggacgcgattctgtcgctcaagcactaccccaacctcaccgtgatcgtgccatcggccgtcatacaggagcttgacgggttgaagcaggacacgggcaaggaccagctctccggtcgggcccgtctggcgatcaaggttatctacgacgccacctccaatggagagcggtggataagaggccagcgttacgacgagcacctcgggtcggcgatcaggatcgcgaaccgggacgacgagatcctctcgtgtgcgctcttcttccacgccaaggtctcgcccagcgtgctcatcaccggcgattatggactcgcgctgaagtgcaacgtaaacggcgtgcccacgacggacatgcgggggctactggagagcctgccggcaacgacgatgcgcacctcggtgccctatgtccaccctgaccacgagcgcatgggtgcggtcgtgccgccgccgtataagagacagaagaccacaaacgacatacctggtctgagcttcacctccgtcgcaaccaccaacaccaaccgcattgcagtaccggtgtcggtgccggtagtgcctcctttgttggaaacagggctgttggcgctccccttggatctgcagatcaaggtggcatgcctgctcactccccgtgcactccttcaggccgaagcgacagccaagggtctacgccgcctgatctcgccagacggggacgacgaggagcgaggggtgtcgacaagcgtccgtatatggagagccgtccttgagcgctcccatggacgcaggcactttggtcgcttcggccatcccaaggagtggtatctggcctggagacgcggtgttgttccgcctcgcgatagatgaaaggcaatgaaattggcatctttttttgtatgtccgaacgtacaggtgctgggaaaagttgggcgaggacaagaaagtaaatgatcactttcgatctattgcccgaggaggtaatcgtcgatatcggcatcttgctcgatctgaaaagcgcaacggcgtcggcacgtacttgccacaggctggcccatgccctgtgttccgacgtcgtgtggagcgccaggatagggcgaatcgagccaacgctgctttccaggcccggtgttagggccgtcgtgagcaacctggcaagggccgctgcggaatggcgacaggtaagcgagagcgtggcccgatggctgccgggctttgctgtcggactccacccagccccattggacgaggatcgctggggagtgttgtgccgcggccctggctctgaaaagggacgtgactggacacacgccctccgggacctgaaacgccaggtggtagagctgcgtgcagatgcgcccgacagagtgcaccgggtcgattcggtgctctttgttccggggtgcgcgagcgtcctcaggtacgccgaggccatgatgacggactggatgctctacgcgggaacgtggagcctcgcgccattgggctggtacgccgattatcagtgcggcgacggccagagtcggtggaaggaggaggacattcgcgacgtggccagatccatggccatcatggccaggacgagcgctcacaacggcataaccatgtacgccccgctgtttcatcgccgcaacccgtacgtcgtggagctggtgccttgctacccaaagctgcatcgggtcatgcttgcgctacgccaagagtctagcagctcccaataaaaggggaagattcccaaaacgggacgcgccgcaaaactggacgtaccgtgttcggctgtaaaattggagcgttccgcacgaggacggtggcacgtgtgttcggctaaacggcaatcttacacgatgggataacgccataacgccataacgttttctatgactggctcaaacacgccagttttcatggctttcatggctcgcccttaaggtggctggtggttcggaacggaaggggtgtttgtaaaactctgaccccgccgcctgccacaaatcctccaacgacattccccgaccagataagaagagccccggcgttgcccccccccctcccgccagcacttgtctaccccaggcgttgttttggtttgtaagagagaggagagatgacccagagataggtttcttatttggcctcggcgtcggtccacgttttagttgggaacagacgctgcttgaggtcgtccggcaggtgggacggaggtcccgagtagtgacagcacggcacggccgaggtgccggtagctagcttgcgcgaaaagcatttttgccgtacgccgtcgggactgacgtggaaccagacgttgttgctggtgtgctcgtcgcccttgttggcacaccatctgcccctggagacggcggcgtagaatctgccgtcggcatcgcgcgtgacccgtgccagctcgcagttgtgtttgcccccaggcatggcccggatgatggcctccagctgggtcgtgacgccgtcgagcgaggcgtccagtggccgcatccgtccgtggtaggttgaacgccgacacagacccagttcgctgttcgtcagacccatgaggcccgcgatggccttggtcgagcgcgtgccgctcttgccgccggcagctcgcgcgctagcgttcttggctgcctgggtagagtcgagctcttccgggaccggctccaccggtatccagcggggtcgggtcagtctggctcgaacaaacgtcgtgcggcgaagcatgcaatcggcaaacagcctgacaaagtcggcacgcagggcctcgctctcgatgtccagacgctcaggtagcctgtcctgctccttgcgcgagatgcgctcgcagagttctgtatcggacagcccgtcctcgtcctcgtcctcttcaacttcatcttcatcttcatcttcttccgcgtactcctgctcgccctgttcttcttcttcttcttccttttcgacaaagaggggcgccaaactcagcattcgcgcctcctcccgtgacccgagttggccatcgccgcccagtatcgtgtcgaggctgtagatgcgaccaatgtcgaccttgccgatctccatgcaccacgaacagaacagttgaggaggcggcttgggtgtgggggaggtcttcttgacggcgtcgacatctgccgggtcgcgccgtcgacggatcttggggggcttggacttgcccttgcaggccgggcacctgtctgttttacgggagcctaccatgcggaggccattgggcttgtagatggtggtgtcgagcacgtcggcccagctgttgtgcgccggtctcgcgccaaagcgctgcgtgatgcggatgagaaacccgcgacggatgaacagcgcgctctcctcgtccgtgtggatatcgggccagacaaagtgaatgcccaccttggccatgagcacgccgcagaccgacttcatgcagaccggcgccgtgaggacgagtactcggcgggtccatgcgtctgtgcgcggatagcactcggtcatcacctcctggagcagccggccgtaggcgacgatctgggccatggacggcacctcgggctcgtacatgtcaaagtccacgatcatcgggaagagcctggccatgcgtcgttccaccacgtacagcggcacgtcgttggcaacgtcgatcgcgtagttggcacagaattcgggcaaaagcacctcgggcacgtagagcaggccgccattgagcagcaggtgtgactcggtggcggcgtccctgtccttgtacgtgcgaaagactcggtagggcacggtctttcgttcgactccatccaggcacatgcgatccactgcctcgggg

SEQ ID NO: 260 - DNA, 21767 bp, unidentified
  misc_feature 1..21767: note = Fanzor polypeptide
  variation 9606: note = n is any nucleotide
  variation 17934..18548: note = n is any nucleotide
  variation 21349..21767: note = n is any nucleotide
  source 1..21767: mol_type = other DNA
acacagacaacgggttcaaccgtcacctgctcaactcctgtgttgctttgttgctcagttgctttattgctttattgctatattgctcagctactttgttgcttagctactcagctaactcactcaagactccttatatggataaacatgattttgctaattaaggtaatgataggttggagaccggaatgggttcaaggaaaccgaaatattcaacctataaatggttatttatccgatatgcggatatatcgagtttctttaagatcatttaaaataaaaaacaagattttgatcttttcccaattggcgggcgactatgagaagccacgactgattgggcgcggtaccgttctgttgctggcacaaaacgctgcttgtggaccggtctggcacgaggaaaaaaaaacaagtcgttgctatatatgcaagcacagcttacagggtttaagaggcatagggaagcagttcactcaataaagaagatgggctgcatatgacactggcctggcaaggacctggaaaatcaagcagaacagtgaccaaaaactcgaacaagtcaagtttaggtattctcaatatatgagactcgaaacattagaacatttctttgaattctcttatgctgtagttcgaacacaaagaatgagtgactatgaaataataagtttacaccgtttagcatttaaaatgtcagctccgctgcctggcgggtcaaacgtttggtctttttataccgttgtgcttcgcacaaggctttcctaaagggaaaccgtgaaaatcatggttttgtgatgccgacactgagagatacaatgtatcagttttaagrtcataaagacctatacattggttgttcaccaaatgtaaatggtttgtcgttaaccaggaagggaaaacatctagttctaattataaatgttaagaagtctttaagtagtttatttgacccgccaggcagcggagctgacattttatatgctaaacagtttaaaatttagatgtgcggtaagaaaaaacattaagagaatagtaaatgaataaattaatttacagcaaactaatgaaatttcagcataaatatatcaaaccatcatatccaaaaacaattccaaaggcagaaaaaaatatagaattaaaacaataaaataaattacctttgaaattggttaatagagtaccaagtgacgaagcggattggaaaaaaaaaatggatattgaagttcaatggttggctacggtacatcctaggatttcaatacaaaggagaggaaattcataaaaacgatttgaaagaattctttgaaagatactttacatacggagtcaatgtcgattttaataatgaagaattaataaagccaaaaaatataatactttcgagtccattttatcatgaatttgagtacattgacggtgattatgttgttgatacgacaaatttaatgactctagagcataaaacaaattgtaaaaagctaggaagcaagattaaaatagatggagaaacatttgaaccggattgtgatgaagacacatggaaagatatactgataggcataatactcaaatttacagttagagaccacgcatggttatgtcatgtttaagtggctcaaaatttcgcaacagcagtccgaacatgtttatctgaagacaatcctttaaaagaaagtctttgggattttgtatatggtgcaatagcattgaataagtacgctattccaactttatttgatgaaaaaaatggattttttacattatcattaccatatacaaatcaagggattaaagaaatgacaataaaagcttctaaagcatacgagtcaggttggaaagcaaaggtgtttaatcccaaagaatcagatataacaattgaaaatgatttgaaaaagatacaagatgtcttgagaaattttgtctataaaaaagtacaagaaagcagcagtatctatcaaaatgagtttgaaaatcttcttaacacaatgaacattttaacaggctgggaatcagacgatttggtagatgcaataacaaagtgtttgtatacaacatcatgtttgcatgaattatggggaaacaaaggatatatgtacatttttaatttgggtttaagtagattaaaaaatgggaacatttttgaaaattcatatttcataatatgtgtattgatgttgaacacatcaacaaaagctagaaaaatttatgattataaagacaaggagttggtaaataatttgaaagcattaaacatacctgatgagataggaagaatttgcccggcaactcttgatacagctgttcaaatgtagaaataaaaacgtttgctctcaatgagttggaattgtgtctttaacttttaatttcatttgttttctttttcatctatgaagaaagacattcaacagagaatcatatttacgatatgaaaggttttagcagttatttgattgtacttttttaaactttacttttttataacaatcaaagattaaacaggacaataaacatttacttcactcaaaaaacattaatttattatttaggactcattgacatcattgcgatcgcttaagtgcggctgatggttcccattaggaagcttttattcacaggaaggcagctaggtgctccgcacgtacctgccaaatgcagctaggcccatagggcgtacaatctaggcaaatatacatcagggagtattacaaagagaagaatttttgtcaccggattggttgttcctaattaagatggaacaaccaagactatagttgttcgttaggatttgcaattggagacgctccaactgtcgtcattgcgaagcaaaagcaagagtcttcaagaataaagattgatgtaatggaaaatatgtagaaaaatatttcaaaacatttgatactatttttatcccatttgtataataactaaaataaaatgaaaagaaaaatacaagcctcctgagtcaaaacttttacagggaaaacgctatccttataatatgtgccgctactttaaacctaataatacctgtccacataattgtggactagtatctctcaatgtatcatcgaagccatatcaactttgcatagtttttatcctagtacaaagcaacacatcttctccacactgctaggttatgcatgaagggcctagaacctctccaaggccgtagcgtagcaatgttggagttaccttccacactccaacgcattcttgatgaagatatttctggctccacaaacatctcgatcaacttttaaatggcaatggtcacaattgtagacttttgatcctcctaagttctctttcatcatcaagcaatgtgtacatgtcttggaagtgtattcctcaccacgttcatacacatttacaccatattgtaaagccttttctttcagacgttgcttaaactcataatggcgccaagtcagcatgctccgcacacttttcttattaagcttgcgttcatctttcttcaccatttgactcacattgaaaggaggaatgatgatgttgctaaaattcttgagcaagaaagtaatcgctttacaatgaacttctgtcacaaggtttttgatcttcattttaagtctggtcatagatttctctttccttgttttcttaattgtcttcatgccaattaatttgtcgagatgtttacaaagccggaatatttttgaaatgtcttgatcaccaatcttatagcactcacccaaagtggggctatagattgtaagcatggtcctgacaccaggatcgatggcacaccactcctttttattgcagcttgcttggttctcacaagctggctcataaaatggtatggctaggtagaaacgacctagtttatcaagtaccagcttacaatcgttctcaatattgggaatattgcatctattttttcgaacatgaaacttgatcttgtttttgagataagtaggatacatgctaaaatcaccattttgtttatcatcacgtagtacaaatcctttgattacacttgatggaatggttatgctctgtgtatctttttttgatcgaaactttaggtcaaatgtgtgcgatggatttaattttctctttgcaaaattagatttatatgcttcagttagatctttgatagcagtgtcacgcacatgtttaggtgtatcaagcaagaagcctttttcttttgggatgttgcaactattgatgaatctttttctcaaggaaatcatatttgtgcatttatggacataaggtttcttcttgacacattcaagagtccagttataagtgactctcacgcttccaaaccatttttttaattgatttactagttccaaagatggagtaatttttatttttttgcatttattcgctggcaatttcttcctctgactgacttttccttttttctttgtatttcctttttccgttgatcctgcaattgaatacgttgatgatggccaagaggtcttcaacaagctctccatgttctgagccttccatttcttgatggagaaccatgatttggactccatggagctgaaagatcctttccaccagttcgaatgcaaatcggctgatcctgtcacggaaggcagccacaacggtgcctccggtgagaaggcctttgcttgacaattccagaatggtttgcaatccttttcgtttgaaattgaggcctgatccgatgtcggagatgatttggtagccggggaatttttcttgcatgtattggatttgtctctggaggtcgtctttttggctatgggaagagactcgacagtagcagatgtttttttgctggggttcttggtattgtttgtttggaggtattttttgatgcagtagagcctttggtttccaggagttcggatggaggggaagactcttttgtcggcccatcttctgagagtttcttcggagaccccgagggcggctttagcttctttggtggtgatgaactcatgcatgttattactatatataaccttgtcatatctctttaagtagttttcattgatttgagatataaaaagttttgataagaaatgacaagggatttaaagaacagttactaaccctgtataatctggaataaaccaggggctgtcacgattttctaaaaacacccaaagatatacgaaaacatactatttttgagcttttcaaaaaagggtcaggccctttaaaaaggattgggtaaaccaatccttgcactgtgattttgcagcatctgtaccagctacacttccaaaacctgcgcaatgtgcggaaaactaaatgatatagtgagacttagaagtgcaactgtcaaaagaacacttggaatagagatataaatggtgcacgaaacattttgatgaaaggaatttctgtctccggattgttctgaagaaggacatttagagactctacgtgtgtgcttgcacccatgtagttgttcgttaggacttgcagttggagacgctccaactgtcgccatagcgaagcacaactcaagaatgaggagtgtcctccaaacaggactctccattatatggagattagtactctaccgaatgtttcaaagcgtgtgtaaattgtggattgcgtcattagattgtacttttcttccctttaaaacgcactgcgccgttaaaaatttgaaatcaaaataaattacaaaaaaactcttaacctaaccggcttgaatatataagatgaatatgaaccaccagttgtcggagctatgcgaaagcgttttacacaagtctggcaaagttttgtcattgaatcagcaggatgtccataagtacaagtgcacacgaatacctgtgtacaagtacggctttagaaaaaagtacaagtactatttacccttgcccggtgaaaattattgcctaatgataacggataaatccatactcaatggagaattaaagtatcacggcaaggcgttgaagaagcttgtgacggatggaaaagaaattgaagactattaccatatatgattgcatattgttaatagccaatgttgcaacccatttcatggacaaggttaggcacaccaagtatgttgatgagtgggacactgacatcatgcaaaaatacgctgcatcaagagcatgcttggacaagattgtttcgtaagcgctataaagaatgcaattatgaagtttttaaagacttaaataattatagaccacggttgcagcgatttgttgttttgttcaggaaaaaagagtacaatttttatgcacaagagattcagaaatctacgaaaaaatgtcaaaagacggaacaaaagatgatcaatgattttttatctctttacaataaaaggaaaacatattaatttttatttctaattattactttttattgtttttactatacattttgtacaatatcaatgagtattttcaaagaattttaatcttcatacagtaaaaggaaaacatattacttttaattttaataactccttattttcttttagggactctagaatgctgtctctgggccttaggaggtgtgcagctgtggtctgaggatgtagtttttgtgtcgcacactttcaatgctacttggtaagaagagggaatggaccagcacactcattgtggttcttcatgtggccaacacacttcactttggttcttcacttgaaaggagaaggaggtgctggcagcttgcaggcgacaaaactgagctaattattactcttattgtttttactatacattttgtataataccaatgagtattttcaaagaatttttaatctctttacaataaaaggaaaacatattaccttttatttctaattattactttttattgtttttattatgcattttgtataataccaatgagtattttcaaagaatttttcatctcctaacaataaaaggaaaacatattacttttttattgtttttactatacattttgtataatacactctcaaaattttgaataagtagttattaatcatcattgtatatgtttttatagtgtacattgaaatactagcaatttgaatggcaagggtttaaaaatttatcttattacttttcatttctttttattactttttgtgttaaatacacaacttaaagatacgttgtttagattatggaagaaaatgacacgattgtatgttccatacacatgtccacggtgcggttatacaacaaacatgaagccaaatatgagaaaacacttgtttttgagtaaaaaaatgtgtgcaacaaaaatatcgccaattgaattaacagaagaaattaaagaacacatcattaattatagagtttatcacatggttcagaacaatagtcaacaaaatagaaatcagacacaaaacaataatgtcacaattaattataacccaatcaacacatttgtttcaaacatgaattttggatcaaagttagataattatttacaatataatattaaaggattgacaaattttgaagaaagtgttgaatctcgttataatgagaatttatgcaaattagaaaattgaaaacatatgaatacaaattttatgcttggtcatgaagatttatttcaaatttttgatgaaattagtaaagcacatgacaaaacagagctaaatcttttttatgactctgaaatgaaccgtattaatatatacgatgatggatgctgggaggaaatgctattagtaaaaggaattaaacgaatgatggatgtaattcaaggatattatttgaatgcatatgaatgttatttgattcgatgtttatttggcgataattattcttgtgtaatgaaaaacaaaattcgtgaacatttgattgaatattatgaattcattgcagcttttgatattgatccatatatcatccataaacctgacaatgaaatcttatttaattcggatgatgatcgttttttttgcaatgataaaatttacaatattgaagaagcattgtttcctatgtacaaaaacattaaatctaaagtatcacgagcaaatgtagacaggaaaaagaaagaggtcttagatattttgaaacgaaattctaagaggagtttacatgaattgaataaaaatataatggatttaattcgtgttgatgaagaatttgtaaaacaaattggatacatgtaaataaaatactaggcttcgcagtgatatttatggcatcgccgtgctgcttgtttgataattgaacacacctccattatgaataactaatgcatacaatttcatgaaaattttagtgtttcatttctacttaacttgggtacatagtgatccaaaatatacatcagggagttatacatatgctcttttagggaataatttttgtctccaatggaataaccaaaataataataaccacatacttatttgcatcaggaaaccagcagcattctgccataaaaaaaaaaagatctataagacagcataagcagctgcggggacagaaacagttaggagggtccttggtaggtgcagtgcagacgcagcacagagataggcgcagttacaggtgcagtgaggctggtgaagggatacatgtgcatctttgcaccagcttctttgtgttataaacttctgttaatgctggatccttgattgcaaataggcatcacaggagggttgatacagcaaacgcgccctgttatgaacaacacaagggtatcaacatgctgctgtttgctattgctatgcaactgcaatagttattcgttaggacttacaaatttgatactatgtaaaggacttgaaggcaaaagctgcgcaactcaatattcttcaggactttgagtttcatctgcgagaagcacaacaaagcaagacactttaactttattgagtgttaactcttcttctctttaccttgcacaatctgccgtgttgttatacgtcattgccctaacaacacaaacaaacaaaacatgctaaggcaatccaaagagcaaagttttcattgactataagccaaaggccgagcacaaggcctgctagccagctaaaagctggtagcatcgcctggttagggaaaggaagagttgaaagttaaacataaggatgttcccgaagggagcttcgcgttccttgctgcgcaaactcacttcaatcataacataagtcaaaaaccctatcaggagagcagctgctcaagatgtcttggatctaaattccaagtttcatttatttacaatttatttattacaatgtgttattacacacagcgtggggtaactatccccaactgctgctcagcttggtagcctcttggacgctgcaattgtaggccaaaacgatccaaggcaatttggtgtcccgaggttgttgggggtccacgatcaaatgcttgcgcaacgcctgcttgatggtttgcaccgccctatcggccaacccgttattacacacggcagtattacaattcatttatttacaatttgtttacttcaaaaagatactaagttgagaaacgttttttgtatttttcaaatatttctaaaaaagttaaattgccttttaaaaaaggaaaacacattatttttaatttctaattattactttttattatttttgctttacaatttgttacttcaaaaaagatactaagttgagaaacgttttttgtattngaatgataatgtccgatggtcgtagggccatgaggtcattgaaaaacgcctcagctgcaatctggcgatgtactcaggctcatggtctatgacgattaggcatgaggatgccattgactgttgttaaaattagtaaccccatgaattgccttgctaactcaagtcaaatagtatctacctaacttatctttgcttagcttacaatcgttttcaggaaggccacaacagttttttcattcattgtactttttttaaaatctattttttttgatacatcacagttttacattgtttctgtttaatgagatatatatatttttaagcttacatgtgatattcgtcattttcaaaatttctaacaaaattaaattacttaaggatatactttattaagaatataagaaatggaagaaaatgaaacgcctcaaaaaatcaccatccgagaagctgccaaactcttcaccgtgcacccacaaaccatcasagaatggacagatgcargaagaatcccatttgaacgtacgctcacaggacaaagaagaatactcttgtacaaaaatccaacccaagaaaaaagcaccaacgaaaagttcaaagccatctactgcagggtctcaagcaacaaacaaaaagatgaccttgaacgacaagtcaagtccatgcaagaaaaattcccgaaccacagggtctatacagacatcggatccggtatcaacttccagcgaaaaaactttctctcccttttggacgcatcactgtcaggatctttgtcagaagttgtggtcttctcaagggatcggatgctgctgttcggattcgagttgtgtcaatggctattcatgcgccaaggaaccaagcttatcgtcttggagcaaacggatcaatcaccagaagaagaactgtgttccgacgtcttatccatcattcacgttttcagctgccggagaaatggctcaagacgttaccattcacaaagcgcataaagtcaagctttgtccgacaaagcgacaaagacaagctttgagaaattgggcagcaggatacagattaagttataataaggcattagatttcaaaaaagaaaatacaaagttaagcaaatttgatttgcggactttaattgtgacaaagaaacaaaatagcaagtccaaaacacgattgtttggtgaacacaatattaatccgattttccaaaaacacccttggctttccaaagttcccaaagatatacgacaacaagctgtttttgagyttttcaaaaattggagacaagaaaaaggaaacgtcagctataaagatagactaaaakacacatcaaytataagtttaraaaaagaacatgtcaaagttttggataatggtaagattcgattatattcagggaaattaaaaaataccttacgtacatttggtaaaatgcccaaatcactgttaccatccgagtttgaggacgaagttaaaccaccttgccaggttttgttacaacgacaaggtcgttcttattatatgattttcccgataaaagaagaggwgaaagytgtwcctacaayttacaaaggacacatggtaggtgtagatccagggatcaggacttttcaaacatgttatggtacagatggtaaagttgctttcttgggaaatagaaaccctatgagaaaatttgcaaggacacaatggtacctagatttattaaatattcagataaacaatctagcagkaatgaataggaaaaaatctaagaaaaaacgaattaaagtccaacaacgyttagaaaatataagaaaagatttccrtcataaatcarcaaaatggcttactgataattataaggcaatcattatcggaaaattaccaaaaggtataatttcaagagacaggtcccttcctaaatcagtgaagagggcattcaacarcttgggtcattacaagtttcgttgctgtctcaaagataaatgtcaaagaagaggagtagtgtaccatgaaataaatgagagctacacttctaaaacgtgtactatgtgtggtaagcttaacgatattggaagtagtgaagtttaccattgtaattgccaaaagaacacttggaatagagatataaatggtgcacgaaacattttgatgaaaggaatttctgagagctacctccggattggttgttcctaattaagatggaacaaccaagacgctatctttagagacgccacgtgtgtgcttgcatccacatggttgttcgctaggactcaatattcttcaagaaattgaggactactaaagattgatgtagcggacattgtttatctacttttttcatcatatatatcatacaaggtaggtaggtaatcttgcgggaaacattgtatgtcatagaccacactatcttctttgaaatttattcgaggtgtttttgctcatcgacccatgcgtgataaaaagagtgttcaaaagatcattttgggtttaatacaactttcattaattttccttgaaaatctggacaatacttttgatagacgtcttgtttgttttgtattggtcaggtggcttgttcatattcatattaaataaattaagtattaaatcaaatttaaagtgtatatttataattttcttagataaaccaacattttaaatctccaagggttaaaaaatgtattttaaatgctaaacggtgtaaacacacattctatctatctatttttaatccacatttctcacaattgaactcaattcttttaaaccttccattgattcaagatgaccgcaagggccacaagttttggtggtgtagtgttcgttaacaaagtttagattacaatgcttggttcgcataataacccaacctgtcttttaaccgttcattctgccaacaaggctcccagggcctccsgatagcatctccctcttaagcacataaaaaagggcttttaactgcaaacaacaccattataaagttagcctgatcgcatgtttacctcagttttttttttcaaattcaaaacaaagaaaaaatttgaaaatatataataaaatagatttgatttggtaagaaaaaattgataaattaagaaatgaaaaatattccagaattttgttctgtcattcgtaaaaaatatattcctggatatttcactgtaaataaaaatgcatgtgggcgaagrtatcttatagcatttgaaaaagcgtcaaaagcaaaaagtatgaaaaaccttatttttgaaatgaacacayatatgaataagcatccaaaatatatcaaacccatagaaccttygataattgaaactttatatttcgaaaaactccatcttgtttgtaaaacatctggtttagatatcttgttatttagagattgtgtaaaagattgtacattatttaatgcattttctgaaaatgaagatataaaccaagaaattcaaaaaaatgaaaatagatttgtatttcaaaatgatatgataaatgatgcacgttattttttagaggaattgtacaaattttgaagtaaatatgagataataataaacaaatgtaatattgaaaaacactgtcaatttcgagtttatttggcacaaacggcatggaacaggcacaagtagacagagtacgtgtaccctgcgcrgtagtgtacaggttggtgcaggaactgttattggtcagttggttgggcgtattacactgcagattgataccattatggcgatgcggtgatacatttagattgcagcttgaacagcttcagcagggatttacaacgagttttgcaagtgtttttgccatcactttgtttttttatttagtgtgtcatatttttttaatacatttgattttcataataaagatcaaacaaaatttttttctatttgttcaagtgattgcctcatctcaagtcaacaatttaaaacaaaaaaaaatattttgatccttctttgatattccatattgataataaaaaatatttttttctctattgaagtattgcattgaatagtgataacacaattttttgctatggtatttctcaatgattactcatcttmattattaattagaaaacacaataggaaaggtttttggaaaagagacatacattaaaatttttctaacattacaatattatgttaaaacttgaacaaaaattgacaaaagagcaatgtgaagactttttaagaaatatgacagtaaatcctttaacaggatataagatagatcctgaaaaaaaactttctcagaacattaaaaagatatgcttgacaaaaataaatgaackaaacaataacagtgaagtaaagaaagatggwaagaataaagataaaaagatgaagagtaaaaataatgaaggtaagaacaatgaggaaaagatgaagagtaaaaacattgatggaaaaaacaatgaggaaaagatgaagattaaaaacagtgatggtaaaaacaaagatgaaaagatgaagagtataaacagtgatggtaagactaaagatgaaaagatgaagagtaaaaataaagaaggtaagaacaatgatgaaaagatgaagagtacaaacagtgatggtaagaccgaatatgaaaggatgaagagtgaaaataatgaaggtaagaacaatgaggaagagatgaacagtaaaaatgaacattataaggatttaggatgtgatatgcacaataaaatcgcatatcatttaaacgatccaagaaaggcatttgaattaattaaatattcctatggtagattttcaaaaaaggatatttcgaaagaagtgacacagcagtttattaaaaaaatggtttatggaaagcgtgttgtgaagtgttaagaaaaggagaacccaaacaattggatgttgtctttgatggaaaacgtgaagtcggtgatcttacaaagattgaattacaaaataataatggactattaattgattgttcaattagtagattagtttgcaacattatttttaaacccggagctacgaacgatgagaagaaatttatccaactattaaaattgttgtttgatgatgtaatatatgctgcggaagacaatgtaaaacaaaaagacattgaacatttcataaaaattcttgatttgtggaaaaaaactttagggacttttgctccatctctaaatggattyttacacccgtcaaactcatattttgcaacaagcgcaaaaccaacctctgtatttggaaatcaattactaaaatgcatatcggtcatcactaagagtacttttatggcaatgagaagtttagttcttcttacaagagagagtgatgattttaatcttgaaaataaggaaaaaattgtaagcatttataaaaacatttttcacgtaatawacattccttctatgtatgtaattgactatgattcaaaatttgaaaaagatgaaagatgcaacttaaattcatatttagccygattggaataactagcaatgaactaagcwggcaatttttcaaaatagagtatttttawttttgttttcttgtttcatgatccgctacrtcaatctttagttttgaagactcttgattttgctttgctagacagcctaattcacactggcttgatgcagcaagctaaacccgcgaagcaaagtgycgttcaagagttaccagcaatggtgacgcgaagctccctccrggtctgtaattccggatttttyggttttacgagtctgaggttagacacataacgattaaaattaggactgtacaggaaaagctcaaacaacgtacttacttgtttcttgctcagctggctcttgcttctgctgtgctgctgtaatcttcttatttgccactgctgctgcagkttgcttgtcactgtggttgaataaaattactataaaacatgctttttttttyyymmcccmawycmwwmccskksmrgkkkyyksyymrsmaaammrscccmrggrarsmmcaaaaaaaagaggatttcttgcaagcaaacgccgctgacttgtcttatcagactgtttttcttttttttttgcggytrctaaagtggtgctgccgtgagtgcaagttgacaatttaatgatgaatttctaatggattgttttgattaattgttacataattataccagcgctgccattagtacaagctgataggttaaaaagaaagatcctagtttgacccgagctgactaacggggcctgaaaggagcttcgcttccgaaggaaagctctgctgccttcgggtcatgtattaaagataagccaaaggagtaagtaaatgacaggaagcgtttaatcaacaaatgtaacagaacaaaaaatactccaaaagaaatcaaagagtgacctagctcaagcatacacgaacaactttgcaattaaaaagaaaaatctacatttgatataaagtttaggaggataacctgttgggrtatcaaaatggtatcaaacaatgggatcaaaaaataaagatacaraaacaagattaatttccacatcaggaaaaatcaaagccttcctaaacaattagagaatgattgtaaattgactaaagataatttaggacgtgaccatcgtttatcaccaagtagcctgtgataaccaaacaggcccaaaaagtaatgaatggtttggtttgggraccaatccccaatcaatagaccctggagtaacaacaatgttaactatttatagcaattcaaatggactagaggggagaatgacatgataaggatatttaggctttgtaaatgtttaracaaacttatatctagggctaattgtataaaacgcaagttcaraagaaagatgtataaatctcatcgttagtcgtacmaagacgacattcgagacstttgtgctgcgagttcatyaaaaatgtgagccaagtcaattagactaggcgatgctaccagctttcagctggctagcaggccctrtgctcggcctttggcttgtctttaaatggacccgcakggaactccgtraaaagctttgctgcctatcgggtcgcggaaataggattattaaactatcacgcttctttctgtcgtaggctttgcagctctggtgccagtaccattaggtctggtattggagttgtatcaattatcttaataaattgaattggattgcattcttagattcccagtgtatatgcagagcttatgtgcaaaatacttttccctttgtcaagccttggcaagtacatggattaatctaaacaagtattatcacaatttaccaattgaatttttacatttttaatgycttttaacgcatcaaaaagaatawtgtaaaactcttcattataagcaaaaattaagaattccatarctgtgaattttggattagtaaatactaatttcaattgttytatacgctgtaatggttttttycmrggsskkrwysktsrwttkktkgrwtttttwwactccattcyaaacttaatgctttacgcatatcaaaattttcatcaagagaagagatagataacatgtatttccaatgattaggatcttttgtctttttttgttgggaatttgtatacttggctcctccttttatttgattattatgttgtcgtaatctccttatcatatttcttgtgtaaycattatatgtttttccaaatttgtcaaaaagtatktaacaaaaatgagtatattccataagttaataaggcaaaaaaaatattttttacctttgtcttaaatgtttttaccgcaaataaattttaattatrtacactgagtccactgagtccactcagtccatctatcwatttatactcatgacctccttggtcgccaatacttgccgtccttggtcaggtcgtacaacttcgtatttcatcagcataattttgactgrtcaaaagcatttcgtcccagtggtggaaaaaccgctgcagggccgctgcaaggccacggtaacccttagtaaggtaaggttacatcgctatatccgcatttctgtaggagccctttccttcacaaagttgcacctacacatctgctgcargtgctgcattaaacagagtaatgcagacatctccacaaacacagcacctgctcatgttgttgatgrgatttgagtacacagcaataatgagcctaacaaaaacagctgccagtggttaggcagtgatttcgattgcaattttttttgacgactctcaattccaccaaaagaacgattatgttcatttgcactgtcagcaatgtccgctacatcaatctttattagtcctcaaattcttgaagaatattgagctcttgcttttgcttcacaatggcgacagccttgcaagtcctaacgaacaactatagcagcaacaaagtgttcctcgtcttggttgttccatnnnnnnnnnnnnnnnnnnnnnnnnnnnnnnnnnnnnnnnnnnnnnnnnnnnnnnnnnnnnnnnnnnnnnnnnnnnnnnnnnnnnnnnnnnnnnnnnnnnnnnnnnnnnnnnnnnnnnnnnnnnnnnnnnnnnnnnnnnnnnnnnnnnnnnnnnnnnnnnnnnnnnnnnnnnnnnnnnnnnnnnnnnnnnnnnnnnnnnnnnnnnnnnnnnnnnnnnnnnnnnnnnnnnnnnnnnnnnnnnnnnnnnnnnnnnnnnnnnnnnnnnnnnnnnnnnnnnnnnnnnnnnnnnnnnnnnnnnnnnnnnnnnnnnnnnnnnnnnnnnnnnnnnnnnnnnnnnnnnnnnnnnnnnnnnnnnnnnnnnnnnnnnnnnnnnnnnnnnnnnnnnnnnnnnnnnnnnnnnnnnnnnnnnnnnnnnnnnnnnnnnnnnnnnnnnnnnnnnnnnnnnnnnnnnnnnnnnnnnnnnnnnnnnnnnnnnnnnnnnnnnnnnnnnnnnnnnnnnnnnnnnnnnnnnnnnnnnnnnnnnnnnnnnnnnnnnnnnnnnnnnnnnnnnnnnnnnnnnnnnnnnnnnnnnnnnnnnnnnnnnnnnnnnnnnnnnnnnnnnnnnnnnnnnnnnnnnacttcgtatgtgacagcataaattgaagttcctcatcattattctttttctcgtctattaaatcatatgcatgatttagcaactctgtataacgttcaaaaatattcttatcccaattttgcttttcataattttggaggaatgatggtttcttcgcatctaaatatttataagtatttattctgtctaaaaatctaatacgcatttgagcacgatctaaaatttgtaaaatagcaccccaaaatgcaattttttttattttgtattttagatgcacccagaacattgacagatcgaacaacaaatgcagaacacttcatgatgtcgttatttggtacgactaggtccaaggcaaagtcaagtatttcatgataaggaccatcatatttttattggtagaatgaactggattcatcattgattacctttctagactttgattttaaagttgtcttagatattttgttcattaagtctatttgtctgtctgtattatacagttgtttatcatgaaaaaaaatcaattatattatgtggttgtgtatattgtttaagaagagtaatgtctaaagaagcttttaaaatatcaataactttgtttaattcatttttaagcattttatccggatcattatgttgctcaaactcaattttgatataattttcaatcataaaaatgttaatttttctagctaaaagtttttctagaataaagccaattaaatgattattttgtttaataatttcaacaactttgctctgtttatcattttcagatattttgcgaagaattttgggtattttttttttaagttaagaattgaagaaatgaatttaagaagtcctatacgtagagaaaaagggagtttgtttggattgttatcaaccaagtgtgaccaatcagtgctatatgtgcatatatcaccaaatcgcgccatttcgttactagaaggaagatacacctgtgtactaggttcaaagtataaattaatttcatcatttgttgtattgaaatgcatgtaaaagtgtgagagtactttgttaaatccataccaagccagaggtgctttcatatttattgacaatccggtaagaatttctttctcaaacaaaaaagttacctcaaatgcaacatcttcggaaggtttatcacttgttgtatgatgtttaaattggccatcctcaataatcgcgaattcaatatggtttgtacaaaaattttttataacatcaccaacaatgttgtttttaatttcataaataaggtcagatggtaartcattaaattcagtctctttttggttttttttcatttggcttttttttgctataacaacatttttctccgtgtttattaattttcataaccgagtgttcaggacaattgtctttttcatctrgcctacgtttttttggacatttgctttttagtttttttggcatgtccatatttttacattttctttctaaaattttgtgtgtgtattttccaatttctatccttttgccagtcaacgggtttatwttaggattgtttacaaacttttgacaatcatctttgctcaattccttcattgttgatgtrtaaaaagataattttttatgaaatctgtgctattatttgaagcgaaaagccttgacgtggccygttctttgctttcttggctattatgaactytaktccttgataaccaccgtaatagagtggtactactacggycttggagaggttataggccctccatgcaagaatacttygcgagcgaagcatagctgcgcgaacctagcagtgtggaggagttatattgcttyagtaaaacctgtacgccaacaaagttggcctaggcgcttcgcgcgtacgggctttgccctaggccgccaaaggcasctagcctttagggtacaaagttgatataattccaatgacacattgagagatactcckcaatgttgaggtatttgtaggtttaaagtagcgcataatgcgtcgaattcaaacttttttcgcgtaattgcgaatttgttttgtcaaacgggcgaatgacccaaccctgctttcaaccaaacttgatatgaatcctgccaaaagctcatccaaacagctgggggaaaagyatacagaatgtcaagcgtctttttgggcgcatgsgtcccgtaaggggcaccgtcagtccctttgcatgcagcatagcatgttaagcttgcatmatgtgcttgtatcagtcagtccctccccacgctcaagtgcttctgctgcttcttcttgctctttgaggaccaagtttggttaaggaagcgtttcatcaacaaatgtaatatacccaagaacaaaaaataccttttagacactctaaaagaaatcaaagattgtgctttgagtgacctagctcaagcatacaagaccaactttgcaattaaaaagaaaaatcctaaccacacatttgatataaagtttaggaggaaaaaggataaccaaagtattacgttggggtatcaaaatggtatcaaacaatgggatcaaaaaataaagatttatctaacgtatttacaaaacaagatcaatttccacatcagaaaaaacctggaaaattagagaatgattgtaaattgactaaagataattttggacggtactatctgaccatcgaaatgcgtaagctaacatatatgtggagtatacaagcaaatgttcagaataggttgtaaagtagagaaatgtaaaaaaaaaattacataaattttcaaaagagctaaatgcaaggaataaaaaaaatgaatttgaatacttaaaataaaatctnnnnnnnnnnnnnnnnnnnnnnnnnnnnnnnnnnnnnnnnnnnnnnnnnnnnnnnnnnnnnnnnnnnnnnnnnnnnnnnnnnnnnnnnnnnnnnnnnnnnnnnnnnnnnnnnnnnnnnnnnnnnnnnnnnnnnnnnnnnnnnnnnnnnnnnnnnnnnnnnnnnnnnnnnnnnnnnnnnnnnnnnnnnnnnnnnnnnnnnnnnnnnnnnnnnnnnnnnnnnnnnnnnnnnnnnnnnnnnnnnnnnnnnnnnnnnnnnnnnnnnnnnnnnnnnnnnnnnnnnnnnnnnnnnnnnnnnnnnnnnnnnnnnnnnnnnnnnnnnnnnnnnnnnnnnnnnnnnnnnnnnnnnnnnnnnnnnnnnnnnnnnnnnnnnnnnnnnnnnnnnnnnnnnnnnnnnnnnnnnnnnnnnnnnnnnnnnnnnn

SEQ ID NO: 261 - DNA, 21767 bp, unidentified
  misc_feature 1..21767: note = Fanzor polypeptide
  variation 6882..9606: note = n is any nucleotide
  source 1..21767: mol_type = other DNA
agggagtggctttgcttgcaaacaacaatcacatccgccttatcttcgtccgaggtcatgcgtttgaatgggctagcatagcgataagaggcggctgttagggcttgcaatatccacatccatgttgagaggcgacaaagtgcacagttgtgctttcatgtgctctgcttgacatgtcatttcgccctgcatcaagctcggcagagggagggttagggtttaggggccagcaggcacagcgaatcgccgccaaaggagtataaaatgacaggaagcgtttcatcaacaaatgtaaagaactctccaaaaaaaatcacacacacacattggcattaatgtaagcatgcaaactggctagacatttgggaggcacgcaggcttccaaggcgttcatgaaccaaatctctatcagactccttagatttgtttcagagctcgtttcactttttgatgctggttgagcgtgaacaaatcaaagattgtgccaagtatacaagaccaaatttgcaagaaaaatcctaaccacatatttgatataaagtataggagttgggatatcaaaatggtatcaaacaatgggatacccaagatcaaaaaataaacatacagatcaatttccacatcagagaaaaacgaagccgctacatcaatctttagtcttgaagagttgcaccatgcaactacatccacaagccactcaacagatcccatactttcccagttgcaacaaatgcaacagcagcactcccaacaaatcaaacacttctatagaaattcaaatggcctagcttataaagtctatgaaacctccttgactccttgtcaacctcaccactccacgcagcaacacaaacagctgctagataggccagatgctctctaacaagcaagttgcaacttaactgttaaagcctcttttatttttgcttgttcatttttaggtctcattttactatggttgttaatcaatacttaaataaattttcatttgactaaacacttgctttaattctccaaataaatcatattcaaattatatgaaacgcaaaacacaattgaatgttatcacatggtttgaaggaatctctgcttgaatgaactcattttcattttttgaaacaacattgataaattcagtacctgtttctatatctatttcaacatcaaattcaggatttgataaataaattctgtatagatctcctatatcatcacattttgtttcattactgttttttgtttcaattgttttatactcacttgggataataacttcaaacccatcaccaataaagtgttcaacattattataaaaatggtaaaaaaaaacttttgcgtttgtaagaggtaattcagatgacctaacaccatttcaaattatcttatgttcaagctttaaattgttttatcatttattcaaaatatatgtcaatttttaagcaatttttcaagttttactcaaaaaaaatcattatattctgcacgcttttagcatatcaattagatcaacaaccgttaaaactttggtgaattgcatcatgtaaacaaccaatgtaaaagaaattcaaagattttcattcaaaatatatcattgtccaatatttgagcagtgctttgcataggtagagtagcttgtgttaagctttatatattttgattaaaacataccgttccgaacaaacataccgtttcggaacgtgaaactttctctgggtttcaagggttttacttctcctccttacgtcccctagccaagcacattgaaggcttaatcgtgttcaaaaatgcttttggagaaggaaagtgctcgatactcttagacaaaagtgtctgcttcctcctgttatgtgaatgatgtgcaactctattatcaatgcacattcacttctagcaatgctagcatgggactttgtggattcgaatttggtacggaagtctctaatgagagaataaaaacgcattgttgcatatttatttattatttttatcaaaggtgtttgagatgttgtgtctgttgtcgagcacaataatctgccaatgtgacaagaatgctgggatcgcttgaaggtgggtgacagggtctagatctgtctcacagtgtgtgctttgccttgcagacagcttagaactacaacaagtcatccaggttaatatgtgaaagaataaaatagttacaatgatgcattgatagctatactaaatgtctttaatgaaaaaactttattttcttatattttgacattttccttttgttatcggaaaaacactgaactattttgaactttttgaaactttwttgaattattttcaactwtktatttctattaggatttattattctttactttttttgttaaaaatttaattaactacattattcaatgcattgatagctatactaaatgtctttaatgaaaaaactttattttcttatattttgacattttccttttgttaccggaaaaacactgaactattttgaactttttgaaactttattgaattattttcaactaattaaaactctatttgtattaggatacattatacactttattcttttttgttaaaaatttaattaactacattattcaatgcattgatagctatactaaatgtctttaatgaaaaaactttatttttttgtattttgacattttccttttgttatcggaaaaacactgaactattttgaacttcttaaatctttattgaattattttcaactaattaaaactctgtttgtattaggatacattatacactttattcttttttgttaaaaatttaattaactacattattcaatgtattgatagctatactaaatgtctttaatgaaaaaactttattttcttatatttggacattttccttttgttatcgaaaaaacactgaactattttgaactttttaaaactttattgaattattttcaactaattaaaactctgtttgtattaggatacattatacactttatttttttggttaaaaaagttaattcacaataaatgttattcaatgcaacatgtcaacaaattaaataattcaacaaaaaaagagagtaaagttgtggtaggtagaggattgaaggaatatctctgtgctggagggggagccagcccgcgcatggtgactcgcacgtcgatatcacacaatgatgatttacggtgtaaagctaaaatagcaaatcaagtctgaataaatgatctattaaaaaatgatgtgctccatttattttttcaaatcgatcaaaggtcacaacagttatttcattcattgtacttttttacaatctattttttttgtcatatcacacttttacattttttctgtttaatgaatccacgtggttgtttgttaggacttgcagggctgtctagctaagcaaaagctagcaagagctgcgcgacttgcagggctgtcggcatagcgaagcaaaggcaagagtcttcaagactaaagattgatgtagcggactttgagatatgaaattatgatagtcaccatatcttttgaacatatcaatgttacttttctgtctatgtcaggaattggcaccgaaactccataagtaaaagtaaattatcaattttgaataaccaaactcataaattagttaaataaatattggttatcacgttgtcaaattaaagcctaaatttacgagaagcttgaacttacggtttcataaacttgttcatgttgtttttaacaatggaaggttttaacagttaattgatttattcaatgatatttaaggaatgaaaacattgaaataatttaaagccttgaataaaaatagaatcttgcagctataaatcgtctctaaaatatgatacatatgggtaccctaaaggctagctgcctctggcaggtacgccgcctttggcggcctagggcaaagccgtaccaactaaaaagaattgccctgatgtttgccaagaacaaagtaaaggtgactttgtgcaattaccaagcaactgttggttttctttgaaacattgggtggaaataaagaaggagataaaaaaagaaactcacacaatcaaagaagaaaaaagaaaaaaagcgaggaaaagcaacctgtctaaaaagtatccaaaaaaagaaatcaatgtgtcgaacaacttacaattgggcgctgtcagctacgctgcctaacgggtcctgaaaggagctttgcttccgaaggaaagctacgctgcctaacaggtcctgaaaggagctgacatttaaaatgctaaacggtgtaaataaacaatgataaaaatcaagcaaagacgaaatctaagttctcatatgcctttatataattatcaatataaacaggagggtaaaaaaaaaaagtagtggacctcatgtgtaaattttggttgggacccccttgacccacccacccaccccaaaaccccccttcccgtgctccaatccagacaaaaagggtaccaatctgctccttttcaaattccctatccatctgcatactcacagcaagcaaaaacaggatttgcaaagagttatggggcaaaaattgatgcttggacgctcatgcatgcgtgccctgtcaggcacccacagctggcttggaagtcaacaaactgcattttcaacttcataactcaagtaaacatcttgtgttatcaccatcctgtaagtttggtatgatttgcagcagctttgcactcacacacctatggaccacaccattgagcgtatggccttgacactctaccacgcatagagacccccccttttatccaatttgcaccaaaagggtgccaatcgacagttcttgagctcaggagtccgacgatatgtttaaaattatgtagaagtgtcccagaaaaattctggagggggggtcccaaaaagtccagaccccccccagacacccacccctaccgaccttcaccgttcggacccatacatataccaatcgatagctctcgatctcaggattccgaatatgggtgtcccgatcggattgacacatgaggtccaaaagttatgcttcctacaccctcctgatataaagaaggaaatagttttgaagacgacatattgtcactttatcattaagtttttctgcaattttttttgcatattcatccaaagatgtttgtttcgcaaggttgtttgagtcaatattatcagcataaaacatacaagtataatcatatatttcttcaaatgaagccaaactgaaaggaacacgtgtttgtatacgacctggtcgtaacacaacttcagggataatattcacattatttgtagtaatacaaataagacaaccatcaggactatttaatccatccaaaaagttgatcattttattgatatcaaaaagaggcttataatcaataatacttgtattttcagtatgacttcgaattaggttcaaaatagcgatcaagatcttcaataatgatcattgaattaggaaaaattttcgaaactgagtcccatattttttcattttgaatatccattatgtaaattctttgcattccaaattcaccacacaatgcttttgctaaagatgtttttcctgttccatggattccttctaagagaaatcaaaatttatattgaattcctaacctattgtatttaagtttatttttatgatgacgatgaatggattctaatatgtttttttttcattttgttttaatacaacttgagacaaagacggaacttgcacagtttttttaaagcaacagtcttttctctcagtcatagaaaaaagatcaacctttaaatttttttttttagatttatactctttttttgcatctattataaaatctaataaaagatcaaaatttttcttcataaaaactgatatacacatttttttatcatctttatttgaataagatactataaataaatttcctttatgttgaatataatactttccgtgtgcgagtgttaaatcactcgatttggtttcagtatcactatcattgtttttttgtattcctatatcacaatcttcttcatctggatcaaaacttgattcatctaaattaagtgtatcaatataaagagcttttttgcaacaaaatatataatagcgcaaaagtttggattaaacacagaaatcttaactgttttataaaataaccttgaaaagaaggtatttaattcataccatacattattcaaaaatggaagtaaaactgataaccataagaaggttgttacatcaaatggcatcattgttgttacaacaatttatttttccaatctttataatccaattgcctaatgttatatgctataagttaaatagaaattgttcaattttttttgtatataaatttttaaaaaaattaatagatcaacataccaaaatactgctctttaaatttccctaaattcacagataaataatatatacttattatgaacaatgaagtcttgtacgcaaagctacctactgctgccrttggcagtctaggcgcayagygcgtacacacctaaacaacttgccaaaacattcaatgtcaccaacgaaaccctgggagaaatctggaaaaatcaaagtcaagaaaactgaaggtggacacttaagatacatttgtacactaccgtgcagggtacactaccgcgcagggtacagtacactaccacccgtcatgcctaacaaygaacaaaaacaatctatcatttatgccagagtatcctctgcaaaacaaaagagtgagacaaactcaattcctacaaatatggcagatatcttgtaaaatcaataaacgcagggcaagggcagtttccatctcgcaactgttttgttagaaagaaaacaacgtggtgcaaaaaatgcacggaagtttggcagcagaagtgtttattaaaaacaatttaaannnnnnnnnnnnnnnnnnnnnnnnnnnnnnnnnnnnnnnnnnnnnnnnnnnnnnnnnnnnnnnnnnnnnnnnnnnnnnnnnnnnnnnnnnnnnnnnnnnnnnnnnnnnnnnnnnnnnnnnnnnnnnnnnnnnnnnnnnnnnnnnnnnnnnnnnnnnnnnnnnnnnnnnnnnnnnnnnnnnnnnnnnnnnnnnnnnnnnnnnnnnnnnnnnnnnnnnnnnnnnnnnnnnnnnnnnnnnnnnnnnnnnnnnnnnnnnnnnnnnnnnnnnnnnnnnnnnnnnnnnnnnnnnnnnnnnnnnnnnnnnnnnnnnnnnnnnnnnnnnnnnnnnnnnnnnnnnnnnnnnnnnnnnnnnnnnnnnnnnnnnnnnnnnnnnnnnnnnnnnnnnnnnnnnnnnnnnnnnnnnnnnnnnnnnnnnnnnnnnnnnnnnnnnnnnnnnnnnnnnnnnnnnnnnnnnnnnnnnnnnnnnnnnnnnnnnnnnnnnnnnnnnnnnnnnnnnnnnnnnnnnnnnnnnnnnnnnnnnnnnnnnnnnnnnnnnnnnnnnnnnnnnnnnnnnnnnnnnnnnnnnnnnnnnnnnnnnnnnnnnnnnnnnnnnnnnnnnnnnnnnnnnnnnnnnnnnnnnnnnnnnnnnnnnnnnnnnnnnnnnnnnnnnnnnnnnnnnnnnnnnnnnnnnnnnnnnnnnnnnnnnnnnnnnnnnnnnnnnnnnnnnnnnnnnnnnnnnnnnnnnnnnnnnnnnnnnnnnnnnnnnnnnnnnnnnnnnnnnnnnnnnnnnnnnnnnnnnnnnnnnnnnnnnnnnnnnnnnnnnnnnnnnnnnnnnnnnnnnnnnnnnnnnnnnnnnnnnnnnnnnnnnnnnnnnnnnnnnnnnnnnnnnnnnnnnnnnnnnnnnnnnnnnnnnnnnnnnnnnnnnnnnnnnnnnnnnnnnnnnnnnnnnnnnnnnnnnnnnnnnnnnnnnnnnnnnnnnnnnnnnnnnnnnnnnnnnnnnnnnnnnnnnnnnnnnnnnnnnnnnnnnnnnnnnnnnnnnnnnnnnnnnnnnnnnnnnnnnnnnnnnnnnnnnnnnnnnnnnnnnnnnnnnnnnnnnnnnnnnnnnnnnnnnnnnnnnnnnnnnnnnnnnnnnnnnnnnnnnnnnnnnnnnnnnnnnnnnnnnnnnnnnnnnnnnnnnnnnnnnnnnnnnnnnnnnnnnnnnnnnnnnnnnnnnnnnnnnnnnnnnnnnnnnnnnnnnnnnnnnnnnnnnnnnnnnnnnnnnnnnnnnnnnnnnnnnnnnnnnnnnnnnnnnnnnnnnnnnnnnnnnnnnnnnnnnnnnnnnnnnnnnnnnnnnnnnnnnnnnnnnnnnnnnnnnnnnnnnnnnnnnnnnnnnnnnnnnnnnnnnnnnnnnnnnnnnnnnnnnnnnnnnnnnnnnnnnnnnnnnnnnnnnnnnnnnnnnnnnnnnnnnnnnnnnnnnnnnnnnnnnnnnnnnnnnnnnnnnnnnnnnnnnnnnnnnnnnnnnnnnnnnnnnnnnnnnnnnnnnnnnnnnnnnnnnnnnnnnnnnnnnnnnnnnnnnnnnnnnnnnnnnnnnnnnnnnnnnnnnnnnnnnnnnnnnnnnnnnnnnnnnnnnnnnnnnnnnnnnnnnnnnnnnnnnnnnnnnnnnnnnnnnnnnnnnnnnnnnnnnnnnnnnnnnnnnnnnnnnnnnnnnnnnnnnnnnnnnnnnnnnnnnnnnnnnnnnnnnnnnnnnnnnnnnnnnnnnnnnnnnnnnnnnnnnnnnnnnnnnnnnnnnnnnnnnnnnnnnnnnnnnnnnnnnnnnnnnnnnnnnnnnnnnnnnnnnnnnnnnnnnnnnnnnnnnnnnnnnnnnnnnnnnnnnnnnnnnnnnnnnnnnnnnnnnnnnnnnnnnnnnnnnnnnnnnnnnnnnnnnnnnnnnnnnnnnnnnnnnnnnnnnnnnnnnnnnnnnnnnnnnnnnnnnnnnnnnnnnnnnnnnnnnnnnnnnnnnnnnnnnnnnnnnnnnnnnnnnnnnnnnnnnnnnnnnnnnnnnnnnnnnnnnnnnnnnnnnnnnnnnnnnnnnnnnnnnnnnnnnnnnnnnnnnnnnnnnnnnnnnnnnnnnnnnnnnnnnnnnnnnnnnnnnnnnnnnnnnnnnnnnnnnnnnnnnnnnnnnnnnnnnnnnnnnnnnnnnnnnnnnnnnnnnnnnnnnnnnnnnnnnnnnnnnnnnnnnnnnnnnnnnnnnnnnnnnnnnnnnnnnnnnnnnnnnnnnnnnnnnnnnnnnnnnnnnnnnnnnnnnnnnnnnnnnnnnnnnnnnnnnnnnnnnnnnnnnnnnnnnnnnnnnnnnnnnnnnnnnnnnnnnnnnnnnnnnnnnnnnnnnnnnnnnnnnnnnnnnnnnnnnnnnnnnnnnnnnnnnnnnnnnnnnnnnnnnnnnnnnnnnnnnnnnnnnnnnnnnnnnnnnnnnnnnnnnnnnnnnnnnnnnnnnnnnnnnnnnnnnnnnnnnnnnnnnnnnnnnnnnnnnnnnnnnnnnnnnnnnnnnnnnnnnnnnnnnnnnnnnnnnnnnnnnnnnnnnnnnnnnnnnnnnnnnnnnnnnnnnnnnnnnnnnnnnnnnnnnnnnnnnnnnnnnnnnnnnnnnnnnnnnnnnnnnnnnnnnnnnnnnnnnnnnnnnnnnnnnnnnnnnnnnnnnnnnnnnnnnnnnnnnnnnnnnnnnnnnnnnnnnnnnnnnnnnnnnnnnnnnnnnnnnnnnnnnnnnnnnnnnnnnnnnnnnnnnnnnnnnnnnnnnngaatgataatgtccgatggtcgtagggccatgaggtcattgaaaaacgcctcagctgcaatctggcgatgtactcaggctcatggtctatgacgattaggcatgaggatgccattgactgttgttaaaattagtaaccccatgaattgccttgctaactcaagtcaaatagtatctacctaacttatctttgcttagcttacaatcgttttcaggaaggccacaacagttttttcattcattgtactttttttaaaatctattttttttgatacatcacagttttacattgtttctgtttaatgagatatatatatttttaagcttacatgtgatattcgtcattttcaaaatttctaacaaaattaaattacttaaggatatactttattaagaatataagaaatggaagaaaatgaaacgcctcaaaaaatcaccatccgagaagctgccaaactcttcaccgtgcacccacaaaccatcasagaatggacagatgcargaagaatcccatttgaacgtacgctcacaggacaaagaagaatactcttgtacaaaaatccaacccaagaaaaaagcaccaacgaaaagttcaaagccatctactgcagggtctcaagcaacaaacaaaaagatgaccttgaacgacaagtcaagtccatgcaagaaaaattcccgaaccacagggtctatacagacatcggatccggtatcaacttccagcgaaaaaactttctctcccttttggacgcatcactgtcaagatctttgtcagaagttgtggtctcctcaagggatcggatgctgcggttcggattcgagttgtgtcaatggctattcatgcgccaaggaaccaagcttatcgtcttggagcaaacggatcaatcaccagaagaagaactgtgttccgacatcttatccatcattcacgttttcagctgccggagaaatggctcaagacgttaccattcacaaagcgcataaagtcaagctttgtccgacaaagcgacaaagacaagctttgagaaattgggcagcgggatacagattaagttataataaggcattagatttcaaaaaagaaaatacaaagttaagcaaatttgatttgcggactttaattgtgacaaagaaacaaaatagcaagtccaaaacacgattgtttggtgaacacaatattaatccgattttccaaaaacacccttggctttccaaagttcccaaagatatacgacaacaagctgtttttgagyttttcaaaaattggagacaagaaaaaggaaacgtcagctataaagatagactaaaakacacatcaaytataagtttaraaaaagaacatgtcaaagttttggataatggtaagattcgattatattcagggaaattaaaaaataccttacgtacatttggtaaaatgcccaaatcactgttaccatccgagtttgaggacgaagttaaaccaccttgccaggttttgttacaacgacaaggtcgttcttattatatgattttcccgataaaagaagaggtgaaagttgtacctacaatttacaaaggacacatggtaggtgtagatccagggatcaggacttttcaaacatgttatggtacagatggtaaagttgctttcttgggaaatagaaaccctatgagaaaatttgcaaggacacaatggtacctagatttattaaatattcagataaacaatctagcagkaatgaataggaaaaaatctaagaaaaaacgaattaaagtccaacaacgyttagaaaatataagaaaagatttccrtcataaatcarcaaaatggcttactgataattataaggcaatcattatcggaaaattaccaaaaggtataatttcaagagacaggtcccttcctaaatcagtgaagagggcattcaacarcttgggtcattacaagtttcgttgctgtctcaaagataaatgtcaaagaagaggagtagtgtaccatgaaataaatgagagctacacttctaaaacgtgtactatgtgtggtaagcttaacgatattggaagtagtgaagtttaccattgtaattgccaaaagagcacttggaatagagatataaatggtgcacgaaacattttgatgaaaggaatttctgagagctacctccggattggttgttcctaattaagatggaacaaccaagacgctatctttagagacgccacgtgtgtgcttgcatccacgtggttgttcgctaggactcaatattcttcaagaaattgagggctactaaagattgatgtagcggacattgtttatctacttttttcatcatgtatatcatacaaggtaggtaggtaatcttgcgggaaacattgtatgtcatagaccacactatcttctttgaaatttattcgaggtgtttttgctcatcgacccatgcgtgataaaaagagtgttcaaaagatcattttgggtttaatacaactttcattagttttccttgaaaatctggacaatacttttgatagacgtcttgtttgttttgtattggtcaggtggcttgttcatattcatattaaataaattaagtattaaatcaaatttaaagtgtatatttataattttcttagataaaccaacattttaaacctccaagggttaaaaaatgtatttgactgaattgaacgaattcaaatataattttggtgacccattacctcatttattttatttcttgcttaatttaccaaattatgatacactcccaagtatccgaaataaatatggtaatttaaaagaaatacgtgtttttgactcacaagattgcgtattgattgactgtaatgaaaaacttcgaacaataacaacacctaattatcatgagaatgaatccaaagagttttttttttcattttaaggaaagaaaacaatttgaggcctcttatattaattccagttttgattaaacataaaaattgtatgaaaaatcacaaagagaaatcattgcatggtcttttattgctgtataatagaaatatggaaagaatgcaatttattgacattaaagcttaccatttatcaagattttgggtgagtgtgcgaaaaatgttaaaaaagaagtatttgagaaaaataaaagaaattaataatgatattaaattgctgcaatatttttatgtacctatttatttgcaagataaagtgaaaatgccaaggaaagaagtgtatcctttgttcgttttgaattatttcttcaatttatcaatcaatccatctcttacgtttactgaaaatgttttatcaattttgaggtttttacaataagcacactttttgaattatgagggacatatgtcgagtttaggaaaaaaatgaaggaaaaagattgtaaggattcacttagaattcttaatccggagacgaacatgtgtgttaaaaatatgtcacgattattgaaacaattaagggttgataaggaagaaaaatgtaagaatggaatgtattatgacgaagtgagaaaagaatgtgtacgaagtagaaataaagcaatgatagatgtaaatattttgtatgataacattaaaaatgttgtgtggttaggatataacgttgataattcaaatgaaattcaaaataaattaatgaagcacattgtatcaaaatatggtcacgcttttttggtattaaatcattctgaagacaacgcaattacttggaaattgccattcgacgaaggtgattttgattatccatatcaactaacaacaccaaaaggtttttggaagtcttttcgtgaaggaatgaaagatagaagaataaaattcatagttgtcccattggaattgggttgtcatgccgaagatatgtgtcattctgggaatttgatatacaataagataacaaatgagttggaacgctttgatccacatggacttaccatacaagaatttaatccggaattccttgacaaattactaagagagtatttttcaaaacatattaaaaacgttcaatatttgtcttcaatagaaatatgtccatctaaaaacatttttcaatcgatcgaaacacatccgtatgtaatgaagtccatatgccgcaaattgttttatatggaatatttggtatattgaagtcaaactaagtaatcctgatgtttatacaaaagacttgattggtttagcaatgagaaaattaaaaagattatcatcttttcatacttggattaaatcttatcatcagtttgtatttaacgagatgctgaaaagtcaaaagcgtacgccaacaaaattggcctaggcgcttcgcgcaggtatcttcgcatgtacaagctttgccctagccaaaagcgtacaaaatggcagtttggttaatgcatcaacaaatgtaagagcacaaaaagtaccttttccatgtgctttgagtgacctagctcaaacatacaataaaaaaaaagccatagatttgatataaagattaagcatcaaactcaagagcaaaaaattaagatatatttacaaaacaagcagaaaccgtttgtaataatttatttattggatttgcccctttgtattcggaaaaacagtgaacaattttaagctttcttgaacaaatttgaattatattgaacttttcactatgtctttatttcattttgtgttggaaaaagtgtttaacaaaacgttcatcagcagaggttagggtttaggggttttaaagaaaagtgtcgaacaatttggaaactttcttgacttattcaatttgaaggttctaacaattaatacgtttacttcataaaattgaagattgaaaaaaaatgtcaaacgtttggtctttctgttctataagataatatgttggagctgttctgctgatgtttgcaaggttaaatgcaaaattgtgtaaaaaaagttcgatttaaaaattattttgtaaagtgctatcatgacaattatagccattaacatttcaaatgacagttaaaatgctaaacggttacaccgtatgtaaattaagatagttaagaacatatcattagaattaaaatgactcttatcgtatatcctgagtctacaatgaaatttatgttatacgaaaaaatgaaaatggagaattatcaaaatgtatcatttttattcagagataaaattgaacatcaaaaatattttttggccatcttgatatacaacgcattgaatatattgcaaaataatgatgaattcaatcagaatttgacagcatatgctatccaatacttatggattgttgttgcctcagtctttgaaagacatgattacgtaccatcaaatgtagaaatatcaattcttaatgatattgaattggatgttaaaaattttctctttccagagtctagacaataattttagtcatttgctttcaaaatttaacattaattataacaactgctccgaaaaatcgcacactgttaatgaaaatcgttacatgagaatattctacaatgtttgtagaggtttgctttagcaaatcctttgcctgtgccgttttacagtcattaacatttcaaaacccagcgtttactgggcatgaattatttctcgccaaaatgctaatggtcgttcttttctttcaaaagctgttaaagccaacagggtctcgattcccacacccatttgcagtctggcctaacgtcttcggacgttttgatctatccatttttccgctttttcatgacccgccagacgttgtctattccattttagctttctaatcaacagtaaagtgcgttgagaacaagtgccgagctttataattgtcaaatgaacattattatttattatgctgtgatagtatagtctcccattctttgatacttttattgtctaccatagtctcttttcgggtgcttagcttttgggattgctggatgtatcattcaatgacatgtaacgacacggaagatggtaaaaagatgaaacaggttaagagtgatttatatacttgagaagactaaagtgccaaaaaagtagattgtcatgcttcaatcatgtatttttaaaatcatcatccagacaggaaataatttgtgaaaaaagttacaaaaaaaatatatatataataaatgataattaaagatgaatctgcaatgttaacttatcgtgaatatcttcaaaacaaaaaaaattcgtataccttcttgtttagggaaaaaaataaagcatctgatgaattacaagaattcattgataattttaaagaaattatgttttatcaaggatctaaattggcaaactatgtaatgtgtatggttttgttttatcacaagcaatacataaagatgaaaaaagcctgtctttatatgaaaatgtgaagcaaaaagacgtaaataaagaagaaaaggatatgctctggaaaatttttacttctataaggcttggaaaagaagatttttttttttaaattctgaaacagagcaggaaaaaaaacgagataaagaaatcaaacaaaataaagtaaacattggatgccaaaaattaagtgatcccgaattccaaaaaatgctgaaaaataacacgatggacaaggagtgtatagagtatgttaaacaagatctaaagaaacataatttacttaccatttttggaaataaagacagtgaaattgtagattttttcaaaaaactcaaccccgttttgtgcaaaaatgaaaatgacattttaattgacaaatcatttctagaattcacaattgatgatgccttgaaagaaccgtacgtcaacattaataatgaatgtttgttattttcattaattgcaacaaatttggttataaataaaggtaataaaaaaatgtataaaataggatcaatacccaagaatattcgaccatttttttttaaaaggtatgacattagcattagtaaaaggtggaaaggaatctcaacaagatgttattatggaatacccctctcaaatgtaccaaagatcaaaaaaaaatttgctttctggaacacctctggaagacgaagtgcatactaattttaaattaaaacaacctttatcatctaaagaaatatacacatttcttgagttccttataaacaataaatccgataacaattttgacataattgcgaatcttgtaaaatatacatgtacttcatttatagaattgataggtcttctaggatacatatgtttttcagatatgataactgaatcacagcattatttcccaatatcaaatttttgcatccaaaaatattatcaagttgcacatgaatttaaaaaattacaaattaacggtacatcattgtttgaacttatcaaagacttaaaatataataacacaacactcgaagatctaacagaaaatttatcaacaacatgtattcatggaattggaaatcaattactttctttctatatacaagccaaacaagatataatcaaatatgttgacaatatcgaacacacatgctgtcccgcacaatttaacttgaatatctttaaatcatatttgccttttattaaaataattgatgatcatgatattcgtttcttagttgtttttaaagatgattttcttgaaaaccataaaaatcccttggacactaattttagaataagaggatacgacaaaaacgacaaagcttttataaattcatcatctggatatagattacaagtcggtgaaataagtttaaaagattcagggtttactaaaaaaataaaaagagaaaatttagaagagtttgggtttcattcctacatgttgactgattttttggaatttttacgatttcattaacttcatagataagacaacttcattctgttttccaggaggtcaaatagaagaaaggataatgaatattttaaaaaacaacacaaatatgacacaaacattatgcgcaattgctgacatatatcagccaagaagaagcgcaatttttagcacatcgtgtgaatattgcttatacatttctaaaatcatgaaagatgataacaaggttattaacactctaaaaaaggaaaggtttaatccaattacaatgaatacagaaacaagcattccatgttcactaactataattgactttaagaataaaacagatttaattgaaaatgttgcaacagatacatcaaagattaatgttgaaaatgttgatacttctaatcaatgttacatcgataattttgaaacaattagcaagcttgaatatttattagataaagacaaaaatgcttttgttgttgatccatattcacgcaaagatattaccaaaactttcgaaaaaattcgtttattatctataactaaagagatttcacgcttgaaaacaaattattacacatttgattcatattgcaaaaaacttcatcaacaatcttctaactttgacatatttaaggaaatcaaaagaaaatacaaaaacccattgattcaaaacttgacttttgataacatgacagaaaattgtaaaaagcttttgcaagaaaatataaggagaaacataattgaagaaattgcttttactgcttatacatttatattcggtcttttatattacttgttatctttttggatgcaaaaaagggttcgatcaaaattagcagttatgctaatagctcggttgctaaattttaataaaattcgtgcaagaataaacacacctgtagatatgaaatacattgatgattatttacttggtttgcataatgtttttagtgcaattgttgaaaatttaatgttttgggaaggaaacttagcaccatcaacatgtaaatatcattatactttattaggtaaagatattgcgttattcttatctagaactcgtgatgaaatatttaacgcaaagacaaaaacggatgcatctttgataatggagacaccgcaattcaactttgaacaaatgtttgttaagtcacgtgatgtgttgaatgaaaaattttatttcttgaaagaaaaccctttaaagtcatatgatagacaagaatccattccatttagatttgaattttaaatgaaatgtcaaataattgatcagcacaaaatcatgtccatatattatgcaaattatgaaacaatatttcccatgttgatcctaaacagagaaattaacgattttgtagcttcaagaaatacaaatttcatacaaatgcagcaagcttttgaaaaattcttttgatcatttgcatgttgctctcaatactgactcgaagctgacatttcgtcgttttacctagcagatgtgaaacacagtgcagttgcacctccagcaacaaacaaaaaaatgaccgtcaattccatgcaatcccacacacagacatcggatttggtatcaacttcctcgcccttattgacgcatcactatcaaaaactttgtccgccttaaagacatgtgtcaaagaagaagcatgaaataaatgacagcttcaggtccaaaacatgcacaatgtgtggaaaaatcaatgatgtgctgtttatcacttttttattttgttagctgaattacttaatatttaggctttgagttaaaaataaactacacttactattgcgagggcgtggaaggttttaacagttaattgatttattcaattatatttaaggaataaaaaattgaaatgatttaaagctttgaatggtctaataaaaaaaatcttgtagttaaaagtacttaaagccataaatcgtctctaaaatatgatacatgtggttaccaaccaaaaagaattgccctaatgtttgccaggaacaaagtaaaggtgactttgtgcaattacctagcaactcttggttttctttgaaacattgggtggaaataaagaaggagatgaaaaaagaaagaaactcacaatcaaagaggttgacaaagagaaaaaagaaaaaaagcgaggaaacgcattgaggaaaagcaacctgcaaactattataaaacagtgtccaaaaaaagaagatttttaatcaatggtttggttgttgtcgaacaacttacaattgggcgctgtcatgcattaaacataagccgaaggagtacaaaatgacggaccttgtttggttaaggaagcgttttatcaacgaatgtaatatacctaagaacaaaataggatactccaaaacaaataagagattgtgctctgagtgacctagctcaagcatgcaagactaactttggtattaaaaagaaagatcctagccacacatttgacccggagctgacataaaatttaggaagaaaaaggataatcaaagtatcacattggaatatcaaaaaggcatcaaacaatgggatacacaagagcaaagcataaaaaatgtatccaacagatcaatttccacatcaaaaaaaatcgaagccttctaaaacaattagagaatgattgtaaaataactgaagataagttaggaaggtactatttgaccatcgtttatcaccaagtagcctgtgatgattggggaccaaaccaaacaggccccaaaggtaatgaatggtgctcaatagaccctggggtgagaacaatgttgactatttatagcaatacaaacggccttgcttttaaagtaggagtaaatgacttgtcaaggatatttcggctctgcaaatttttagacaaacttatttttacagctaatggtaaaaaaactaaatttagtaggaaaaagtataacaagaaaatacttagattaagagaaagaatcaaaaacctagcaaggcaattcatttattggttactaactttaacaacatcatcattcctccatttaacgttagccaaatgacaaagcgtttgaatagaaaaataaatgccaagtcagtgagaggaatgatatgttggagacattacggctttagacaacgtttgctacagacagcccaaagatatgacgtcaacgtctttgtaagaggcgaagaatacactagtaagacatgtacgggctttgccctaggccgcctgttggcggcgtacaaattgtagaacagtcaaagaaaatctaagaggggccaaagattatagatgttctcactgcaggctattgggtgaccgtgacgtttgcgcagcaaggaacgcgaagcttccttcgggaacatccttaggtctaactttcaactgttcctttccctaaccaggcgatgctaccagctttcagctggctagcaggccctgtgctcggcctttggctctctattaagtcgatgactctttggattgccttagcatgtttgtttgtgttgttggggcaatgacgtataacagcacggcagattgtgcaaggtgaagagaagaagagttgttaaagtttaaaagagcggtttaaaacaactatcaaattttcataaaagtccctttttcgataagaagacgcgcaagacatttccaacagtggagcataaattccaagcttataaatacgagaaccggaagaattttaatgatatattgaagacatttcttgaaaaagaagatcctttagacgcaaagagacttggaaggaagggaaaattgcctgatgaatataatgagtgggttggtggaaagaggattagggtaatgagagatgctttgagagagaaattttcgcaaaatccaatattaaaggaaacgttattaagaacaggcaacgtagttttgatcgaaagcgttcctagaggagataagttctggggtgtcaagggaaatgttggagcaaacgtgttagggcaattgttgatggaattgagagaggacgcaaaaaagcatgtgtaatcttcagtgaaatttgaataactcaaagtccgctacatcaatctttagtcttgaagactcttgcttttgcttcgctatacacatggtccagccttgcaagtcctaacgaacgaccacagcacacattcttcacagtgattaacattcattaacatttcaaacattcattaacatttcaaatgttttatattttttctttggttgtttttgcaatgcaaaaatgattttgttatattaaacgacaaccaaagaaaaagtataatgttaatgactgtttaaaagttgccatctttggtggtgacgcgcagaaaatctccctctgggtttgtaaatccggatttgtgagtctgatccacgcatacgttcttgtgcaaattgatgaagaagatttttttgattaaaatattacaaatattatagatgagtgaaccatcaaaaaaagtttct

SEQ ID NO: 262 - DNA, 21965 bp, unidentified
  misc_feature 1..21965: note = Fanzor polypeptide
  source 1..21965: mol_type = other DNA
aacagagaatacacatgtgacgccagtgagcgtcggtcttgagaatacatgttgttacaccctgagatcaaaccctggtattcctcatctttttaggtgtaacaaaattcacttggcagagtgtaactctctcgactcgactcgactatgacgcctcaactttgaccgcagcgcgcatggccctgatcttatcgggaacatccgccggccggcagttaaagacgcatgccgcaagcgcatagtggcgggcgaggtccgcgggcgagctgaaccagacgtccaggtcgtccagagcgttctcgacgcgctgcatgtccctcggggacagcgtccgaaagaggtccacggcgggtagctcgaccttgacgcgctcgtcgagcgcgcgcgtgtactcctcgatgcaaaaatcgctggccgtcgtgcagctgttgttgctgcaagagtagtagaagcccttgctgccacactgcaccgggcagcagagcacgcgccacacggccgaccagaggacgcacggcgcgcaaaagagcgggaaacacgtccagccgctgcagcggtggccagccgtcaacttcttgggaaggttgtcggtcgtcttgtaggtctcgatgacgcgctccagatccgcaagccacgtggtgtccatgtcgggcgctcccattgttgctctgattttgagatgttcacgatacaatgatgatgatgagacaaagttcctctatatcttcatccccacggaggccacggcttgcgcgaccatgtagtgccccaaaaggtggaagcacgcgtgcgcgaccaggctccgcggtatcagcaggccgtagaggaagaggatgatgtccagggcgcacagcgccaggatgcgcgcggagaacgcggtggcgacgacgatgtacatggccccattcaaggcgtatgcgatcgtccgggcctccgcgcgccgtaggtccgcaccacaggcttcactggcgcacgtcaggagcagcgccgccatgagtcgtgcgtcgaaatcgtattctgagttcaaagatacacctgagtgtcgactggtcatgatgaggagcatgcacacgcactgctgactggccaggtccaggcggaggaggcggagcgatagcggcgaccgggtgcttggcgtggacgcaagcacccgactagagtgatacaggaagctcgcgacagagaacagcgcgtaaacatcgggtaaaggtccggctcgatcgaatgtcaatacgggtctcatgaagacccccgggaccatagagatcgcgttcagtgcctcacgcacacggtacgtcgtcatgtcgtccgttgccatgcccgtcacttcagtcagagtatgcatggacttttactttttatcagtttcttcgtaaacaagcaccgccacgtggcgccgtgcggtggtggttgacggacgagaactcctcgtcagaatcaagcgcgacaagtatggcaacatgacggcacattttaccccggcacgtatgcatgatgaagacgatgatgagaatgatgagaatgagaatgagaatgttcgccgtagtacaactgtgcagacgcagtcgaataaagcacaagcgacgactcatcaagcaacaattcaagaagcgacgcctcatcaagcaatgactccagcgacaacgcaagaggcgacgatgctgcaagaagcgacaatgcaagaagccacgatgcaagaagcgacgactcatcaagcaacaatgcaagaagcgacaatgcaagaagcgacgatgcaagaagcgacgcctcatcaagcaacaatgcaagaagcgacaatgcaagaagcgacgatgcaagaagcaacgactcaagaagcaacgactcatcaagcaacgattcaagaagcgacgactcatcaagcaacgactcaagaagcgacgactccagcgacaatgcaagaggcgacgatacaagaagcgagtaacggattatcagccccgcagcaccctgtcgcttgatggcgaagacactgacggactgacggactctactcatccacctgtttacctatgcactggcgctgacctgtcaagtatcaagttccggcattttcggaagtcatgcttggatcaactaaaagatcaagagtacatccaagacaaagagggtaatcttctgaaaaaaccgggaggattttggctgtctgaagaagatggatggttaaaattcctaggtcaggatggtcccatccatggcctctgcgtccacgaggtcacccttaacccacatgccatatttatccgatgcgacactgaggaaagatttgactccttttgtgacgattttgtcatgaaaaggcgctcgttcccagtaatcgactggcaacgcgtggttgtctttgcgtgcgggttctacctatcagccaatatgttgcaacgtgaacgagtaaggacatttatgagtgcgtgggacgtgggatcgctggtgacatggaaaccgctcgaggcgatagcgtcgttcagtccggggaccattacataaggccaaccaatgtctgttgcaaccgccgagattgtcagccaagctgaaaaaagtgagcactggtcactggtctatattacatttgttttatactacattgttccaacgtcaatcagtcagtaagtactaaaagcgcacccacacatgtcgtcgccggccgatgcgggtgacagcggcgttgacggagacgacgtcgacaacgacgacatcgaagcacgccggcggtcatctaggtgttgtgtcccaaggatagaatccgataaccgggtgcgaagaggtgctattgagcaatttgagatccccccctgccctgctgacgtccgtgggaaacgcacatttgcagcgtacattttctggcaatccattttcctggcaagcggcaagcgcgttcaaacagtagcaattctggtaggtcctggtatctcctcgtcatgatggcgatggcagtggtgtaattcaactttttcgtcttctttgacttttgcaggcatttgtggaggttcagaggagcggggacatgcgcagactctgcccgatggccgccttcaaggcgaggagccgagacgaccaggcctccttatcgggtgctgtgatggagaggaggagtggaaggcctccgtaggggctgaagcagactacgtcaccccccgggtttgcccgggcaatccggttgaagacgacctcatggtatgctcgttcaccggagtcgtcggactcgtcggagtatccggagtcgaagggggagcaccggaggaggacgctcccatcgggttgaatgcggacgccacctggcacatccaggtacagttccgggtccaggtcgtccaagccagcgggacgctgaatgatgcagaactccagtgagatatcaagcccgtcgaaggtcgggcccaggagggttgcgagggggttgccgccctgtgcatccggggtgcgcagcatgagcaggccgctgtcggcgttggctgggggctgttcgcgccgcaccagttgcaccaagtcgatggagacgacgacccgctgcacgctcatatgggcaaacgcctcggcccgctgctctacaacgttgcgcaagtcggcctcggggatgttgacctcgcccacagacagcccggcgctgcacacgtccacgaggccgtcaagcccgtcgtccgcgtcgccttcgcaccatgtgttgagcgtgtcgatggagactgggcatgtcagccgccccccccctgcgccggcacggggcgccctggccaggtcggcgagacagaaagaagcggcgagtctctcgaagtccatgtgggtaaggtggatgctcgcaacgcgagactgcgacagagtaatgtcgccaccagcgaacaagccacaactagcgaacacgatctgctgcagtgcggtcggtagcggggcgcagaggatgtgaaacagcatgtcggtatcccagtccaccagcttgaggactcgcagccccgtgaacaccgcgagcgctggctggagagttggcggagcgcgggtagcctcttgagctgcacgagagctccgtgatgcccgctgcgagcgcatcgtgagcttgcgcgatgccgttgacgaagcgccagctgggaagcgacaaggaggtcagcccaggcagccttgccagcgcctgcgtcaggtgcttgaagtgcgccaggtgcgccaggtgcgtatgctggactcttctgcgtcgggagcgcctgggatcgtccaacccaaggtacgtgagatccaggggggcgttgatggaaggcagcaggttgggaaggagctgcaggaggttgacgtagtccggtacgggcattgatgtcaggtcctccggccagcgcacatgcagctgagtaatctgttcgaggtcttccgagtctacgaggtcctccagtgcgtcgaagaggtcggccttgttgcggaagcccgtgaagtccagcgtcagctccttgcagtgcgcccagcgccccggcggcagtcgcgccggctcctcgtccatgaccggtaccagctctggcctggctgccaagtccaacgtgcatcgagtcaggcagtcgtccacgaagctctgcagcgccttgcacgcaagccggacgttcttccgggcgtccgcatcaagcaaatcgaagatggcatagttgatgtcgttgggcaggggcggtagggagtcgacgaggagcagctcggaggccatctgcgacaaatgacgacaacgtaactcaatacactcaattcacaattcacaattatccctgatcacaatctctctctctctcgttgaacatgcacatcggaggcagaactgaagaagcagaagcgcgcacctgtgtgatggtgtatcttgtgttcacaaatttcaagactatgctgaatgatggtcggcggcgaagatgagccccatatgtgggggggcgccgaaagtacgaccgacccacgggtcacaagcgtcatcaggagtcagcaactttcatgatcgagcaaaatagggcacggcataggacagcaactgcatcatgaactgcctggtattcctggagcaggccaaggagctcgttgagcggcgctcatgagcaaggagtagcctgaagacgacgggctcgagggagctcagatcgacatgtccgacgatgtcggccaggacgttgacgagctcgacctgttcgtcatacggcgggatggctgcaccgtccaagcacgcggcagatccacggaataccttgactgcaggagcgcagcagcattcttgaggactcttgaggatttgttctacccaatgttcggggctctccttagtctaatgttttgaacgtcctattgtactgcctaataagtcctaggcaactggttgatgacgatgctggtcatacgattatcaaaccacccaaaccacaagaagtctttatcgctggcggtcgtgttgtccacctgccatgtcccgccgccgtagttgtcgtgctcacagaaccgtacagacgtatacggcccgactttcatactgcaagccctgtcattccaaaacacgccatgcgaatagccaatgttcggcgtacttgacgtcaagagaagagattgcccgtccatgttgttgtattcccagatgcgcacgaagccatactcggggttgatgttcatgtcgtacgtctctttgatcgaattgttcatgaagttgttgttgttgtaaaactctcggcgcgtcatctgtcggtctgtgtaaccaccaaacatcccctgccacacaaaaatactggccagcacgtactcttccatgtagatctcattcaggaggtagttgaccgtggcgtcctgggagggattgacgccaaagacgtagcccaagccgatgttgatgttgttcacggcattcctgggtgcaacgatgtaacgatagacctgcgtcttgggaatgtcatgactgactcggttgtagtccaggaactttgtgagttcgtcgacaacattaccggagtaagcacacgcatctttcaacgtgggttgggcgttcaagacttttccaaattcgttgatgtcggccgtcgacagaatctcactcaacttttggaagatgtccttggtggagttgattgcgtccgtgtaatccaccggcagagtggggcgcatctgaccaagcctgatgaggtaccggatgcctttgatgacctctgttgctgccttgatcgctagttcaacaactctcgccgagttgagcacgcctttgaactcccgaatggcgtcggtgaaatacaggtctttgacgttgatgccatgactttccagcagccaatccccgccactcgacagattacccgtcaggttgactgacgctgcgaggtcgatccccgtcctctcatgcagctcttcggcaaaggacttgtacgccgggttcgtcagtaagcaacaggagattaggtcaaaccggttgttcagcatgtagtgcttgatctccttgaaacacttgatgatggcattcatcgccggatggttcttgcccatagcgacacgcccagatgagccgccaaaggagaactcagaaccctgcagcccatggaacacccaagctgcactcgcaaactgttgtcgcctgaaagcggacaagtccttgaccaaggacttgaaaatgtggttagcatcttgatcgtaatcatagagtactaccgcaacatcggcctgcaccgcggacacgatcgtttcgtaatcgactatgttggtcgacacaatgaggagttttgtacatgcctctggcggcaggtgttcaacagctggtcgatttactattggcgcggggtgagcgtcgcaaatgacaaggagatcccttgacgtcattgactccaagaaggcaggtatgccactcgggcattcaactctgaaggagtcctcgtctacatcaatgagcttgccatcaagcgtcgtagcctcgtcagcaacgatgtgaatgatttgcccctgttcaagacgtaggcgcgcaaaggtgtcgccatgtgcataatgagtcgcgtcgactgtgaatattactgtctgctcgcttacatcttctatcgtcacggtcgtagacctcacgcttagcgtcgtcgtctgcattttaagagtgacgctacggatgtttcgggatgcggatttttaaatgggcttcaaagacttcatttcggcttgaaaaactcggataatgcaaaaaattgattgcaggtccattgtggttcatttggttcgtgtcatcctcagtccacagtcctcagatcaccagatctcagacctcaattgtgctcaattgtgtccagtcttccaacatgcctccccaccggaaagggaccgccaaggccagggccaacgcaagggccagcgacgatttcaagcggcgcatgctccaactgctagtccgcccggatgccacagacagcaccgtgctcgatgagctcgtcgtgttcatcatggacgccgacatcagtcacttgtccagacgggatttcctgggactcgtagaggtcgccaacgcgcgcggcttttgcaacgtagctgagcagttcgagtgcttggccgatggagcggcgcggtaagccaccctcaaaagatcaaaacctcagaacctcaaaaccccaaaagggctgcaacagttttagaaagattttaagttttttgctcgcccctgtcagcctgtcaacgtttcgtccttgtcgccgctcaaaagagtaaataaagtgtaggaagaagaagacatggccacagaggagtttgtcgacactacgatcgcggcactcaagatcatcggcatggtccccaagaatgggaagctctgcgtccgcaagggccagctctgcatcgacctggtggacacgctgcagccgtaccggcgctggttcaaaggcgactcccgcgatgtcacgctcatgcacatcaggggcacgctgactagcgcgatgaagattagcaacatcctcatgtcaacttcacatccaagaagtgcagcagcacacgcgaccatctggacgctcgagcgcctgtacaatgagttgaacaattgtgaagctggcatgcacaacctcgtctcgacgtacactggcgactccatgatggtcgccaatttgaacgcgctcctcgatcgcgttgacgagcataaaaatgaaatggcgcgcgcgctggcgtccatgggctcgctcgtggtcaagcgtggtttaaaccaactgccagatgagctcccgcagttcgcgggggatgccgtgcctgaggaggctggcgtggaagacgccccgccgcctgaactccaacctcaaagcctgctcgtgactgcgcacacgcgcagcgatgtccaagggctcgctgggaacccccaagcgtggtcgcgtaaggcgctccagcacggcgctaatgcggtgcgccacgaccgctagggtagccccaggctgctgcagcgcgtcggacttggtcagcacgcggatgacttcctcgtcaacaaagcggtccacgaccgacaccgtccagctatcgacttcataccggatgcaggccctgaagacgctcccatgcgcaagacccctgtggagtcgacccgcgagcatgttgtggagatcatcgcatattacagccgccagctccacggggacctgctcagtcggtgccttgttccacagcatgtcttctttctttttccttcgttgtgtttgtgcttgatccgacacagccgacagtgaacagcgaaccgaatcaaagactaatcaatattttacttagtcaagtcaagtcaagtcttgttcttttcgtagactttcctctctcgagaccgctgactcgttgattttgtccatgacgagtgtacggagacgccgttggagcgcggcgtccgtggccattcgactgagaccttgacggaagcgcatgaagttgagcaggtcgtccttgtccttgaagcagatcccgtccgcggcgatgacttttaggccggactcgtgcaactccccgacgtgcaccgctatcttgcgcccgcagacgtaccttgccatgcgcgttacactctgtcaagtgaattttgttacacctaaaaagatgaggaatacaggaagcgtcttttggtgttgcaacatgcactctcaagatagacgctctctggcgccccatgtttattctcttttgggaagcttgcggaaaactgcagccatccttcaggtgtcacactcctccattcatcgttggctccgggaccccagccgtaaagcctacaatacttcgcgacggttgcaactgggcagagctgctgccatcactgcagctctccgggctgcaatagcaagcaatccactgttgtcttgtcgcaagcttgtcaaacttatccttgataccctgaacatcaagatctctgctgaacttgctcgcagtgtcatcaagtcgtctgggctaactagaaagaaatcccgattctttggctctcctcccgacctggccgagaaaaccatgcagttcctagctgcccgtcaagatttcattcagcgggggttcaagttctggtctcttgatgaaacagggtttggtcggcatggcgctgcaacatatgggtatgccccaaaaggccaaccgctgagagttcaacgtcgcactgttcgatgcaccacacagtctgctgtggtcattgctgatgaccaagggacgctctttcgagaacaacgagtcggttctgtgacctcagaaacgtttgtcaaatttctcgagcgcctcacactacctgtcaactctgtcattcttcttgacaacgtcgcatttcacaaaacaaggggcgtcgctcaagtagcttctcagcgaggatggcacctgctctttgtccctccatactccccatggttcaaccccattgagggtattttttcgatcgtcaagcgagcctggtattcagggtgttcaattgacgaagcctttgacaaggtcacacacacacaccaacacactgcagcatttttccagcatgccatgtcactggaaggtgctggataatgtggggtatgtcatataaagaccgcgggagttacacctaaagaactacggcggaagccccgactatggagccaggctcctctacagacttagcagcactaaagaaacgaaagcgtcccgacgttggccagaagttcaaacagcgcaaggagttcaaggagacagtggtcaagtgctccctccggagtggtctgatcggctctggggaacagaaggacaagttcgtaaaagctattgaggcacgggtcgtcgcattgtctcatcgtgtcgtccttgggacccgagctctcggtctcttggttcgtcgcatcttcgacggtgtccaggatcttcaaaggttcgagctcgacatcgacatcaccgatcagaccttcctgcgtcaattgctcctagggacgagcggatgtcataaggctaaccctcgaatcactaatctcttccaagcacacccggagctcctgtacgacgtccagaaccgccatgcctccgatcggaacgtctattcagacgctgcgagagcgctgagcgtcaacatcagcaaccacttcaaggtcaacctggttaaggttgtcaagaaggcagtctaccagtgtgctccaggcactcgagatgaacacgtcgagatcctcttccgcatctgtggatggaaccggaagccgtcggagccgtccaagcagccgtcgaagaagcccaagatgacaccacaagcggtgtcgctgaccgtggaacaactggccttcgtggagacctgtcgtggcgtcctgggattggcagatggaaagcagatcgacggccggtggctgaagctcaagacaaatctccccaacatgctgaagttcttcatgcacaccctgcggctattggaggcgctgccgaacgctaaactcatcaacattcttccattgtgctgtcggaaatgtcacttcatcaccattgacacaagcagcctccacggtatcgcacgtgacgcagacctcatctctcagggctgcaccatggatgcgttctgcgaattcgggacatcccagtgggacagcatgctgatgactgacaaattccaaccgcacgggggttacttcaccggtaccgtggacactgacggcgtctccatctgcatccactacaagcgaccgtgcaaggagtcctcaacatcgccatcagataaacggagtgtccagcggccgacccaggaggagctacaggcacaccgtgtcatcgggatcgatccaggtcgcaccaacattctctttgcggccgaagtctccccgagtggctccgtgaagacgtggcgtctgacgcgatcacaatactaccgggaggcagggatcgtggctgccaaactccagacagaacgctggcacgcacagagcatccgaaaggagctgcaggtgatgtcaacagtgacgtccaaggggagcaccgtcgaacacttcctggcattcttgacggtcgacctcgcaatgggtgtggcaatctggaccgagcatctgaagcgacgatgggcgcagcagcggttccgtctccatggcggcaagaagcgggttgttgacagattcttcaatcaaatcgagaaggccggagcgagcgttggcgacgaccgcccgatcatgatggcgtatggagcaagcaaggtggcaccagggggtaagggcgaggtctctgtaccgacgagtcgcgtcttccgagagtgttctcggcgatatccaacgcacctcgtggatgagttccggacgactcgggtctatcacgcggacgacagcgtcattctggagaaggttgcggtcaagaaagtgatggggagtggagcattggagacagtcgcggttcgaggcttgctatggtgttgttccaccaagcagtcgggaggcaagttcatcaaccgcgacttgaacggagccctcaacatcctgcgctgcctgatgctacctcagcgccctgtgataatggatcgcgggaagtgccggggagagaggttgaacgatcgcattggcaagttcctcacgaagtaaacgaacatgaatgctagggggtagaggcgtcttggtggagagctctactgcggaggcaatggctcgtgtcttttaggatgtaggctgttgctgaggaagcaagaaccaggctctagcgttggagtcgggtctcgcgtctgctagggtgcaaagagacgcgagggagacccgatctatacacacagaagttggaagcaatgggttctgaggtgtctcagaattcactttgccgagtgtagcagtttttcccacttttcggcctctttggcggccgcatctgcgatggcctcctccacccgctgcttctctagcttgagacgccgttccaggtccctctggttcgcgagaagctgcttctcgacctcctgtgcccgctgcctttcctccgcgatgacctcctctgcccgctgcgtttccaatgcgaggaggcgctccaggcgctccttctccgcaacgagctcttcctgaacatcgtgaagtttgagacagtcgaggcagtctgcactcaagtcgaggacctcgatgagccgtccgggcttacgcttcggcgccataacgggcttgaacagacagcacgtcgactgcactcgggggacccggtctggattcaatttttgaagccaggaccaaggaccttagactggactagactagttcagtcaggggtcactcatgggatccgaagccaacctctcactgtactcttgagcctgcaaaactcgttgcagtacgcgcgtgtccggagagtccgccccgtatcgacgtcaaacggaaaaggccgaccgcacgtggccgacgcgcagcagcccatgaatccagagagggccgacttgcaagcgtataccctatttaagctcgtcaagtccttgaggagcatcaggtaaagatcaccgggcgtcagaagcacttgtcgaccaaagcggtcttcaccaacgcacagcgccccgcccacctcaaagccgacggtcttctcgcaccctccttgacccttgattagagcaaacccgatcgtcccccggaatgggataggaatgttcctactatggtcggaggaacacctcaacgcaaagagcgctgcaaactggtggaacagcgactcggcgtgcatattgatcacctcggtacctcggacaatgagcataatgaggctacgcctacgcgagtctgatacgtcgccttggtaccaggcggagttccccgagacgcagagctttcgagttgagtttgtcgatgatcgatgattatacggaacaatgggtttgtgaccactgggctcgaccgtgagcattcccgggagcgtgaaccacttgcagcaaaagttgattggtagtgctgatggtcgcccgttcgccgtgcaaaaagccaaacagattaggttcctagcaacgtagacttctagactccagaaaaggctccagaaaggacttcagacaggtctgccgtcagcgatggcctcgacaagtgagaatgacatcgtccccgttactgattggacccccttctacccgtctaccatgtcaggccggccagagtcgcccaactcgctcgcagacaagtactgggccgagaccaaccgcttggtgaaggaacgcctggacgaggaatcgctctgttacagcgatcgggtgatcaggcgatgggggcggaagctgccggaggagcgggagtatcaagcggaactcaacaagtccgtcagtaggtcctcgaccgtctcgaccgtctcgaccgagtcgtccgcaccgaaaatgcggctgacacgcctgcagcgcgcactgcttcgattcccggcaacggcaagtccagtagcaatgtgaggaaacgtgccgtacgccgattttttgccgtactcgctgcgatgagacttgcgattagagctctgaaactcctgaaccgcattgacactgtgtcaagttaattgacagacgacaggagagacgacgcgacagcctgcttcatggcgaaagcctgcttcaaatgcgggactaaagtaagtcacgttcattcagtctgatatcatgcgcgtgtgccgagaatcaaaagtcgacgcgcctttttttgcagaccacgtcggcctggcgcacggtagagatcgacggcgccctgtttaacgcatgcaatgcgtgtggcgtcaaagtgatgcgacgtgaacgccgatggaaaggaaatcctcccagcaagaagcaaactcaagacaacgatattggaggatcgcagatgcagacgcggcgatcgacgcggtcggggagcaagatggcaccctccggtccggcgcctcccgccacacccgccagcgcgccgccggcggagaagagcaagggcaatggcagggcacgcgcaaggaagcgcaaggccgagtgcgacacggactcctcccaggagtcgcaggatgaggcgtcggccagagcggcactgcgaaagcggcgtctggataaagtgcgggcgggcctggtggccctgaacgccgagatcaactccatcatcgcggacctggacaaggtccggtcctgatccgatgctgacccgaacctgaagaattgttcaaggcgtcatgtcgagaagagacttttcgagttccttttccgcctccttgattgcgacctgctgcgcgtgcatgtacacagacgccaaccagatcgacgtgccgatgttggccacggcgacgaggcagaccagcagggtccggatggtgctccatgcgccgcagccgccggtcgtcaaacagtttgtgtcgtagatgaccatggcggtcagcagacccacgatgagcgatgctagaagcatgaaaccgatgacttggaactgggtcacgtataacgtaatgacaaatgagaagaggtgggagatgacaaggatgacggcgaggaaccgcgcctggggtgagaggtgcttcatgaggtggctgggtgtcattggtttggtttttgtactggtgcacaacaactgaactgcttgctgtatgagcacgagaatatattggcggtcgaggtcatcagagtcattatcatcagaagagtcaaaacatgtgctctgagacgtaaatctaaatttaagtctctctcttcaggaaaacaagagcaacatggcggggatctcgttgtgtaacatagcacaggttgtctacggcccgccgctatggaagaatctgatcatcaatggcgatatggcgatcgaccagcgtaacaccggccagccgatcaatattacggcagacgacgtctactacggcccggataggctcatctgttcggtgaacactgggacgttcctgccgtcctatgagatgcagcagacccttgtgaccgaccttcagaacattgccacggccgcacgggtgacatcaactggacagaatacgttcaaggacatctaccgaggcgtcggcctgcagtacttcatcgaaggctacgccatgcgccacctcttctgggggcaacagaacggttccccggcgaccttctcgatgtacttcaagactaatgtccccggaactcactcaatctccttcaccaatgaagcgcagaaccggtcctacgtagctcctttcacagtgacgacgccggacgcctggtccaacgttcagctcgttgtaccaccgccaccggtcgggagcggcttctcaagttccaatagcgtcggcctccgcattgacattgattacacctgctcacacttgacgacgagccagagcaaccagtggctgccctacatggccactgtcccgacaggatacgcctcgaacatttttctggcgtcgaacaactacgttgagctcacgggcctccagtttgagcagggttccgcggcgacgccgtttgacaagcgctgcctcccgatcgaggtcccccttgcgcagcgctactacgagaagagcacgccgatcgatgtctcggtctcgtctgcgtccacggatgccatgtccaccgccgaatccgtgctcctgaactcgacgaagatgggtcaagtcgcctttcagaccgagaaattcagagcccccaccgtcgatctgttcaactcggccatgagcaacccgggcagcaacttattcaacgctcgactcgccacgggtgctaatacgactgtgtacccatgggcagacaagaagtccctgatcctcacggcgggtccctcaaacaccgcgaaccaacccatctccacacagtgggctgccgatgctgaggtgcgaccggcgcgaaccatggcaacgcgcggggccgttgattgggtcacgacgtttcgcggcacgctcaccacaggtagcaatgcagttatagccgacgttgtgcaactgtctgacgaaactgtcgtcatcttaggatcgtttacacatccggtccttgcagcgtacagcgcatccgacccaaactcaaacgcgtattccgcgacgccaacactgacaaagatagggaccagcaacaacggatttctctgtaagtatgatgcgcgtggcaccgtccaatggcttgctagcctgcgaggctccaacaacagtatgaatccgaaggcggtcgtggctactgcggacggcggtatagctacatcaggctactttggatctaacttcacagcgttcaatgctgacggtactggtgttggacgacaggttacaagtttggggggggacgacgtgtaccttggaaagtactctagttcagggaatgtgcaatggctggcgagcatggggacccgccaaaccgaaggagttccatacatcacggctatgcgcgatggaggagtcgtagtcacgtttttaactgccttctgcaacttctcggtgctcaacggcgatggttcatcatatagcaacccaatgcagtacaatggaatagcatacggtgcagtcattagctacaacgctgcgggtaatgtccgatggctcaccaaaattgggaataatccaggttcctgcaccccatcaggtatctgcacgaccgcagatggtgggtttgcggtaacgggcagctatagcaatgcgctggttgcttacagtgcgtcgagccccaactcaagcgcatttctcacacagattaccaactgtgttggtgcaaccgattccttcatcgcaaaatacgatgcctctgggtcggtccaatggctggctcgtctgtccagtgcaggcgaccctcctccatcagctatatcagccacgaatgatggcggtatcgttgtttgcggcttcatcaatgcactcggtggcttgactgcatatcacgcgtctcagccgaatggtccggggtttggcacggtgttatacaatactgctcagttcgaagggtatattgtcaaatactcgagcaatggaaacgtgctgtggctcaccaagatcgcaaatgcatctgtcaccaacgttcaactccagaagatagcatgcctgagcgacaatagcgtcgttgttgcaggatactctgctgcggcgggcgcattgctagtatacagctcggacaacccaaactccaacgccgcaatcctcggtagcactatgagccaggattgcttcgcagtcaagttgagtgctgacggtattttcgaccgagaggtcagtctgctagctggcagtggtaacagaaacattactcaactcgtaccaacatcagataatggactcttaacgaccggttttgcgagctccgtattctcgcacatcacggacgcatcgagaaacccgacgacgctgcagctcggaatacctcttccacttgtcatcaagcacaccaacatcttggtcccacccccatccgacctcatcatatctaaatgggcgagacgctgctcatccgctgatggagggtacaacctcatagtcgccagtgtcagcgattcgcaaggcaacatttacgctgctggtccattcaccgccacgagcttgactctttacaatgaggatacaacgggtgcaacgctgacaaataccggattgacctatacgtttgtggtcaagtataccccgctggggcggatcttgtggacgaccaggatcgtgcaatcgtgggtgagtacgactggcaattgtattagtacaaccatcgatgatgggctcatcctggcaggtacctatgccgggtccaactccattatctatgactcgacgggcgctacggcaggaactcttgcagatagcaccttgaatacggatggctatgtcgcgcggtttacaagcgacggatcacttgcatggtcccttcggttgacgtgcggtggtgcgatcgctctaaatggggtcgcacagctccagagggtgtccatgctgaatcctttgtcaaatgactatggctacgtagcggttgggtcctactacgggacgtccaacttgacagcttatgacaagaacggcctggcctacggggtgacgctgcctgcgtcagcgacgcccagcagctttgcgcttcgcgcgggctcagatggatctatcgcgtgggtcctgggcatgggctcaggttcaggttccgagtccaacgcagccatcggcgtggctgccgacagcgtcaacgcgagcttcacgatcggcggcacgttctcatcgggcacctttgccgcgtccaactatgataactcgggcctcgggggaagcctgtccaactacgccgccggctcgtccgagtcattccttgcgagctacacggctgggggtcagttaagatggctcggcaaggtctcgtcacaagggagcaacaacgcgctctgctcgatcaaggtctctgccaatagcgatgtctacgtcgcgggaacgttctcaggttcaagttcgacacagttctactcctccaacggtcttgcatcctcaaattcggtggcggcaaccggaacatccaacatcttcctcgcaaagtacagcggcagcggcgagtgtctctgggctaccaagatcggcggcgcctgcaacgagtcgaggcccgtcctgacgacggttccgaacttcccgagcggcatcctcaacaacaatggactcgtcatcacgggcctctcggacagtccttctctcattgcgtaccatgccagcaacctgtacaatacaaatgtccgtgggttcacgcagggtctcctctcaaatgcgagtcctgggacaagcatgactttcatggccaagtactcggtcgatggcgtcgtccaggcgacctgcaagcatggcgacaacaacgtcatcgtctccatggcgccctgccccgacggcgacgtcgtcttcggaggctacgccctctcgaatctaagcttgttcaattcgctatcgaacgtctcagtcacttcgcagagcggctttgtcgccaagtacagctgcagggatgttccgtatcctttgaaactgggccagactcagtgggtttctcgtatcgcaactaccggcgccacgagcgttcaagatactgacctccacgcacacacggacggcgtcgtcctcgtcgggaacaacacggtcacagggacgaccatgacggcctactatgcgaacggcgagcagtggccaacatcggcacacgcgccaaacggaaaccagagctgcgttgtcagttacaagcaagatggtgcgatcaattggatggtgcggctcttgaagtcaagcggcaccggactcaccgtgccagtggtggcaaggttgtccaacggtaactacctggctgctgggtcctttgatacgagcactatcctcaacgccgacaatacaacattcgtgagttcaaccctgacaaacattggtctcgccgacgcttacatggcctgctttgacagctccgggacaggcctgtggaccgcacgcgtcgcgcagccctcgggctccgggtcggtcagcaatactcctaccgcactgataccgactcccgatggcggcttcgtcatttgcctgtcatcatacgagacgggtaacaccaacggtgccgctgcgtacagcgcatcgggaaccatgttcgggactaccctgacgctccaagacagttcttcaccggatgtagtcctcgtcaagtactcggccgcggggcaggtgcaatggttgaccaagtgcgcgagtaccgccatggagcgcccgttgaatggcgtctcacttgctgatggctccatcgtcattggaggctattacaccggcgccgacctgtccgcctacaacgcgtcatcgccgaatagcgcacccttcgcgacaaccgccgtctttacgagtacggcgtgttacttcctcgtcaagtactcgagcggaggaagtgtcagctggctgagccggcttgtttctggcggtgcactgggggcgtactccatgaacgcaagatgcgtagcgacaactagcgacaactgcgttgtcctaaccgggacgtaccagacttctctaattgcctacaacgcaacgggtagcgcgttcggaacgagcttggcgacaagcagcggcgtcgatatcttcatagcaaagtactctgtcgtcgatggtagcgtatcctggatcgtgcgtttcagctctcccaacgccgagtcctatccgacagtgagcactctatccgacgggcgcatcgtcatcgcgttcgccacggcgaccggtacggtgacatactactcgccaaggacgtttgcttactacagcaacattggcatcagcgccacgagcgcaatcgccgttgccgttctttccagcatcggcgccatgacgcaggtcatgacggcgacgtcaaccacgggcttgacatggccacaggtgagcacctcacccgacaacgctgtctacttgacaggcggctacacgggttcgggcgcaggcacggaggtctccgtctaccacgcggataagagtaaattcaacacgatggtgccttccgctggcgacgcaacagcgcatcacatgttcctggccaagtggcagttgtgagagatgtgacaaataaaatgcgacataatgcaaacattgttgcgaaggaaaggagaatatgccgttaccgtcactgtccaacttggcgtgttacgcgtatgggccgcccctgtggcgaaacatgattgttaacggcgacatggcgatcgaccagcggaacaccggccagcccatcaatattaccgctgacgacgtctacttcggcccggataggctcgtctgttcggtaaacacgcagacgttattaccgtcttatcggctgcagcaaaccccagtgaccgatcttcagaacatttccacggccgcacggctaacatcaaccgggcaaaatacattcaaggacatctacagcggcgtcggcctgcattacttcattgaaggctacgccatgcgccacctcttctggggacagcagaacggtaccccggcgaccttctcgatgtcgttcaggaccaatgtcactggaacgcactcaatctccttcacgaatgaaccgcagaaccgttcctacgtagctcctttcacagtgacgacgccggacgcctggtccaatatccagctcgtcgtaccgccgccgccggtcgggagcggcttctcaagttcgaatagcgtcggcctccggattgacattgactacacctgctcgaacttgacgacgagccagagcaaccagtggctgccctacatggccactgtcccgacaggatacgcctcgaacaccttcctgacatcgaacaactacgtcgagctcacgggcctccagttccagcccgggtccaacggcagcgcctatgacaagcggtccctcgcgatcgagcttccgctcgcgcaacgctactacgagaagagcactccgatcgacgtctccgcctcggcgtccacgggttcgacagacgccgccgacatcctgaccatgagcgcgacgaccatggcacagacgctctacaatacagagaagttccagcagccttctgtcgatctgtacagccccgtcctgacgaacccggcaacggcccggtacaacgcgcgtctgaccacgggcgccgacatctgcctgactccatcgtcaacgaagaaatccctgatcctcgcagcgtcgacgtccaacgcctttggcaagaacttctggacgcagtgggcagccgacgcggaggtcgacc

SEQ ID NO: 263 - DNA, 21965 bp, unidentified; identical to SEQ ID NO: 262
  misc_feature 1..21965: note = Fanzor polypeptide
  source 1..21965: mol_type = other DNA

SEQ ID NO: 264 - DNA, 20891 bp, unidentified
  misc_feature 1..20891: note = Fanzor polypeptide
  source 1..20891: mol_type = other DNA
gcggttgtatgaattgttcagacacgactgtggatcgtttgcagtcttctgttgagctggaatgtcaagatccaccgcatccgctccgtgtgcaaacatcttagacaatttaacgtgtgttgatatcactgaaagccctccgccaacgtctaaattctttgtgtgatgacggctcaataaacatgtgttagctagaaatggaacagctagttttgctagtctccatgacagcacgaaatcggcgtaatttgtaaactgttttccatttttttctgggacacttataattgttctagtcaatgcacagaagtaccctccgacatgcggatacgtgtggtgttgcattattttttgagaaatgctgtacactgttttccgtttttttctgggacacttatatctacaggtaggtgtagatcgattcaaaatttgttacactctattttttcaggtatcaacaaacgagtcctcgacatcctggcaccaccgcttgcatttgtcgcacacgtcccagcgcccccccgtctccaagagatcctgtgggatatgcacatgttcccgacggatgaggtccccctggtacgccaagcagcaaacatgtctccgatagctcctcctgtgcacgcgggtcccacactccttgcgcgtccaccgcaccatggccaggtccccgatctcggccgcaaagtacggacaacgatcgcgtatgtaccgccgcacttcgtcgttccccgcctcttgggagcgcgcgcacacccaccggagaacctcaaagttgcaggaagccgccgccgccgttgccgccgacgaagagatcgagtcggcccccacgtggcggaggaggcacagggcgccttcgatctcgcggtggaatatgcagttgctgatcgcaatggaccactccgggtcagtaaccggcaggttcgccgtcgacgcgatcatctccagtatctccacgcacacgcgggaccccgaatacacgcgtagcgcgcgccgggggttgatgacagccgccggaagaaccatcggtaacaaggcgcggagctccttgtacgcggcaaagccctcgtccgaccgtaacgacatgatggcgacatccatggaaaacacaatctttcctcgtctgatcttgcgcacaaccgtctccacctgcccgggctgtaccacgttggcgagattggactgcacctcgggcgaggtcacaaggtccaagatccagcgcgcggtcgcgggagaaactgcgcgggtgcacacggcctccaggtcccacttcacgccccgctccccgagccaccgcatcagctccggcgagtcacgatggcgcttgaagaggacgtcctccccccagtgcatgaagtcatccgcgctccacggagcgtgcatcctgtccatccacttcagcgactcaacgtgcccctccacggcggcgtggacgtagaacactttttccatatgcagttcgggaggcgacagcgtcgccagccagtctagtacctccacgcgcccatgacgagccgccatctcgtacgcgcgcggcatgtccacctcgacgtcgcgtattgcgaaccaccgcaccgcgtccatgtgtccaccgcacaaggccatcataagcgcccaatccatcgggtacgggcacgcggagttctccgcccaccgcccgagctccctgtagtgacgcaattcccgcgcgtcgacgtggtcgaaggttgggcgccggcggtttatccagtccaggatgtgaacgtgcccgttacctgcagcttcctcgaagatcctcgcctcgacgctgcaccaggaccacttcaggaccgcccttgcgcgcgccgacatgcgctcctgcaacggcggatcccgaagccactgcagaacgacaagattgccgctggctgcggcggcctgcgcggccatgaagccgcgaggcgaggcggggttcaggtgttcgcgcaggatcgagggcggggacgcatcgtcgcccccgtccccaccatcggtcccggtctccgtcgcaccaaactcccgaagcgccacccaccggagcacgccagtgtagcctccgcgcgccgctccatcgcatacggcgtgcatgtccaccgggacgcgagagtcgcccaccaacatggagtccaccgcaaagctcagaaactccgggtcgccgcgcgctcccagggcgcggaagagggcgcgcaaaccgccgctcacgcgaagcgcctgtcgcaccagtgccatctcctccacgcaccacctgagacgcgcccgagaccccgaaaccgccgcggtcaccgccagggtgcgcgccggggcgggggtcggcagggaatcgagcgtgattgacagcgcatctccgtcgtcggcgccgggactttgttggggttctggtggggggtcttggcggagttcctgatggcggtcttgcgggcggtcaggatcgccgagcgccgcgcggaagagccgacacgccgccgccgccgccgcgcggtccagggcctcgggcaagaacccgaacacctccgtccacagctccacaggcaaaaccgccgggaagcctaccaccacggataccggacgctccatcgtcggagaagcgaaacgaagtgaagtgaagtgaagtgaagtgaagtgaagtgaagtgaagtgaagtgaaggtagttgcaggtggggttgggcggccacctggccgaagaagtggtcagtgtggtggatatgcaatgtgtgcccaggtttttatcggtatcggcgcccgcccgcctacccgtgccgcgcgccagcgtgtcgaaaaacattttccctcgtacgcgcgcgccagcgtgtcgaaaaacggtttccctgtacgcgggtgccagcgtggcgaaaaacggtttccctgtacgcgggtgccagcgtgtcgaaaaacgttttccctgtacgcgggtgccagcgtggccaaacattccccccacatgttttgttgatcacatggcgtatatttggttgtcatcagacgagaccaccctggaccacctcatttcattttgactcaccctccctcaacccctaaacctcccgttcgtgagcgagagaccagcgcaccacacccaagggccagcaccccgcacacacccaaatcccaaagaacatggacagccctcccccactcaaacgcgtgatcctcaaggccaacgccgcgcttctgtcgtgcaccaagatcaacaccccccactccaccaacaccaaaaaacagtactgtctgcgcacggatctggccgccagggtgacgccccacggcgaggaggcgttcctcctgatcagcgacatcgtctaccactttgcgagcgccgaccgcgcccgcgagtgctatgtacatctcatacagagcgcggctctctatgtgaccgggggcacggacaccgtgcgcgcaccgagactccctgatctcatagctaaaggcgaggccgctttgctggagaaggatcagttcgcgacgcagaacattgttgttgttacataaaacaagctttttaaaccgtgtaaggaaccgtcttgtcgccgcgatcccgtttcctcttgcgcgcgcacttggggtgcctacagtgaatgttctgccccggccccatccacccgaacctgtaccaggcgtagtttgtcaggagctcctcgccctcggctatgggagaagcacagaaaacgtacacggagatcttgccgaccgaacgtagaacctccagtctcgtagcctccggcgccgacgccagagcttcgccggtcacgctcaccctcgtgtgaagagcgtgcgtcgaggttacctccatgaagatacagttggagtgttcacaacacgcgtggttcacgtagtggaacggctggagcagcgcgggggggttatccgcgggcgggaccatcacgcgccacaccttctcgccaccgacgtcgatctggcccttcaactgaaacgtcagaggcttcgtgaccagctcggacgggaagctttgccccacgagagcagtccctctgtggcggcctataacgtcgttgatgccgaacgcgcgcgtggaaaacacgccaagaccgtggacggcgctcggtcgaaccaggacccgcggctggacgggccagcgcggggaaaggcgggtcaccgcctcggccatgtgcttgttcaccaggcggacattcgggatctcctgtcgggtcgctgttagggctaccaactccaatatcgacccaagcacgtcgtcggggagcgtcggagtcggcgtttgggcttgggtttgggactgggttcattttggcgtcgggttttgttgtacccgttctggcgttattggcgcttctggagttgtttgggtttgggtttgggtttggacaggcgtcaacccccccgcgtcgtctacgttgagttccgcaccgagaatgttagcccggagactccccttcgctttctcggccgcggccaggtcgtccgtcaccaagcggagagcctccacctccctggcgtgcacgtcccgcacggaaacgcgacacgctagggtccttacctctcgggaaacagcctccttctgcgagataaccattgtgtgtctccgacggcgggaaaggtcgggcgcggggggcgggggagcgggcgggggagcggggcgcagtgcaggtgggcaggagggcaggtagcaggaaggatcctatggaaggaaaaagacaactgtcctgtccgggtccggaggcgcggcgtatttatattcagttatctggttttgttcagcttcttcgccacttcgattaactcatcgacgttgttggaacacttaagcagatgagcttcggttatcttatgctcctgacctatcgtggtggccaattcaacaagatgtcggggacttgggcggtattttcgagtccacaagaaatggtcgacgcttaacggtaacccgatgagctttgctaactcaaccaaagtttgtaggtcgtctgaactgggatccccccacgaaaatctctcaagcaaaccgatcaaagcctcattgagatcctggttattctcccacacatcggcgggaatggtcacgttgtcgctgcggctgtcggttgccatgatgactgtccggatacggtctaggactttaaatgctaaaacgcataagaaattcagtttttcgatatgcgacccgtcgccacggacggaccgtggtaaaaacaagttaccgttgagaaatgtcaggtatcgaaaccgggtgtccttacactaggcgcagagctcaatcgctgccatcgaggaatctagccatgagaaccatggcgccaaaaatacgcatggccttctccttgcatttcagcacatactgcttgaaatgcccgtcatacttgtccgcatactcgacaataatcccgaacaggtgccaggtggcgcttcgaacttcgtcgaagtcgagttcatctttcctgcgaatagactgaacggcggtgtggataccatactgcagagcaaacatgcaatctctgaactcttgaagagacgaaatgccattgttgttgttctggggatccatggtgcgtgtgcgtggtaagagcggttggtgttggtgctgttggcattggtaataggagcgctggttgtcttgagcaggggacagttttacactcttcactttttcgcgggcccgaaaaaacaccccgatccgagatcgcttgcgtacgcttcacacgaaaaataccgttccccccaaacgcgtcggtatggcccacaaggacaacgttcgcacgagaggtcaaacacgtttgttgacccctacagaagaaaacacggctaacctataacttaagcagagcgagacagtctgcacaggaaacggatgcccggcgacgtcgccatgatccccgatcccgccgccaccgagagcgacagagactggaacaacgtgcccgacgacttggcgggcatgttcgcagacaacctccggcccgcggacctctgggcggcggccttcgtgtccgcgcagtggcgcaaggcctgcgacgccgccagctggaagccccgattccgtcacttcctattcgggtcctgcgtgatcatgaacaccgccgcgcgcgaggggcgcctcgagtacgcccggtgggcgcgcgcgaaaggatgcccctggaacgagtggacgtgctgggtcgccgcccagggcggccatctcaaactcctgcggtggcttcgcgaaaacggctgcccctgggacgaatggacgtgctaccacgcagcgctcggcgcccacctggatgttctcaaatgggcgcgcgataacgggtgcgactggcacgtcaacacttgctttgccgcggcgctcggcgggcacctggacgtcctcatatgggcacgcgagaacggttccccctgggacgagcacacgtgcgaggccgctgcacgcggcggccacctggacgtcctccgctggctacacgaacacgactgtccctggaacagctcgacgtgcgcgtctgccgcgcacggaggccatctcgacgtcctccggtgggcgcacgagcacggctgtccctgggacagatggacgttcgcgtccgccgccaagggcgggcattaggaagtcctccggtggatgcaagaggagaactgcccctgggacgaagaaacgtgcgaggcggccgcacgaggcggccacctggagattctcatatgggcacgcgagaacggctgtccctggaacagatcgacgcgcgaggccgccgacgaggaaggccacctggacgtcctggcgtgggcgcgcgatcacgggtgcccctgagacgagttcccacagacccgcagccccgagtatgtctctgtaaatttaacggatcatgagatcgtggagactgtggaaaggggttgcgttgaatacaggatggaccatgaatagacgcggttcaactgtgtcatttttttctgggaaatagtttacaacatgaatactactgctgttgtcggttttggagttggagcaaaagtagatattgatgagattgacccatccaaaattccgcgaaacacaaaggtggtattcaatgcaaaatctataaacaaaatggagcgggcagtactacacaacacccgctttttgaacactactgtcacacttattgttgatgaccccaagcaagacatgaatccggagttatgggcattggttgataatgtagtctgtacacgggagtgtgtgaagcttgtgaacgagaggggtctgcatgcaacaacgatggagtcgatgactgaagtgttacaatttatggggtcgttaggtcaaaacgattctctacagtttttcccaaaaattcaaatcatggggtctggaaactggggggagatggcagaaacggagaccgaactttgtcaccgtgtgggcacctttggtcttgtgaagaatcacacccccggcacccatgtgatcgtccccttcaggggcggcaacggggaggaatgcttctggcaccacggcatatatcttggcgaaataaacggcgaggagaaggtcatccacatggttccgggggagaacaccgttgaggtcgacctctaccaatttgccgcggcaaacccgagggccctccgtgtggtgaaatacccgggcgatgaaacagactgcatagagcgcgcccgtgcgaaacagagtgaggggatccagtacaacgaggagaccttcaactgcgagcactttgccacatactgcaagacgggaagggcggacacttgtcgagattttttgttacccccacccacctgggtcaataagacactgtcgcacaaacctcagcccgcaaggattgtgcctatagtatgaaccgtcccgtgaggtatgaaggtgtttcactggacaccgccgcggacccgcatacgggaagtcgtctgtagcgcgctccgcgcgtgacaaagcgccgtggcgagactaagaccgaaaatagcggagcatcagcaacagaatcctttcctcatagtaggggctcttctcaagaaggtccgcgaacagggtgagaaggtcgggatgaccacggttaatcgagctatccgtgccgccgggactccgcgtgtcgccgcgtatcggtacgagtacggcacataccctttggtgctttttttctgggaacgacttcaatgagaaaaatatatattcccatcggtgtcacgtgcgacgtgacatcttttctgcggagtatcgggctccgcaaggaagcgttaccttttgattgggttgtatgcaacgtagacagaatcacccaagcaattgagacatacttcgagtttttcttaaccgacaatctgtttttcgatccaaagcaacagagttacatggacgttcctataaagaaacggatgtggaaagtgtggtgccgacggagtggtattctgttcagacacgactttgactcggaacagaccgagtattcggaagtgtacgagaaataccgaagacggattcggagatttgtcgacatatgttccggtggcgacaaagttatatttttgacggattgggacgcatcctcgtacaccataaacactgggtttctggagtctcagaacatactcgaaaatgtgacaccaaaccatgaagagttggttcggcaagtcgaaaggtttgtgcagagtatatcgaaaagtacccgaatctaaacttcgacgtgaaaatgttgcgagacaagacgattgtgccttacgcagtttgatgcgtatgtcaaacgcttaaacgattatatacaaacaaataatacatatgtggcagctcgtctacgttgatccatatgaacccatcgttgtttttgcgccgttcccacaacacatcgactggaaaaaaatcggatcggggtcagatctggaatgttatgagcccgggccatcgcctttcgtcgtgtggacagaccacgtgggtgttcgagaagccgaactccatttcgagagctttgtcgggcggagaactgacgagtctgtcacgcggagtgacgaactccacctgttactggcgccgctacccatgttgaaaccaacgacattgcgtataaacatcatcggtatcgctcagacgcgtcaagagaaggaaatggtggtagacaacaccccgtctcacatcgagagtgtggtgttcatgtcgtcctggttagcgagagacatggagcgatggaaatgaattttgctttgtaaactgttttccatttttttctgggacacttataattgttctagtcaatgcacagaagtaccctccgacatcgtgcagctattcactacctccattttgacaggtcactcaggagggtggcaaagatttatggggtcgggaagtcgtctgtagcgcgctgggcgcgtgctctgaaggttccacacacgaatggtaggaagcaaaggcaaagcgccgtcgcgagactaagaccgaaaatagcggagcatctgcaacagaatcctttcctcacagtaggggcgcttctcaagaaggtccgcgaacagggtgagaaggtggggatgaccacggttcatcgagctatccgtgccgctaacttcagtagaaaaaggacacgacctcggttcgccccaaaggtcgccaccgcggaagaagggcgtactttcttgaacaatgcgtcggaaatcatcgccgtggacgagacgagcatctacgtggacgactcacccaggaacggatacacgctgaaggggacacgttgcgtgcaccgccggaagtctcccgtccgtacagggcgcgtgactctgcttttggctgtctcaccaacgcgcggcgtcgtgcatcacgaagtggtaaagggctcaatcacatcggaacgttttgcaggattcgtacggaacatctccgcgcaaggcagcacagcgatcctcgacaatgccagattccacaaaacggctgctgtgcgacaggccgctgaaggcgccggcatctcacttttgttcacacctccatatagcccagagttcaaccccatagaggggtgtttcagtgtcatgaaacaggcgctccgcactcccggtgggtgcttagacggagcgttagaaacgctcacgccgtaaaaaatctccgccttcttccgacattctcaagcgcacgttgaaggagttgccggtaactagcaaaacgcttaacgagagcacacaacagcagcaaatcaactccgcctccggatcccgcaacaagagcttaagactacgaaacacaataaacggcgtcatcagcccgatggaaggggacggaaggagccctgatgacgaggaggacgaagatgctggggccgagctacgggtagtcaagcgatgtttaaggagagcgcttctcatgtccacggacgagaaggatctgtttgtcgcaagggtagaggagctcgtcgttgcggtttcgaggttgatgcaccacgggtctcttctggcgacgaactacgtcctccaccggatgaacgatgggaaccttccttccgacgaccttctgacagaccagacgttctacaggcagtgtatgatgtactcttcttcttcagtacgtgctggcgcgtaccctgaagtgaagtcgttcgctgacacgaagaggttcctcatcccccacacagagcaggtcccgtactcaggaaactgtgtcaacgcggccgcgaggaagctgaagtcttccgttctcacgatcctgtcgcaccgtttccaccagcgcgtcacctccgcggttcgcgcaatgtttcctgatataccggaccgtgccaggctcgccataaaacagagatgcctcggtagacccggaggccctcctatcgcactgactcgagaggcatgggccttcgttgacgcggttagaggagacatcttccacggagccgacgtttattcgaccgcggtagaggaggccgtttggaattgtcgagggatcaagaagcggacagagaggccgtgtgcaccgaacttctagcggggcgcatgcccgagatggacagcctgaagggatcgggacgtgaggtggctacccatgttcaggagttcctccccgcttgcagagcacacagaggagcggtccctgacgaagaagttaggcgcctcgtgactgcggcagcgggacgcgttttccggagggcgaccgatgagcagaagcaacaggtagtggaggatgtcctccacacgacctcgtcagcagacaggcgtttcgggaggcttataagcgcggcgcgcagtatgctacgcttcgctggagtcatcaccatcggatggttgaagacacacccatcacgggcgttaatcgccgtgtgtcggatgatgttggaggtggaggagggtatccgtctcgccgagaagctcggaaagaaacgccgacccaagcgcttccctctcctgccgatcttcgggcagaggaggcagatggtgacgttggacgcggacaccctggtgggcctgtgcaaggcggtgggtttactgtcacgtggagctgggcgggaagccctgactgaagacttcaagcgatccctgattagcgttccagccggtttcgttttcagcgacaacatgtccctggagagcgacggcgtttccgtcgtgctgaggacctcgaagaccaatcctctagcttccgcgggaatggcgaccaaggatgacctagaagatgtcgtctttgacagagtgttggcgaacgatccggggagggcagacatcgccaccgtcgtcgagtggacggaggaggaagggctgaagaagggatcgacacgtctgacgcgcaaggagtactaccagcaggcaggcataaaccgtcgtgcaagaaagcgccgcatgagggacagagcaatatccgaacacctgaagaaatggaaggaagccagcatcaagacagccgacccagaagcttttgaggaggctctgaggctcagaatgagtccgcttcctcgctccgatggtgacccctcaatcgaggttgtgtgggcccaccaattgggtcggtggacgtccatgatggacctgaccgccttcgcagcgaagcgcagaacactggaccgtttttggaggcataaagtgggtcttgatgcgcgacatgatctgagccgcactgtcgtggtgtttggagacgggaagttttctgcgtcgggaagaggagaacgagccgtgcctcggaaggcaatggaagcgtctgcggcacgttttgcggcgaaggtcgtgaaggtcggcgaagcgtacacgacgaaagtgtgttcgcgttgccatatgcccacatttcctatcagaatgctgaggtggaagaagactaccgaagggggccgaatccagcggatggtcgatgtccgggagctgtggtgttgttcatccaacgcatgtcgcgcatctccttacaagtcgagggacaaagacgccgccatcagcatccttgagattttcctcgcgggaatagagtgctacaccaagcaaggatacgaagctgcgcttagagccatgcgacagggaccgcagcatcatcccttgggctgatagggaaaatctaacccccacggctgtgtcgtgcgcgtcgatggcggcacagtcgcgctgcaagggtaacccccagggtaaccttgctagcaggtccccgcgaggggaccataaactacattgcgttttgagggacgaacttagcggacctatggtgtcccacaatttctggaatgtagtttatttgaaagacaagcggcttccacctgtttctggatctgcgtagacgatttgtattgcctcgtgccaccgacacatcggctcggagccgcgtcgatagccccggggaaccgcgtcgccacgtcgtattccaccacttgatcccaggttgcacgtatgcgcttgttgtttacaaatatgtccgcagaccgatacgccgcattgaaaacggcgcatttgacctccagatcagacacgtcgtatctcttcatggcgacggacgcgttcgtaccaggggcattaggaagtccaagtagcctcatttccgcactctgtcgcggagggtaggcctgcagcattgcgcgtccgcgaaggtaaaaaattttgccgctgggagggcgcgtgccccgcgtattgacgaatgcggtccgcaaggcctcgttgtcatacggaagtcggaatttcagactgaatgcacggggcctcatgatacacgtccaacgttgttgtgccatcatgtcgcggaaaacgtcggtctcgttggccctgtcgccgcgcacgtctgacacaaaaagggtacgcgcgacacttcggtcggccttcagcgccttggacaagcgtacggctttgttgtcatcaaaccagcccgcggccccaatgagaatcacggtgcgatgctttcgccccttggaggtcttcggaggccaaaccgggacggaggctatcgagatatatgacgcgtcgagccgtctcctcctcgcaacttcctccaccttggggtccgggtcgtacgccagaaaccgcgcggccggcatggctctcatcgcacactcgagagctgggacggacgcgccgacatacaccacaactgttcccgtaccgtccggcggagcctcgacgtcgatggacaggtactctttcaagaaaagcaaaatggcgagctgaagtttgcgctgtcccatgtggcagttggcgaacgaacagtcgccatatcgcgggtcgcgttccacgtccgagaacctcgtcccgcgacggacaagcggtttgaattcgtctgcaaatagaaacattggaaccggggggccaccgcgcagtgcggcagtcgctctggcaaggtccgcgtccaataccccgcccgccgaagcggaatggttgcagattcggagagcctccctacaagcgggtgacatgacgacaagtataagggtttgttataatgcaacatgttataatgcaaccatgttagctagaaatggaacagctagttttgctagtctccatgacaacaccaaatcggcgtaatttgtaagcgtgttgagtcacatttaaaagaggataaccggtcctctcaggaacatacggttacccaaagcgcgatgctgcaggtttagcatgtcttcgcatctacacggcgctcaggaagcgcgggggaatggcgtcattgcacagcaacacgtcgttgccggtgttgcggtacacctccatgccggtctcttcgcgcaggagcgccacgtccacgacgatagtcacgtccgagttggggcggtaccccgccaccgactccggagatacggacatgtggacggcgtggcgattcatcggcttcaggccgttgctccggatgacgctccacgcctcggcgttagttccgtggtaagccttgtcgccgtcgtagcgcactagaagttcgggcggcaccggaacgtcgttggtgtgtccctggaacacgcggaccatcacgggaccgcgcccggactgcacgatgtcaaagcgacgcttcttcttggaggggttcctcgcgtgctcggtctcctgcgcctggaaggaggcgttgaccgccacgggcgtcaggtcggcgtccacgaacgccagaagtccaagcggaaagtggcctcccggggccagcgcgcccaggagttcgatgtggcggatcgccagtgtcacgcgctgggccagcggcttcttgttcccacggcggtctttgtgggagtagacccccccggccgcgttgcggtgggtaccggtgcgggccagctcggcggcgcgggtccagaagagatacttgcaccccaacaggcgcgcgatgaccgcggaagagacagggagattcatggcttgctcggctaggctggcaggatcgtcagaatgtgatggggtgggctgggccaatggctttatgagaatgtggtttatgacattcattttttcccgaaccaaaaactacacaccataggtccgcgaagtccgcccctcaaaagttcggtagaaattctagtgtgtaattttgcttccctccatgacagcaccaaatcggcgtaacgccgcgttcctggtcctgcccgtgggagactccgcgcgcggagctgctcggcgacaatgattcccgccgccgccgagagagactggaagaacctgcccgacgacctggcgggcaagatcgcggacttcctccgacccacggacctcctggcgacggccttcgtgtggcaccgcggcgccgcccgccggaagacccgctcattcgatgtcatcaccacagccgcgcgcgaggggcgtctcgagtacgcgcggtgggcgcgcgcgaaaggctgcccctggaacgagcgcacgtgcgaatccgcggccgagggcggccacctcgacgtcatcaagtggctgcacgagcatgactgcccgtggaacgaatggacatgcagggccgcggcgggcggaggccacctgcaggttctgcggtgggtgcgcgagcacgggtgcccgtgggacacaggcacgtgctccgacgcagcgttcggcggccacctggaggtcctcgtgtgggcgcgcgagcacggctgcccatggggcgtgttgacaacctacggcgccgcgttcggcggccacctcgacgtcctcgcgtgggcccgcgcgcagggctgcccctgggacgagagcctctgcgcctcggccgccgcgttcggcggccacctcgacgtcctcgcgtgggtacgcgagcacgtacaaaatgcttaagacaagtgcctcgtaacgtcagtcgctcacagtggcggagtcgggcgttctgaaaaaatgaatatggcatgtagactacggttccaccgacaacgttctacttgtcttgttctcccaacgccgaccgagaccaaacaaagaagcctcgaccagacatggccgcctacgcccccgccccgatgaaaattccaagccgtgtcgagagagatgccgcagaggaggagctacaggccgcacagaaggccctcgagaatgcaagcgcggcgctcgagaaggccaaagagcggtacaacaccgccgtcctgcaccgcaacaatatcacacaacgcgcgagcgaactggtcaacaagcaccacgaagccgtcgttaaacatgtgagggacgtcctagccgagcaagaaaacgagcaagtcgccgccacccgcgaaatctcaaggatgacttccagcgggttcgccgaaatttcctgcaagcagaccatcttggcctacctcaccggcgcgaagatcgtcatcaagatcatccagggtgattgccagtacgatggaggcggtaccgacgatgacagcgagcccgaagatagcgaggaggtctcgcagcccgacggcatcactgtccacgagttcgcggatctcctcctctgcgggaagatggagcaccttgtgctcaacagtcccgagactttcgaggtcgatgttcggtcggtatataagtgtgaaaatgagtcctccgctctgaaggacctcgtggacgccctgcgcgacgtggttgtccccctgtgcgtcgcaaagaacgtggagtgtgcgtcccgtgtcgcccagaatctcggtaattgatgtaggcggcccgtggctttggccgcgcggcgattcgatgatgtcgcgacgcggaacacggcaaaaatgtcaagcgataaacgtgcgcgttgcgtcgcgccccgaacatctgttggaatcacatgttttcctttcggcagcttatttggagtggcacgcgagtaggaactcttttgtgtcaacgcaatcactgttgtatgagagcctgtcaagctcccattcaatccaatattttccattcattatgacaattcccgtatccctcaatatgagctgcatgtcagagaatttattgggagggtggtaatgttcgatcatacatctgtgtgtgcacaccattttctctgaaacgacgtcatcatccaggatagccgtgcagaacccgtcaccggattgtttctgcacgccgggtcccgttccaacgacgtacaaaatgtcgccctgacgtgcctccgccatatctacacatttgcatatacgattcatccattttttgtggatgtgaaagtccattgaaaatccatgcgctccgaacatctgttggaatcacatgtttcggcagcttatttggactgatgcgggtgatgcatgtctacgcctgaatcaccggcgcgagaaatgagttttgcctttcaaacggcatgtgcagacaccgcatgcccatctgcaggtacaatcaggcaaaactgagcattcgcgcaagggctatagccgacgttccctaacccatccatggggtcgcgaatcttctcgcaaattgcgtctccagtctcaacaggcaagtttcttccaccgatggccggtacaacttggtagtcacaatatttgttcaccatcagcttttcaaggtcgcttcttagcctacagtccgttctatcatcgggccaaaactccaggtcggtatcaataatctctttgtggattctgcacatatcaatccatcgccgtacgttttgggaaacccggcgaaccgctagacgcatctgttttttcacgttggattttgcctcacaaatgatgatgacttccttaccagctgcattgcaaccttcaggggccgttccggccaccacggcatcgacatcgccacaccatgcatcctcctcaatctggaaattatacccaatacaaacaatttttccgttgaccagccatctctgaatagcctcagccacgtcttcctgtatggcattggaatgcatttttccatactgtttcaccttaccggtgctgcctgaaagtgttataagggcagcttctatgcggtgatccatttttgcaacaacattcttgagctcatgtacgcctgctgagagagtaccttcttgccaaggcgacgcaacttcgagtctctgctgtgttcttggcagaaagttggccatgctctctgtgaagtaaatcatggaaatatcatatcccagacgcacgcgaagccgcggcatggatccaaggcattgaagaatgtcatggaagtcgtccctatgagcgggtgccatacgattgtgtcatttttctggaatgtcaagaatgggcacctgcgttcaaaagcgtatacgaaaatgtcagagtacccatatggtacgtaaaagaggaacgaaaagcaccgacgccaccatgacgtccgagcccgccatcgcgaataaaacgcgcacctgggacggcctgccggacgaactcgcgcacttgatcaccgaccgtttgggacccgccgacctattagcgctgaccttcgtctcccggaagtggcgccaggcctcccggctccaaaagaaacgaccgccctcggcgcccttggacgtcttgaataccgccgcgcgcgaaggccgccttaaatacgtgcggtgggcgcacgagcaggggagtcccttgaacactctaacatgcaaggccgcagccgagggcggtcacctcgaggtcctcaagtggctgcacgagcagggctgtccctgggacgagctgacgtgcaaggccgcagccgagggcggtcacctcgatgttctcaagtggctacacgagcaggactgtcccttgaacactctaacatgcaaggccgcagccgagggcggccacctcgatacacaaaacacagagtgttgcatctgttgcaacacgaaaaggctttaatctgaaatttatcccaccttattcacctgattataaccctattaagaatgtgttcggtatagtaaagaattcattcagaaagtggaatgttactaaagggcgaacgttacaagaattcgaagagggaatattacattcgtttgcccaaaatgtagacacggcgatggttcgcaagtgtaactcccatgcaaggaagttcatatccaatacgttagaatgcctggaaatggcataaagtgcccgagcgcatgttaaggacacggagtccctttctatgcgtggagtttcccagcgcccggatcgcaacgcgtgagacctccggtacagatgcaaggactcgcccgtggagagatccttttttgttctcctcgccgagaaaaggcttaagcgtgcatcagaactcaccacagcataccttctctcgctctcgcttcaacctccctggaaagggcctaatcgttcgccagaacacgccacagcataccctctctcgctctcgcttcaacccccctggaaagggcctaagcgttcgccagaacacagaaaacaaaacccacctttactgacaataacatgactaccgagccgtcaaagaaaaaacggaagaaggatgatgaggagaataaagtcggaggaagaggagggcgtttgtcgaaagaagctctggacgaattactacaaggatttgacaacgtgcccgacttctggaacgacaagctcgtcttcgctttacgacacaacaagatcaccgaaacgcagcttcaatgctcggccgcaaccagagagcaagtcgtgaagaggtacctgtccagcttgaccagcaacgctgtcgttatggagaggatccgatcctattcagtcatgtgcacaaaactccaccggcgcgcatccgctctactgaatatgacagtgtgtgagaacatcaacaacgaggacaacctcctcaagatttgcgacattctttcatcccctctgaagatcaagccaatcgttctgtgtctgcgcgaccctctccccgacctgttcgagaaatgcttgagaaagcacaagtacatcgactccctgggaccttcgctcaacgaactttctttggtgtctcactggtcaaacgtcaagacctacatcgccaacaagatccacgcaaacataaaaactcagatcaagagccactctctgaaaaggttaaagacctacgtgaggtcccatgtgaagggacctcctgatgctgccgtcaagtacttgttcggcgagtctccgtgcgagaacgtcgaagacaggactcttatcgaaagcatcgtggacagactcggtaagggaggcctcctcaaggacggactaccggagatcccggcggagggcttgccttcctcgctgatcaagtttcatttcgacctctgcaaagcttcggaaaaggggttccgaccattaccatttcccagtattggtgccaggcaccatgctagaatcgacccaggagtattctcaactctgatgagggaccttcccgatgctgagagagatcttcatcgtgagctcaagttgacacaagagctgtggaaccgcaaggcaaatcgcgtcattgggtacaagaagagacagagggagaagaaggtcaagaggaggggggagaacaagaggacgaagaagttcaggcgttacaaccgactcaaggtcagaaagttgaaggacacgcagtgggtatcttcaattgaaacggacggtgtggcggtctccatcgtcgtcaagactttacacagacctgcttgagagaagaaggatgtcgatcaacattacgaagaggagctcagaaagatacgagaggtgtacaacaactgttcgccaagcatcaccgcatttgatcctggccacgtattccttctgacaggagctaccatccccaaatctgacctcaacatggaggcccacaagggagaaatggtttcttctgcgaagcattcggccttctcacgagcgcagtgggcgaagatatgtcgtcaaggagaacaacgaacgtgggaagaagaacggaggtccacggcggaggtgaaagaggctcttgacaagcttactgaaagcggaggcgggagaagctccgacatcgatatatgggcaaaattcgtgaaggcggcggctgataggatcgatactctcgacaaggagtttcttctgaacgatgagagatgcaagcggcgcttcacctgcttcaggagaaaacagtctgccctgatgaaggtagcagggttcgccatccggaaggaagagaagactccgatcctcatcggtgtgggacacgcaaatgtcagtgctacgatgaaaggatgtcctatttcagt

SEQ ID NO: 265 - DNA, 21386 bp, unidentified
  misc_feature 1..21386: note = Fanzor polypeptide
  source 1..21386: mol_type = other DNA
tccctcccgtacgagaccgcgtcggcgatccggaggtgcgagtcggacaagtcggactacataagcagcgggtcgtgccccctgtacataggcgacctcgagaccattagccccgggaccgggggctcgggcgtcagcgacaagcaccccgttctcgcacagcaggggatccgcaagtccatcctgcacggcatattcatcgtgtacggcgtgttttccctgctcgcggggaaaaccgcgatcgaatggctcgggaacctggtcgccgggacgatcggcggacccctcccggcgggcgacgcaggcaacgcgccagcggagggtccggcgaccgtccaggaccaggttgtcgtcgaccctgctgatggaacccctggcgacggcattgaggagggcggaaatctggacgaaactgaagaagggggttccggcgacaactctgaagaagaggaagttctagaagtaggagaagcaatgaccggttctaataaaaataagattctaacgccggaggtagatgtgctcaacaacaaaatgatcgaaaacgagacggaacaggctggagtagaggaagaaacgaaacaaatcgctgagaatctcgaaacatcgagaactgaaatacataattcggaaaatgccggcgaagttcttcaagacctggtggatgtaaacgccgagatggccgaaatagaagaaaaactacaaaacggtgaggatatatcagatgaggataggaaaaacctgaatgatcaactagaacagttgggaatacgaaaggagggtctcgaagaacgcgcaaattatattagggataaaggcgtggacggcgcgataccgccgggtgtggattttgattcggtcacaccggacgacgtggacgccgccgataccgcggtagaaaaggcgaatgacgatctccaaaaaatggaagaagagtctatcaagaaggaatcgttacttgcgcggttgaaggcccaaggggaggcgctggcgaagaagatcagcggggagaccgaacgtgagaagaaccgtctcgcgatcgaaggtaatgaaaagaaacgcgatgagctagacgcaaagatacagggtatagaatccgagatagaatccgagagcgacgacactaaaaaacaagacctggaaaaacagaaacaggatctcgaaacagagcgacaggccgtcgtcgacgcgctatcgagcgacgccgacctcgtacgcgacagggacgctctccgcgataaggtacgggatttcgaggacactgagaaggctattgcagagaatgaggcgaagttaaccgaaacggaatccgaaattaataccaataaaaatttgctcgtcgaattgaagagtgacaaagaaacactaaacaccgccgtaaaggaaagcttacaaaacaaacaagaattagaagagaatgtagaaaaactgtctaatgagacacgcgaatcccagaaagaattggacgaagctgagagtacattgcacctaaaacttaccaatctgaattccgctaaaacgaatctgggagaacttgaggaagggtccaataaccttaaaaatgatgtcgaagccggtgaaaaggcggtgatggatatggagaatgaacagaaatcgacacgaaaaaacgtcgaacaacttcttcaaacgcttgaaaataggaaggcttcgttacaaacactgcaagatggccttagtcagacagagcagggttcgaagaaacatacagaattaacggaagaaatcaaaagcgcgacggctaatatcgcggagagttcacagaaactagcggagtcgaatgcaaaactggcggagcttggacctaagaaattggaagctgaagaatccttgaaggttaaaaaagagtctctgactgtcgccacggaaaacaaaaaaacaactgaaatagaagttaacaaaagacaaaacgagtacgagcaatcggaaagtgatgtcatggagaagaaatccgccctcgaggcaaagaaagcggacctaagacaaacaatcgacgacgtggcgggtaaaaaaatggaaatccgcgacctatcgcaaacaatcaaagaaaataaatcgaagaccgagtccgttaagaaggcccaaggacaactgaaactgcaaaaggggaagatcgaattagatattacgaaagacgtcgaacgcaatacaactgcttccgaggacattgccgcgtcacgcgatcgtatccaggcggtcgaagcccaacttgattcccgaaacgcaaaagagatggaaagaaacaacaagaaaaaggctaaggaggcaagaaaagaggcggccaggaaagagaaggaggtgaaaaagctacgcgcggaaaccacggatacagtcgacgacgcgacggagaaaaagatgcaggcggaaacccgtctccgcgacgcggaaacccgccttcgtgaggcaacggaaacaggtgacggggacgccaagatcgctgctgaaattgatatcaaaaacgccatggaagagggggtccgggcaaacaaaaacttgtcggccgcggagtcgagagacgccgctgatgcgcaaggcaaggagttgcgaggcaaagaattggccacccaagcggcggcgaacaacgccgaagtaatacgaaaaagccaatcgtcgggagttttggaaaaggtaaaaggcgtgttcaagcgaccaaacacaggtgcgagcccgaagacaaatcaacctcctacgaaaccgcccccgagaccgtctggtgaagcttcgaaaccgtctggtagtaaacctacccgcagaaggcgttagagacggcaggcgttactgtagagaatgcgagaaagcacaaaagcaaagcaccaaacattcaaacgttcaatcgttcaaacgttcaaaacggccccgacagctgacgccgcatgtattcatgccacccccccccttccctaccgcccgtataatagcgtatagcgtatagcgtatagcacatacgcacatacgcgcccgcaacccgctcgcccgcttgctcgcccgccctcacacccacaccctcgctcacaccgtcggcccatcttcatccactatgtcgcgcttcatcgacgactacgccagcatgtccggggacgactcgggcatggacgtcgaggagatcgaacgcaggcgggcaagcgacgacgagttcctggacgacgcgtcggaggggggtagaaccgagaactccccgggcgcggaactttccgcgcgcgccgcggccgaagcggcgatgcgcgagcgcgacggggccgatcgaaccgagggcgacggcgacggcgacggcgactgggccgatcgttccgacgggggcgacgggggagacgggggagacggaggagacgggttcagtcccaacgcgttcggcttcgttccgcggcgcctggcccggcgcggggggccgcgcgcgtctcccgtcccgaacccggagggccgaagagcgggggggcgcggttcatccggtcgccgaaagagaccccggaacccgcagatgtcgccgcgcccgcaccggcgcccgagaaccgatgtggttgacagcgacttgcgctcggagtccgaggatgcggagatgggacatgcaggaggcggagttgacggcgacggcgacggcgacggtgccggcgacggtgccggcgaccgccttccactcaaccaggagatggcccttgcgaccgccagcagggttcggttccaggaggaggcgaggctccgccgcgagcgcggcgaggctcggaccgggttcactccggagagagagatgctgggacacgacggggaccgtgcttcgaacgacggcgacgacggcaaccacggcaaccacgacaaccacgacaaccacgacaaccacgacaacgacgagaacggcgagaacgaccccgttgacctcaccggcgcccaggagttccgggacggcatcgcggccatgaagaccattctcgcggccctgcgaaccaagttccccgatcccacgtcgttcgccatgtcccgggaggacgccgagaacctcaaggacttctgcaccgccaacctgacggacctgggggacgtacacgccacctgcgccaaggcgtgcaggacctccgagcagcgggagcggctgacggacctctcccggcgggtgcagctggcgggccacagcctggtgtgtatgtccatccacatgcagaacatgtggaactgcgtcaacaggggggtcccccgcgacgcggagctggaccttcacagcgttgaggagttcatgagcctggaggacttgtacaaggacaaggcgttcacccccttccaccagctcctcacccacatcatggatctgttcaacgcctccggttacaagagggagggcgaggaggtcttcgagagggtctacacctccgaggggcaccggaccatcgcgtggaagcgcaagtactccatcgaggacttcatcaaccgccacgtcaggaagagcgtcaacaccaagatgtggctcatcaagtccaaggagaaggaccccgtcccgcgcatcgtgaaccacctttgttcctccaacgagtcggagttttcttcggtgaacaagtccagaaccaccttttcgttcgagaacgggatctacgacgccgacactaacgacttcttcccgtacccgctcccggcgaactcggactacttcaagcaggacggcatctccgccgccaaacacttcgacggggtcgagttccccgagcccgagtggcgcgcgaccaaggcgaacccgctcgcctggcgcaacatcgacacgtcgctcctggactccgtgctcaaacaccaggagatcgacgacgagtccatcgagtggctctacttctccatcgggaggatgctgtaccccatcggcacccacgacgacctccagtatttcctgtacttcgacggcaccgccgggtgcggaaagtccaccattatcaaggtcatacagaacatctacgacaagtccaacgtgggcgtcgtgtccaacaacatcgagacgaccttcgggctctcctccttccaggacaagtggatgtgcatcgccccggagatcaaggacgactggaagatatccgtcaccgagttccagtcaatggccagcggcgagagcgtctccatcgccgtcaagaacaagaccaccatccagaaggagtgggaatcccagctggcgatggcaggcaacgaaatccccgggttcagcgacatcgcggggagcgtttcccggcgcctcctggtgttcaagttcatcaacaagccgtcgccggaggacgggacccttctggaccgcatcaagagcaagatgggccacatcctgctcaagtccaacgtcgcctaccggtacatgaccgccaacggctacgatagctcgctgtggaacctcgtcacagactacttccagcagatcagggcgcagagccagaggacgctcaaccccctcatagacttcatggagtcgggaacctacgtcaacgacgacacgtggatcgaggactccgacgaggaggagggggggtactacgagcactccgtggacttcagcgacttcaaggacgatatccaggagttcgccaagacccaccgcaacggcgagaagctcaagatgaggatgttcgagctgcacaagatgaaggccatcctgaaccagtacgggttcaagatcggctacgaaaagaaaaacggccaggtggtcaagaccaggatcgggagcatccaggcgtgtcggaaggccgtccccgcggacttccaggcgcgggacgcggccagggccgcgaggagggccgggatcgggaccgggatcgggaccgggatacagtaagccagacactgtaaaaaaatttaaaaaattttaaaaattagaaaagaaaaaagatggtggcctgtgttcaagggaccccccgcgaaaagtatctcggcgcggcggtatctgtcctggtgggtatcctttcaactggtctcctcatggggtcgcagagcatgggcgcgacgaccgagacctccgtcgtgctcgcgaacctggtcggaaacttcctggggtacacgggggacatactcatcgcgaagcagtgcttcgacgcgtggaacgggaccgagtacgtgccggtgaagtacgaccagtgggatgtcaggaaccggttcgtgtggtacctcaaaagcatggcgtcgaagtcttttctgcggttcgttcttaccgtcaccatcgaccttatcgtgagtctcgcgataatcgatatggtcatccaggtcctggacgacctcaatatcaagttcaggttccgcgacgcgataattgcgggcggcgtttccatcatcacgttccaagtgttcgtgaacgagatccggttcaactacgcgtacaatcggtccagcaacttcacgcacgacctcatcgttttcatgtgggcgtctctgctaatagtcatctacgtcatgcttcgcaagctcaacgtcttcgagtcaaagcatttcgtcaagcctgcgattcagttcggctaggtcctcgcgcgagtagacgtgctcggtgtccgcggggatgcgcgcgaacgaacccggaacgctcgcgtaccgcgcaatcatcgcctccgccgcgtcgaccggctccgcgagccgccgcctgaaatcgtccaccgtcccgaccctcgccgagaagtccgcgtcaaagctcgccaccgcgtccgcgctgcgcccgagggattccatgtccacccccttcctggccagcccgacggtcagcgccctgcccagttcgtccaccgcggccgtcaaccggtcccggatgcccccgacctccgccacgcgggcgtcgtaaatcgccctcggaaacaggctcgcctccgcaaaccccttgacagtctcggaggcgagcctctccgcctcatccagctggtttctgtagagggtcctgagacggcccacggaatccgttatcgtcctcaggaccccggacgccgactcgatgtcctccatggtatccgccgactcgtacagggtcaccgccgcgtcggacagcctacgcagtcgctcgagcaacatccccgagacgtccgaccccaccccccgcgcgtgtttgtaaacatcggacgccgtcgccgtccgggcctcggcctcggactcggcctcggactcggactcgggatccgcggcccgcgtcgcgtggccgtggaccgcctccaaaacctcgcgcgacgccgaggtcacatcgcccgtcctagtctggatgtccatcgctttttgtatcaccgggtccctgacgctcatttgtggacagaagacagattttgtttaccgtgcgctcgatcttctccttcgtccggtccgaacacctatacgttactaataggttctcggtggtcttcatggcgtcggaaagggccatcgcgatgtgctccacgtcggtctcgcggctgtccaggtaggacaccgacgggatccaggcggtaagggatcccgacgcgttctcgacgacgaccgccgcctgttccccttcccccgcggcaccgcttcgggaaaagtacttatacacggcggcgccgagggcgaccgacagaaccgggagcgacataaacataacctttcacctgtccttccaaaaaaaacgaccgggatgaacgagtcgcgcgcgcacgccctcctaacgctcgcggcggaggacatgcgcaaggcggagtccgacgccgtcgccgtgagcgtcgccgccgaccccggctccgcccgcgacgccgttctcgtcgggccgccgtcctccggcaagaccgaggccatcctgaggaccatcctcgaaacgcccatcgtccggccggggatacacccgtgcgacgtcaacgtcttcgtcgtgcactacgcggccctccccgacgcgtgcaagcgggcgaaaacgctgggagtgcgcaacctcttctgcgtcagcaaaccgtcggacttcaagaggctcgtgcccaggatgtgcaccatggcgaccatctgcgtcatatgccgggacgcgacgttcaaccgcctgtgcgaccacctgcacaccgtcaccgtgcagaggctggttttcgataacgtcgagtccctcaggatcaaaaactatcccgcggtgaggtgcaacttcaagtggttcctcaccgcggacctcggcgcaaccgcgctcgcccccgcgctcgccccggccccgcgcaagaactccaggatccgcaaggaggccgcggccgcgtaccgaggcgatcgcgtggtcaagatccgacacgtcccgccgcagacggtcctggaccgcgtggtcgtgtaccgggaaaccgccccgagacacctcaacgcgaccatctgcgccctctacggccgggaggagtaccgcctcgcggaggcgtgcctgccgtgcgcgaacgttagagcgtgcgacatgaacctggtctacagcaaacaaacgtgcgacagggtgcgcgacccctgtaccatatgcttcgaggagaagccccacgtcgcgcggatcgtcgccccgtgctgcgagaacaacttctgcgcggagtgtttcctgaaacacatcctggacaaccccacgtgccccatgtgccgctcgaacgtggacatccacacctgcatcagcgtctcggacgttgcgatacagaggctcggatcgatagtccaggaaaccaagaagacgctggaggagtgcctcgcggacccccgggcgagggtgctggtggtgtcgggaagggacatcttcaactccgtggccgatctcatgtggtacaccgagctcgccttcgtggacatatgcggaaacaaccatctcctcgacaagcggatccgggagttcgcctcctcgcagtgcagactgggggtcgtcagacaccaccaaatcgggctcgggcccatacgcatacccggggtaacccacatcgtcttcgtgggatacttctccgacgaggaacgcgcgcactggtcgacgcggggcgtgggcccccacacggagtacatgccgaagaccttatccatggaatcggtttacaacaggacgttcaacgtctacgacgagttccgaatatactgatctacagtattctgaacttcagatgtaaactgttttccatttttttctgggacacttataattgttctcgtcaatgcacggaagcaccctccgacatcgtgcagccattcactaccttcatttcgacaggtcgctaaggagggttgcaaagatatatggggtcgggaagtcgtctgtagcgcgctgggcgcgtgctctggaggttccagagacgaagggtaggaaggttaggcaaagcgccgtcgcgagactaaaaccgaaaatagcggagcatctgcaacagaatcctttcctcacagtaggggcgcttctcaagaaggtccgcgaacagggtgagaaggtcgggatgaccacggttcatcgagctatccgtgccgcgaacttcagcagaaaaaggacacgacctcggttcgccccaaaggtccccaccgcggaagaagggcgtactttcctgacctgtctgaacaatgcgtctgaagtcatcgccgtggacgagacgagcatctacgtggacgactcaccgaggtacggatacacgctgaagggaacacgttgcgtgcaccgccggaagtgtcctgtccgtacaggacgcgtgactctgcttttggctgtctcaccaacgcgcggcgtcgttcatcacgaagtggtcaaaggctcggtcacatcggatcgctttgcaggattcgtacggaacatctccgcgccaggcagcacagcgatcctcgacaatgcggtattccacaaaacggctgctgtgcgagaggccgctgaaggcgccggtatctcacttttgttcacacctccgtacagcccagagttcaaccccattgagggatgtttcagtgtcatgaaacaggcgctccgcacgcccggtgggtgcttaaacggggcgttagcgacgctcacggcgtcgaaaatctccgccttcttccgacattctcaagcgcacgttgaaggagttgccggaaactagcaaaaagcttaacgagagcacacaacagaagtaaataaactccgcttccggatctcacaacaagagcttaaggctacgccactggaaggcacgcaacacaagaaacgccgctgtcctgacaagagcttaagaagacgatcagcacaaaaaaacccgatggagggagacggaaggagccctgacgacgaggaggacgaagatgcgggggccgagctacgcgtcgtcaagcgatgtttaaggaaagcgctaaacatgtccacggacgagaaggatctgttcgtctcaagggtggaggagctggtcgtcgcggtgtccaggttgatgcaccacgggtcgcttctggcaaccaactacgtcctccaccggatgaacgacgggaaccctccttccgacgacctcctgacagaccagacgttctacaggcagtgtatgacgtactcttcttcttcggtacgttctggcgcgtaccctgaagtgaagtcgttcgccgacacgaagaggcacctcatcccccacacagagcaggtcccgtactccggaaactgtgtcaacgcagccgcgaggaagctgaaatcttccgttctcacgatcctgtcgcaccgcttccaccagcgcgtcacctccgcggtccgcgcaatgtttcccgatataccggaccgtgccaggatcgccataaaacataggtgcctcggcagacccggagggcctcccatcgcactgactcgagaggcgtgggccttcgttgacgcggttagaggagacatcttccacggagccgacgtttattcgaccgcggtagaggaggccgtttggaattgtcgaggaatcaagaaggcggacagagaggccgtgtgcaccgaactcctagcggggcgaatgcccgagatggacagtcttaagggctcgggccgtgaggtggttacccatgttctggagttcctccccgcttgcagagcacacagaggagcggtccccgacgaagaagttaggcgcctcgtggccgcggccgcgggacgcgttttccggagggcgaccgatgagcagaagcaacaggtagtggaggatgtcatccacacaacctcttcagcagacaggcgtttcgggaggttgataagcgcggcgcgcagcatgctacgcttcgctggagtcatcagcatcggatggttgaagacacacccggcgcgggcgttgatcgccgtccgtcggatgatgctggaggtggaggatggcatccgtctcggccgagaagctcggaaagaaacgccgtcccaagcgcttccctctcctaccgatctttgggcagaggaggcagatggtgacgttggatgccgacaccctggtgggtctgtgcaaggccgtgggtatactgccgagcggagcagggcggaaagccctgactgaagacttcaagcgatccctgcttagggttccagccggtttcgttttcagcgacaaaacgtccttggagagcgacggcgtcgccatcgtgttgaggacctcaaagaccaaccctctcgcctccgcagaaatggcgaccaaggatgacctagaagacatcgtctttgacagagtgttggcgaacgatccggggcgggcagacatcgccaccgtcgtcgagtggacggacgaggaagggctgaagaggggatcgacgcgtctgacgcgcaaggagtactaccagcaggcaggcataaaccgccgtgcaaggaagcgccgcatgagggacagagcaatatccgaacacctgaacaaatggaaggaggccagcatcaagacagccgacccagaagcttttgaggaggctctgagggtcagaatgagtccgctccctggctccgagggcgacccctcaatcgaggttgtgtggggccaccaactggcccggtggacgtccataatggacatgaccgcgttcgccgcgaaacgcagaacactggatcgtttttggaggcacaaggttggtctcgaggcgcgacatgatctgagccgcaccgtcgtggtgtttggagacgggaagttttctgcgtcgggaagaggagaacgagccgtgcctcggaaggcgatggaagcctctgcggcacgatttgcggcgaaggtcgttaaggtcggcgaagcctacacgacgaaagtgtgttcgcgttgccatatgcccacattttctgtcagaatgctgaggtcgaagaagactaccgaagggggacgaatcgagcggatggtcgatgtccgggagctgcggcgttgttcatccaacgcatgtcgcgcatctccttacaagtcgagggacaaagacgccgccatcagcatccttcagattttcctcgcgggaatagagcgcccgccgtgctacaccaagcaaggatacgaagctgcgcttagagtcatgcgacagggaccgcaacctcatcccttggtctgataggaaaaacctaacccccacggctgtgtcgtgcgcgtcgatggcggcacagtcgcgctgcaagggaaacccccagggtaaccttgctagcaggtccccgcgaggggaccataaaataccttgcgttttgagggacggacttagcggacctatggtgtcccacaatttctggattgtagtttaaatttcatcgactgagctttgcgctcgggtacacgttcatcgccgtgttctcgggaagcacccgatcggttttcggggatttcgtgtcgacagcttcaggtacacggttcttgtacagcccctcgttcttggcgatcagcccgtagttcgcgacgcgaaggtcggtgcttaccgacacgttgtaacacggatcccagcccgccgccctgaagtgccagtctctgcactccgcccactcagcctcgtccttcgacctcttggcgtccgcgtggtacgcgcttacgcccagagcggtctgcatacgctcggaggagaactcgggggttttcagcgggtccattgttttgttcgtatcatacacaaaatggattacgccactccctcgcttctgggcgtcctcgcgttcctcgggattatgatttacgcgaggctaggccgcctaaggcacgcgtccaaacaggcgtgcgacacgaaggtccataactcgcactccagggcgcacgacgtccaaatgtacgcgctcaccgccaagcagtcggacgatcgaacgatcgtcatcaagaaggagggccacgggctggatttcctgaacgcggtgcggtccgagaaggtggacgagatcatcgtcaaggggcgcgcgttcgccgtcacgttcaagatggccgcctcgcaaacgttcgagatcgagatcgacgaggcgaacgcgaggtcgccgttcctcaaaatcgcgggcgcccaggcggaccgcgtcctgacctccgaccagttcggcacggtttacgtcatggcgcactaaatttcctgttctctacggcgcgggcctcagcaacacgtgcagcgtcccgttgccgtcgttctgcacggcgttgaattggtaccgcggtttgcccggcgtccgtcgtgatcctcgcaaacgttcgtgatccgagtccgtctaccccgccgaccccgccgaccccgccgaccccttcagcaacgcggcgaggctggagacggtggccgccccctcctcacccgcgtccatcttcatgtaccccagcccctccaccgcctcgtccagcgcgtcggtcgtgatgaaagggttaccgggctcggacacgacgtagttgttcgcggtcaggtacgcgggcgtcacgaagtccccgaggttccgcgtgacctcggcgatgtcatcgatgttcctgtccaccgccccctgtatgatgacgttagaagcggagttgttggagatggcgttcgcgttcgaagtgctgtcacgcaacaggtcgtcgtacaggtcacgaagggcttcgctcgacgtcttgtttgcctccacctcgtccaccgtcttctctatcgcgccggtgacggtctcgcccagcgagttgacgtcgtcgatcacctggttcagatccgataccgtcgcagcctgcgacaccctgtacacgacgtaccccaggaccagggccaggaccagcaccgtaaacagcatggctatcatcgcagcctgcattttgtttgtttgtttgggtttcagacaaaaaccgtttcacgcgccgaaggacaggcgacccatcacgaaactgtgcgtcctcctgaacatctccacgcgctccaccgtatccgcgaacttcgcgaccgcctcgtcgaacgtcacccaccgcgagtcgcggagctcgttcgcgcacagccgggtcacgcactcgtcctcgatcctcgcgacgaagtacacgtgcttgtagcggacgccgttcgacccgctgaacgtctcgtcgaacggtttgtgtgacagaagcatgatcgactcggtcgatatgccggtctcctcggagaactctcggaacgccgtcctcatatccggctcgttcacgttccgccggcccttcgggaacccccactcgggctcgtacggcacgttctcgcaatgccgcatgatgtcgcggatcccgaagaacgaggtggtctccccgttctggatgtagtacccggccttgatcgcgttgaaccgcccccgggactcctcgtactccgaccaccgcttcccgcggctcgcgttgttccacaggtacttccaacaatgctcgaaatcgttgtcgcgtatcagcgccctctcgtccggcgtcatcatgcggaacatgctgagaatgtacttccggttctccaggccgtacttcccgcgcatgaagtccacgaacgaaaacgtatccttccgctgaaccaccaggtattccggggtttccgcccccctcgggcaccggaaacatattatgccgtaagatatcaccggatggttgcagaaccggtatatgtgccccgtctcgccgcagttcgcacaggttatcgccgccggggacgggggcgcgggagcgggagcgggacggttcgacgccccccggcgggcgcacccgccatcttcaccaggctttgtgttacacgaaggcattcctacagtacggcgacaaaaatgtggtgcccgtaaaaaacgcgtgccgttacacgtaactttttttgctttcaacagaaaacatggaccgcgttcctcccccgtccctcttctacagcagaaactgcaaacactgcgtctccctcctcagggagtaccaggaactcgtcggcaaagcggggatccagatcgtgtgcgtggacggccgcctcgaaaaggtccccccgatcgtcacggaggtccccgccctcatcgtgcccgcggagaaacgggtcatcttctggaaggatatccggacgaaactcaacagcataatcgcagcgtgcaaccagcccaagccggtgaaccccgtcgagtcgcagggaaacaccgccgaggtgttcagtttcctcaacggcccacacctcgaccagatggccagcgcggccaaccgcgtggacgacaactacgccaaccccttctactccaacccgagcttcgactcgctcgccgagccggaggacaccacgccctccgataaaatcagcccctcctccataaacaacttcgtcgcgcagagggacgccgacatcgccgaaatcgcgcgggcccacgccaggcccccgtcgtacaacgtgctctaaagaaaactcaatcaatcaatcaatcaatcaatcaatcaatcaatcaatcacggtcttggacatcccgaacgccttcaggttccacatcacgaacacgatggccagggggtacgacacgcgcaggagaaaatcctggcgccccgtcaggccccaggacgacagccacccgtcgtagtagtttaccgtcacccagtgcacggcgatgcccagggtcaccatcagggacaggatcaccagcttctggacgtccttgcgcttcataccgagaaccgagaggtaccccggctccgagaacccctgaacctggccgacgccggcggctcccacgagatacggaaccgcgacgtccggctgcggcgtgtacggaacgctcgtgggcgccggcgtcggctgatacgggcccaaatacgtgttcgccggctggcttcccacgaccggcgtcgccggaacggaatcggggtagctcggctgcgtactcggaacgtgcgtcatcggcgggaccacgggcggcggcggcggcggcgggtggtaatccatcatgccctcgtcggtgtacggcacgcccgacaggttcatccgggtaccaaacgcatcgtcaatgctgacgtagtccatttattctacttcacccataaatgtttaacgcaccctctttaggctgaccgtctgaacctcgtcgctcgcgaagagtttcgtctggagctccctcgccagctccggccggtcgcgcagcaacgtctgcatgttctcctcgatcgccgacttactcggcgccctcctcacgctgcgcgtctcgaacctgagcttgccgttctgggtccgcagctcctcgatgttgtaccgcttcataaacgccaggatcacgtcgcgtagcttgttcttaacaacccgcttctccttcgccagcttctgcagatccttcagctcggaatccaactggaaccacttactcacgtgggcgcggaactccacgatctgctcatcggacggcttcgccgagtcgtcgtcgccgtcgtcggggctcagaagcgcggtccgccggttgtacagctcctcgaaaaacttcttctgaaggaccgcgtcgcccgacgtcacggcctccatctgaagcttgtgaaggtaccggtaggcgtcaagctcgcgatacatcttgttcgtgtccgttatccccgacgtcacgtccaacatgtccaccagacacttcgacgagctctggaagaaatcgtcacgagaaactatgtccattttcccatatacacaaattaaaagtttgccttaaaacgatttcactcgtccgtcgtcacggtggcgataggccactggagcttcaggttgctgggaaggagccaagacaaggtgcgcttcacgggacccgccctgtacagagcgcgagcgtggaacaccgagaacgcgtagttggcgatctggacgttggacacgtacccggacacgccgttggtgccgccgacgttcagggacccggacggatcctgaacaacgccgttcgacgcgaaccgcgtcaccggggacaccgagtaaatatcgccgtccaggaacagggtcacgacgtcgttgtccagaaccacaaccatgttcacccacctgcccagaggcacgtactcaacctccactatcacgcaattggagtagttcacggtcgtcgtcataccgtcgccgtcctgggtctgccgactcgcctggtagtcctccagggcctgttttgtcgtcagcgcgctatccgtgttcatagtgcggaggcccacgtacatcctgttcgtcgcacggtccatcagcaccaggggggacaaaccgtccgcggagtcgccgatactcaacacccgcttcatggcggtcgtgttcgactgcgcctcgacgtagacccagaacgaaagcgaaaactccttgccgttcttcatgctcgggaacttatcggaacttatcgtcttaggctgagaaatagcgtgaattggctcctccagaagcgtcaccaccttcaggtttgtcgacagaatctggtacaccgtgtaggccagcgcggcgaagacgccgaccgccaccacaacgatcatcagagtcgtcaaaccctgcccggtaacgtaccggtacgcggaactggcaccggtcgtcacgcgtgatgcgatccccgaccccgcgttcgcgacgcgcgacggcacgaccggtccacccggtccgcctggcgccgccgcgggagagggaaacggggatggggcggcgggggccgggaccgagaccggggctggggctggggctggggcggacggttcaaagccagcaggagcagaaggattcaggccggacatcctgtttgtgactcagttagaaaatttgaattcgaattcgcaaacatcgtgccgcgaaacggacgtggtgcgaaacacgcacaaaaagggacaaaacggtccacatcgctcacgtccacacttccccggcgcccccggcgtctcacggcgtcccgcggagacgcgcgtgggaccaatggtaaatgacacagattccgaagatatcgatgcgcttgcgaacaaacacatcgtgaggttcaccaacatcacttattccatccgttctgcaggtaagactcgtacagccccagcatcatgatgttctgctcagggagggacgtctcaaagtcgagaccttctgtggcgaaaacatggaagtccagcgccgtcattactgttttatcattcttgtgaacatcggcgcttgtctccatcaaatcatccgttcgcgagtacgtgccgacttcaaccgtggctccattgtcaacaagcttggcgtaccaacactggacgtcgtactgagagtatctactggactcggaagagtactcgcgttttgacatgtcgtaatcccaaagaggcaacggaatggccctgatgagccgactcggagaagatcccatggtgtcgggtaagcgttggatgcggtgttttgactttgattgacgttggttgatgtgatgcaaatggagcgttgagataagggtggattttgagcaattcacttttttccaaagtgcgttgaccgcggctccggacgacgagggtcgacgcataatttcgacggaaacgttacttttcggaagatgtgagtttcgaaataaatccgggttaccgtacgaatcaaccggtgcacacttgacccccctttcatggcaccgcctcgcttgtaatgccctcaaaaacagggacatccgtttacggcaaaggaacgccaaaaagtgcaaactttcccgccttgtcggaccacgacagtgaagcctgctacagcccctccggggggaggtctgtgaagccaactcacggcccgggcttcgggaggcggtgacctggggttcggacgacgaaggtcgacgcataatttcgacgaaaacgttacttttcacaatatgtcattttcgaaataaatccgggttaccgtatgaatcaaccggtgcacactcgacccaccctttcatggtaccgcctcgcctgtaatgccctccaaaacagggacatccgtttacggcacaggaacgccaaaaagtgcaaactgtcccaccttaccgggccacgacagtgacgaagccagcccccccggcccgggcttcgggaggcgctgacctggggctcggacgacgagggtcgacgcataatttcgacgaaagtgttacattttgttttttttaagtaagtacataagtacataaacccgtatgaatcaagcggtaaacaaaataccgaacggagttgaagaggcgccaatattgtacattccgtttaccccgattctttagagaaatgtgcacagcaggaacccttttcttttcttattattttcatgtggaagaaagaaattactgcagtaagagtaaactacgcataaaagtggtttacgtgtatggaacagttgatgtgcacaatttgtcgaaccgcgacgtaaacaaatgtgactgtttaagggtgcgaaaatcgaccccccgcccaaaaaaaagggctcagaatacgcgccggctcagaaggactttttttggcggggggtcgattttcgcacccttaaacagtcacatttgtttacgtcgcggttcgacaaattgtgcacatcaactgttccatacacgtaaaccatttttgtgcattttaatacctccgggatgccctgaacttgaaattgtcgaaaattgatacattctttggaaataaaatttcccttgtggtattcagcgtgtccaattgtgccacgggggtaaggtggattgtgaaatttgttgcctttttccggaggcgctgacctggggttcggacgacgagggtcgacgcataatttcgacgaaaacgttacttttcacaatgtgtcattttcgaaataaatccgggttaccgtatgaatcaaccggtgcacactcgacccaccctttcatggtaccgcctcgcctgtaatgccctccaaaacagggacatccgtttacggcacaggaacgccaaaaagtgcaaactgtcccaccttgccgggccacgacagtgaagcctgctccagcccctccgggagggggtctgtgaagccagctcacgtcccgggcttcgggaggcgctgacctggggttcggacgacgagggtcgacgcataatttcgacgaaaacgttacttttcacaatgtgtcattttcgaaataaatccgggttaccgtatgaatcaaccggtgcacactcgacccaccctttcatggtaccgcctcgcctgtaatgccctccaaaacagggacatccgtttacggcacaggaacgccaaaaagtgcaaactgtcccaccttgccgggccacgacagtgaagcctgctccagcccctccgggagggggcctgtgaagccagctcacgtcccgggcttcgggaggcgctgacctggggttcggacgacgagggtcgacgcataatttcgacgaaaacgttacttttcacaatgtgtcattttcgaaataaatccgggttaccgtatgaatcaaccggtgcacactcgacccaccctttcatggtaccgcctcgcctgtaatgccctccaaaacagggacatccgtttacggcacaggaacgccaaaaagtgcaaactgtcccaccttgccgggccacgacagtgaagcctgctccagcccctccgggagggggcctgtgaagccagctcacgtcccgggcttcgggaggcgctgacctggggttcggacgacgagggtcgacgcataatttcgacgaaaacgttacttttcacaatatgtcattttcgaaataaatccgggttaccgtatgaatcaaccggtgcacactcgacccaccctttcatggtaccgcctcgcctgtaatgccctccaaaacagggacatccgtttacggcacaggaacgccaaaaagtgcaaactgtcccaccttgccgggccacgacagtttagcctgctccagcccctccgggagggggtctgtgaagccagctcacgtcccgggcttcgggaggcgctgacctggggttcggacgacgagggtcgacgcataatttcgacgaaaacgttacttttcacaatgtgtcattttcgaaataaatccgggttaccgtatgaatcaaccggtgcacactcgacccaccctttcatggtaccgcctcgcctgtaatgccctccaaaacagggacatccgtttacggcacaggaacgccaaaaagtgcaaactgtcccaccttgccgggccacgacagtttagcctgctccagcccc

SEQ ID NO: 266 - DNA, 22043 bp, unidentified
  source 1..22043: mol_type = other DNA; note = Balamuthia sp.
tagatggaactatcgacccaacactcgccaagaatttgcaagaagaaacacactgtacgtctttttccccctctccctaatcatcataatgttttttttcttccattatgattgaagaaaaccaaaaaacgctcacaccacattgctagtcgacaaggtggaggtcaaaaagttgtttgagacgttccaacaatgcgccacagatggcaagttagacaaaccagccttcagggaggcccttgacttgctggaggcggccggcctcaagaagatggacgacacgccgtttcccgaccgcctctttgacctgctggacctgaacggggatggcgtggttgaccttcaggaattcatcagcggcctttccttcctttgcaagggtactcccgaagagaaattgcgatgtatgttactcttgctcttttgttctctcattctcgcgcctgtttggttccagctttcagcaaagactaacattctcgttcttttaaagtgtccttccaggcctatgacttggatggtaatggttacatcaccaaagatgagttatcccttatgttcaaacaggcctggatcgccggcttcaaggctctttgcagcactcacagcacggaagaactgagcacagacgacctcaacgagttctctgaggaaatggccggcctctttgcagataatgcttttgagacattggacgccaatggtatttttcctcttcctcatgtctctgcttctctcgctctctgcttctttatagttctctctctctctctctctctcattgcctttcttctgttaacaaaatgaaaaataggagatggaaagctttctttcgaagagttcaaggagtttgctctggcggaacccaagataacagccaccctcaacggattcaagaaagaagtggtcatcacgttttaaacacctcaaacatcgaaccaaaccaaatgtaacaaccaccgcaacaatatccacaacaacagcaacaacaataacctatcccccaacagatggccacaataacgagtttttgataacaagacataactcatttttttgtatacaccaagctttcttgctctcctttcttcttcttgttcttcttcttcttgttcttcttcttcttcttgttcttcttgttcttcttcttctccttcttctccttcttcgtctctcctttcttttcttcttctccgttctctctctctctctcttcaggggaaaggaaaaaaaaagacaaaaaaaaaaggaaatggagaaggaagaggaagagaggcagggcggtaatgcttcgactggggaagagagggaggagcaaaagggagacgcgacatgcgaacaagaccgcaacaacagcatcaacaacaaagacaagataggtctccttgccgaactgccgatggacctggtggtgctgctcctagagagcatgccagccagcacgctgggcaacatggcctgcacctgccactactggagggacttgatctaccagcactgttggaaggcggtcgacttgagccccacgctgaactcgttgaacattttacgcggcaaggggccacaccgcaatcatgtaacgcatcttattcagaaagttttagattgcattttatcaagatgggttttaatcgaagtgtgaagcatacttactttagggcagagtcgcggaggcttatggagcagattcgctacaccaacgtcaggcacttcaagtttgccacgaacgacttttttgttaactccaaggtctcttgttgccttcacttcccctccctgcctcccttctctctctctctctctctctctctctctctctctctctctctctcgctctcctcttgcttggtctattctcatccgattattggagacaataggcattagtgaggctactaacgcggtggaaaggacatctgcacacgttggacctgcggggctgtcgctctctcggcgacgaggagaaccttgttctgttccaggagttagggcctcacctcaagaccctgaaagtgggctgctttgacgactaccgcttcgtgccctgggagcaaagcctgcagtatgtggccacctactgcaccgagctcaggacgctgcgatggggcagctatttgcagatgaccgctgcggatgtggccgtcatgcgctccataggtgagcggctgacgcggctctccaggttgggcgtggtggcctgccttcgagccagagagcgcttctccgacgaccatcttgctgctttggtgtgcccacaaggaacagcagacgcagaggtagaaaagaaagaagccaggacaagtatcaaggcgaggggagaggagagaaagaagaaggaactacaacaccaaatgctgggttggagaataaccgacttggctttgaggaatgcggacctaacgcagcgaggaatctccctgttgggcattcactgccccaacctacgtaagttggagctgtgctgctcgcaggagatcgaggagagggccttcgttgccctctttgccgcgctggactgccgtcgtatggagaagctgagacttgaactttgtggcaagccattaacggacgccattctacaggccttccttcttagcagcgacagcagtggcggcgaggatagtttctgcagcctgcgcaagttatttttggagccggtagtagtctcagagagagggctttcacgcatgctctctgcctgccccctgctacagaagctatgcctaagagagggtgaagaagaagaagaagcactagcacaagcaagcccaaaccataacttcatgacgaacaacatcctgcagcaaatagccgcacattgccccaacctaaacgagctgtttctgctccccgcctacggcaaggcatccgcacacaaccatctattcgagaaagacggggagggcgggagcgaagcaaccgccgccgctgacacaataacggatgaagggtttgatgcgctggtgaaaggctgtccgcggctccgtcggttgcgtgtgccaggcaaagtatctgcggggctgcaggacatcatcacggaacacctccgtgcaaatggcaatccgtaccttcgactctccgcctaccatagccaccgtgccaagtgggaacctaccagtgtttttgggtgacacgggaataaaaaaagagcaaatattaaaaaaaactacccttgttaagaagcaatgaccatgccactgccactagcagctgcagaaggagaaggggcagcctcgcccctgcttctcgagttgaccaactcgcggtgaatttcgggagagatgacacgatggttcttggtcttgattagccgcttcaattgtttcttctgttgcggggtgagatcctccttatatctctgcacaaatacaagaagggcttgatgccaaagaactggcagctccctttcttcctcgaagaagcgcataaagtgccgaacgagtgagtcgatgacgcggtacggcagattgtacttcttgtccaataagatccggatgaagatactgttggcgccagagtagtccatctctgccagtttgagcagtgccaccgccgagtgtagtgcagggatggataccttcaccacaacacttccaatgatggttgcttctctgagtgtgcaatctcctgcctgttggtcaaatatcagtgaccggtccggttatatgtaaagatgcaatgaagccaacaacaacgcacctcgcacagtggcaaaatgatgcccttaaagaaggcggctggtttaaagacactcttcttgagggccatatacaagtgccagttcagttttttgtgttcttggatgtcatccctcactcgtgggtataagatcagtgaatagaatctgtcatcaaacatacagcacaaaaacaaaaacaaaaacaaaatagtaagcattagcggcactgaagaaggaccaagcagaaaggagaaaatagaggagaatgatggatagattcagtgtaactatgacattaaggtatcatcaccggccagcggcgcgattctctaaggctaaagtttcatcacgagaagggagagagaggagagagagagagagagagagagaacgaatgaggaattacagtaacagtaccgttgtgccatcttggcgttgaggttagaggcaaaaatacgggtggccatgcgcacggcaggaggtgaccaatggtccgggtctgttaggtacaggatctcctcccagttggacaacgaagggataatcttaaaagctttgggcatagccccgcttctgtatcttgaaagcacttgccccacgctagtacgcacagaagatcaaccaacaaagtaagaaactcgaaagaggcaaaaggaaagaaatgaaagaggagacaaaccctttgtagacttccaccactttagggtcgagtcgctgttcgatgggagcgtctccctctttttcgtgttccttgattttctccatgataatgtcggcaagagtgcgtcgcggttgcagcggtcctgtccacatttgcaatgcacgagcgtcctcctccgtcagttcaatgtcctccacgtcatagtcctctccttcctcttcgtcttcggagccccatcctccgtcctccggttcttcctcctcatctttgctggggaaaaattgtcttgttgcgttttgtctttttttaaaaagaaggacagtgagaaaacctgatcgcttcctctcgcaacactaataaacatacctttcttcgtttcgttcttcggcttgttgctcctgagctaaagctaacgctttttgactcagtgttttatctataaaagtctgaaaaaaaaataagcaaaatcaatcactccacccaagaacacatttcccgttacccttttctctaattgtttggcctttcgctcttgtcgccgggcttttgtgcgttgtgcggcgcgaggctgcacgcgctccgctcgctctttgtcctcctcaatctctgtgcccaacggcttatgccggtggacccccttggccttggactctttgggcatggcgctctgtgtgtgtggggtgtcttcttccgctactctttttttttctttctttttttttccttttctgaggaaattcttctttttatttattgtcgacgatgtctgcatttatttaattttttgccgacactccgggccagggtcaaggccaggaattcttttgttttgtggagtgccgttgttatgggtcttcatcggtatcatcaacgtcattccaaacgtcgctagcatcgtaatcatcaccgccatcgtcatcgtcatcgtcatcgtcgtcgtagtcgtcgctatcggaagggtacgttgggggagggggaggcacggtccggttagctagagtccgccacacatactgaactaggtcagactcttctgacaacggtcctgctatcgattgttgtgattgcgcagcgccaccaaagtccagaagaatgaccaccgtcttcacttcttcttgtgggcaatgtagatttctccaaaggtctacaaataggaacgccatgccctctttcaacagtacatcggagtcctcccacgggtcctgcagcagttgccattgcggcttggagcaaagcgttcccttctggatggctggcactggactacccacccaactgcgtactgccgattggttggtaaagaccacatcgaagccacgtggaacacctggctttagtactgttacccgtctgttggtaaaacgctcccttacaaacaaaaaggggcagataaagcgaaaagaagaagatgaaaacaagtcagtgaagtccgttggaatcaaacgtaagaataatgtgggttgcaaaacacacctgagtttgctaaggtgccatctgatagtttcctgctcaggatagggtaagccataacaagaattgccgacagcatccgtcggttggacaaggacgcgactgttacgatgctccgagaatggcaactgttgcaaagtaatgacaaaagccttccataactggtcttcagtggacaggctggccaggcactgcgttctgaacactctggccaaggtcttggtcaaatggaagagttgctcgcacacagcaggttgggaacacttcccatgtttgtgccgaatgtacaacaattctcctccactgtggtgttggctgtcagtcaaggcaaagaaagggaaatggagcaaagagaagagaacgacgaagagaagaacgagaatgatgaagcgaaaagaaggcgagacctgtcactagcggaggcccgaagcagaaaggacaacacgatggcgcacagcttttcaaacctaggtcgttgagagggacgaaggcgaccactctccttgccaaacaacttgaacactggaaaccacagcatacgtcgcccatacaggtacttccatggcaatttgccttctgagccaggcgcttttttttttgagtatgaggtgagtaatctttgtgcaacagcgaataaaaagagagcgtgattcaaccagaaagtatgggaggttggtctggcgcgaggtagtggtacacctcgaaaaagtgttgctgctcgttcaaagcttccttcaagtttgctggcagcttctgcaaaaggaaggggcgaggaagggcttcatcttgggcgagctgcctccaccgttgactcacgagagcacatcgcttgagcacaacagcaaccggcaaaaactgaaatatgtgcaacactaactcatccggcagtccctccatctgtcgctcctcctccttctctttaatagaagtattagtggtagcagagcagtaacagggtatatatggggaaaatgtgactaaaactgtttttttttaaaacaaaaaaggttgttgcttgctacagttatatccgccgactgttgtcgagaaagtagcttgcttggggtcctccctccttccgctcgcacacacatcgatgctgcgctgagcgcgaaagggaaaataaaagtgtgagagaggaggggtcgaacagctcgttgattttcgattggtgtgtttatctgcagacatcaaggtacgaaaagccattggctactgccatgtttccaaacaaaaagggaggtgataaaagtgacaccggaacaacaacaacaaaaacccatcatcgcaccaagaagaaacagatttgttccatagctcctttttaacaggcaggaaagaagggaggaaggaaaaaataaacgtagctgcgctacgttgtcactttttgttttttgttttggtcagacgagggggaaggaagggagtggtggtggcagtggcagcagggagggagctacgatggaagccgccaaccgccacaacaacaattttgtggacctggaggaagggcgacggcctgaaggagcttttcggagagatggtgaggatggcgaccttgcccgtctgttgcagcacctaagcccaccttctctgtgggctgaagcagacgaagatggaggcggagaggaagcacacatgacagctgatagcagcacaaccacccgtggggaccagccaccacaggaggaccagcaagcagtgggaataccggaccttagcccaagcactcgcagagtactttcaggttgctactggtactgttactagcaacgttatttatccgtaaaacaaatatgaagatgctgactgttaataggagctacttatgctttatgttgagcagcttgacggcggtagtggtggctcttgttacagctctgtcggtaaatggcagcaatacctgcgagaagccgctgcgggcttgggcctccgttgaaatttgtattgttgtggcacaagcggtgctcactctcctcattcattgtaaatttggtggctctctcaacctcgactctctgcaccggcaccccaatgttcccaggttagtctccaacatttttaatgaagagagagtggaacaggcagagagtgagagagagagagaaaagagagaaaagaatacaaagcaatcgtagcacgtaatttaactttattttgtaaaagaggtacattggtgacagcttattcgttcaaccggttattgaacatgttttggtttatatggttcatagtgggttgctcttggacctttgccgatactgattgcgtaaacctctgctttctgcctttaaatcgcatcttttggtatggttctcattcttcattcttttcgttaacagaaagacaaggtgccagtgctatggataacctgtgtagtattgatggcactccatctaaccagcatggggctcgttgtgtgctgttgcttctgtacatgcggcctcatcgtggcactctaccaaatgcggcctcagttctttggggtggtgaagggcgcctcccaaggtcagatcgaacgtaactccaacaaagttaagttcttcaagcacaacggcgatcaaagcaacaaccatgacaacaaagagcgccaaaagtttgaggaatactttggcaacatagaggagcagagcaggatgtgtgccatttgcctttgcgactatgagcacggggaggagattcgcttcttgccctgccgccatcacttccatgcctcctgcgtggatcagtggctcctccaaaacaagtcctgcgccagctgcagaactcccatcgccacatagacaaaaaaaaaaagggcttcccctcgcttttccctttctttgtgtctgtagcaagcaaacacatccctaaaaaaaaagtgccctttgggtaacttattgccaatatggaaatatgctgacgtgggcgaggggttggtgacgtggacgaggaatagctgacgtgtaactaaaggtgctgacgtgtaaccaacggctgacgtggatggggaaaaaaaagacaaaaaagaaagagcagcaggagagagcagaaccgaaattgtaccattttccatcgaaaggacaaaaacaacggtggcatcaatcatgtcgaagaaagtgttggccctttttgatgtggatggaacgctcactaagcccaggggggtaagtagaattttagcgttttcttgctctctctccctctcctaaatgaaagcgttttttcagcaaatcagtccgcagatgttggcagcgctggcccagctaagaaagcgtgtgcctattgccattgttggtggttctgacttgaagaagcaagaagaacagataggccctgatggtacaatgcatgcacagcaacaaaaatgtttattctattcgattctgacatatcttgctgactgcagtgttgaagctttttgactatgtcttctcggagaacggacttgatgccttccaggatggtgaacgcttgggcgaggaggtttgctttgattattcttatttgttgtttgcaactggttttgttggctaacttgcttgtgtaatagagcctgaagagttacctgggtgaggagaaggtgaaggagttcgtaaaatacacccttcgcttgatcgctgatcaagatattcctgtcatgaggtttgtttgatcaagcttctggtttattgctagcgttcatcaattgaacttgcttcctctctctctctctctctctctctctctctctctctctcgctctcgctctcctctccctcctctctcttctctctctggtaatgcaggggcactttcattgaattccgtaagggaatgttcaatgtttctcccattggtcgtaactgctcgcaagaggaacgggaggcctttgagcagtatgacaaggtcttccattctcactgttctcattttctcttgtctcttctgttgctcaccgtaaatataaacaggagcacaacatcagggaaaacatggtgaagcaggtaagttaaactaatttcgtttttctgttttaattcccaaaacgcaacacattccccatgggttccttcgaagttttcacatcccatgacaccaaatacttgggtgtcggggctgtgtgaaaactatttaagcaaccgcttcgctctctccagtcgtatcccacaacccatacatgtcacaaacaactccctctgacactactactaccactgccccacaactaagagaacccaccgaagatctgcactacatcgcccccacggagctggtcgagcgctatggcgtctccctcagtggcctggccaagtggcacaaagagggcaaggtggcggccctccgcacgccaggcgggcaccgccgctacgcggcagagcacgttagacagcttcttggcctccccgccgcagcccccgaaccctcgtcccccaaaaagatcaaggccgtctactgccgagtctccagtcacggacaacgagagcacctcaagcatcagattgagagtctgcgagaagcctacccgaggcacaaggtctacagcgacatcggctcgggcatcaactggaagcgcaaggactttgtcgcccttctggagcaggtccttgctggacgtgtcgaggaggttgtggttgcccacagagaccgcctctgtcggatcgcctacgagctcgtcgagcacgtcttccgtaagtgcggaacccgtctcctggtgcaccgtccggacgacgaggaggacgacgagcccgagccaagcaacgtcctcgccgaggacctcctctccctcgttaccgtctttgtctgtcgacaccacggtcaaagacgatatacagctggccaaggaaacagcacaagcgcgccaaagaggccgcggcggaaggaaaaagaaggctcccaaagagacagaaagtccaagcggcggcggcggcgagggggaggaagatcagacgctgttcaagacgagaaagatacgcctgagacccaccagggaacaggctcggatcctcaatcgctggttcgggggtgcgaggaaggtctggaacaccaccctcagggaactcaaacgagggaacgtggggtggaaattgaaccaaatgcagggggtctgtgtggttaggccaagtattacgcttgattacctcgagggtgtgccctactccatcaaacacgaagcggtgaagcagctccacagcaaccacctggcgtgcgagaccctcaaggatcagggccacattcgacgcttctccgtcaaatacaagcgcaaaaaggaccaccgcaccgagtccatcaagatcctcggacactatatccactggtggaatggcttcgtctaccccgatgagctccacaagagcaagttgtggcaagaggccaacaaaaggaaaccgaagcaaaagcggacgcgaaatcctcacgttaagcacgtcgaccccctcttcgatcccgtggcggacgctttcgagggcttggagctggacgacagagggcgcttgaagaggacctgtaccctgcacaaggataagcggcagcatttttggctttgcgtgccgatccccatccaacagcatgaacgggctcccgaaaaccaagggagcatcgtggccttggatccaggggttcgcaccttcctgtgtggatacagtcctaccgaaggggcggtgagggagtttgggcgcaacgactttggccgcatctggcgtctcgggaaacacgcggacgccttgcagtccaaaatcgaccgctccccaccgagccgccgcaagagaaaactccgtgctctgctgaagctgcgcaagaggatcaccaacatggtcgacgattttcaccgcaagacggccctcttcctgtgccgccgctacgatcatgtcatcatccccacctttggtgtaaagggcatgactgccatccgggggagacggcggaggaagatcggcaaaaagacggccaggatgctctactcctggggccattaccgattccgccagtggctgatgcacaaggcgagggaatggggcaccagggtctacgttcgatcggaggcttggaccagtaagacttgcacctggtgcctccgtgtgacccacgaacagaaacaacacaatcgacgagagcggatcttcgagtgcaaacacagggactgtgggatacgactggatcgcgacataaatggagcgcgcaacatactcctccggagcctctgttgcgcagcgttgcccgatggagccaatgggggcgtgctggtgggaaagtggatgggcgcttctgaagccctctagtccaccccatcaccacatcctcgcaagaactttcattttgtgagtttactcacttgtgtgacttttaatccatcagttgagagaacactttagcggatttggtcttcagttttccattggtggtcagatcagttttgatgtgttcccagaaggatggaacaagacctattgcctgcgttacttgcaagactttgacgaaattcatttctttggcgacaagactatgccggtatgtctctctttctctctctgacgctgttttgtactaaagtgaggcgaacaacagggtggtaacgactatgaaatatttatgcacgagaggacaattgggcacacggtcaccagtccagatgacaccatcaaacttttacaagagcttttctctgctaactaatggccttcctgaaaaaaataaagatgcaaatgtgcaggtttcattgatgaaaacgttcaatttttttcacacacaaaacaaaaaaccaggaaggggactcaaggggagagggaaaaaaggatggcgggcagatgaccacttaatctattttgatcatgccgtaaatctttctaacgaagatggatgtgccgataaaaccgatggcaccttttttgaatgtggttaaggagagagagagtgtgtgagagagtgaagtggaaaaagggggaggagaagaaatgataggcaccacaaagaatagcaaggccgaggcagaacatggccatgtagccaaagtagaaggcagtttggaagaaaccagacatcttggtcttcacgaggaagtagtagatggcatagaggtagacatatccggcagtggaggctgcggaaaggaagctggtccattgccaacgatagtcttcagagttgagcaggaaataagtggatacaatagtcacgcacacagtcactatgatcaggatgacgaagaccaggcacataaagccgtagacatagtagtatttgtagaaggaagtgaagatgaagtacatctctatgaagatgctgccgaaaggaagcacaccgccgagggcaacatgcacccatggttgcaggtaccacttcttttcaggaatttgccgagggacttggttaacacggcatggcgcgttgttgtccccattccaattcttaccaatgacagtgccaaccagcgtcaatgggaaggcaataaatatccagatagaaagcacagccacctattatcataaaagatggaggtttagtttgtatgtggtgtgttgaaatgcggactttgatagaggaagaactgaccatagagccgaaaggaatgtagttgagagactcataagagagggcgatgaagttcaaacccaacgcaatgagaaagcagaggcctgggaaaagagaagcagtgcaaagcatggtcttgatccagtgcttaccattattgcgtgcatagtatccgccgctgctgtatccagccacaaacgaagtgaaggcatagcaaacgatggccgcggtgacaacggtgccacgacgggcataatatgttccaaccgtagccaggaacagcacggacaagacgaggatcaccaattggtgaccggtgcccaccagggaggaaaacaggatgagacgtgaaggggcgcggaacacatcgccgtgaacctgcttccaacccgactcgtcgctaatatcatcgtcttgaccgtcctcgtcatctttgatgccgaagcgggcatagtccttccgcagcgtccgcataagaatgatggagaccaaacccaccaggaatataaccatcatgaaagagttgaagatggaaaaccagtgaatctgccgaaaaaaacaaatattacgacaaagttaatgcgcggttggtacaaaagaaagaggagagatataacacaccttgtgctcgaaaaagcttctgtcgaggtactttctgaagcgatcctcaaaaggagtgtcggtgtgatgccactctacagagtaggtgaactccagctccattccttcctctacagctttaggttgttcggaagtaagattaacctcaatgaccttttggtgagatataaacagtgagtataattccacttgcaattgttcagaagataaaggtagactcaccctgttttcattccaggaaatggaaaagctcttgtgcgtgtagataaaggcttgaggagaggtatcatcatccaaatactctccaaccattccccaaatgggcagatcatcttatgttcattaacaaaggattgttaggtcagcgacaaaacaccaagagaaagaaacgacaagacagagagagagagagagagagagagaggccacattcagaaaaaaatagtgattccggtttgctgttcttcttccgtagcaatgcttcagaagagggagcattttctcatcatagtaacgtgtggcaagcatagcggcatatggaggagggaaggagagagagagagagagagagagagagagagagagagagagaagatttgataagaaaagaacggtacctaaaaagagttggtaccagtaatgctggaagatagcgttcttaaatgacttggcttgttgtttgttgagcgttcttgcacatatctttgctctgggcatatcctctattcattggtttgtacaaaagaagttttagcaacagaaaaagcaagaaagcaagaacacaaagagagaaacaaattcgtggtaattgtttcagaagctaatacatgaatagccacatggtgctccaagttttgctcggagaacatcggcaaaaaatatcatcttgtaacatcaccacattgtcgttctccttaacggggaggccaacaaaaagagagcaagaaagagaaagaagaaaagagtaacaagacaacaaaagaagagaaacgcggcaacaacaaaagaaatagagaggaggttacctctaaaccgaatggtaattctgctttcaataagttcatagccgaggagagcctcgccaaggccctcagttttagactcgactatcttatcgggtggacagaagggaaggctgtagtagctataggtctcttgggggttccggaaagggcccaccttgttcacgtacagcgtcaccttttcttgtttgtcatactgttgaaggaagaaaataagaaacggtgggcaagaaatgaaagacataaaaactcagttggggttggggctcgctcagattggagtggaggtaaggagttgtttttgttcctccgaagatacaaataaaataaacaaataaaatacaaaaacaaaaacaaaaacgcacgctgtgctcatgagcccatttggcaggagagaacgggaagtaggcgatcccaatgaacgaaaagagaactacggcgaccaccaccgtccaaatgagctttgtttctttcatcctcccgctgctgctcctcctcctctgtgcacttcaagaaagaaaggacaaaaaaaagcggtgacaaaaaggaacaaccaccaaaggcaggaaggagaagccgaaggtcttctcttttttgttgtttgttgttttgagccctttttttcttggttttcttttgcctttttttggcgtagagcacgcgaggggtcttggaccatccttttttcggccttaatatgaggggtagtctgatcaatgtttttgtcgacaagccacctctctcttctcctttcattcttcctctctcttctcctttaatactatctcttatcctcttctctccctatctctctggccaagagcaaggtaacacaggtttacggtcatgattaaggcggcgcaaagatcataagatctaaggacaacgaaaaaagaaatcacgaccttagtcttttgggccaatgagcatgtttcccgccaaaacaacccttccttctcccacgtctttgaaggcaaagtggtgggttggggtgtggggtggggtgtacggaatggatgctcatgctgctgccgccaataaacttttggtactcgtcattcgccttgacacttttctgctactcgttttcttttcttttcttctcttcttttcttttcatttctttcttttcaaaagtaaacacacagacacacacatccacgaagctccacgcaccaccgtatttctcattgctacgcttctactacacaaggaggaaaccagcggaaggaggcagaggtggaaaccgaagcggttcagccgcaggcagcggcactgctccgattgaaaaggtagcgttcttttttctctgctcgctcactacattttttgatgatggaaaaaaatttgttaccaaccactcactaatgatttcttttgtttaaaaagaacagcatcacgaacctctgtgcgcctcttccacaacgctgctggaagctggcctgaatggcaagttgcccacagtgcggaaaaaagtttgctacctctcacgggttggccatccacttcggtcgggtccacaaggaagggggtcgcgccactacttctgctacttccactgctactcggaaaagaagagcggaaaacgccccagcggcacctcaggcaagggcacagaagcgtggtaggccgcaggctgcacctgcccagcccttttggaaccagttttccagcgaaatcgggagaagattaatacgcccggaagccttgtgcttggaagaaccctttgcctgtggttcaggatggttcaccgcctgcaagcacattcctaacggagaaaaggtgttggaggaggaggagaagaagaaggagaaggagaagaaggaggaagaggaagaggagaaggagaaggagaaggaagaagaggagaaaaaccagaaaggcttgttaggcctcatcgagggactcgttccgtctcgcccagccgtacagcttaccaaaaaaggcaagaacggagaggagaaaccggtagtggggcgagtggagaagatccgcctttatccgcgctcagaacaaaagaagacgctggccaagtggttcggcacagtacgatggacctacaacaaggccgtggagttccattgtgaacatcaaggaatgcctcgtgatgagatgaaggaacaagtcaggaagaaattcctaaataacagcaatttcaagggagagaacaagagccttgcgtgggtgttggaaactcctcgattcattcggagtgacgctgtcgatgatttcttcaacggcgtgaaaagcagcttggcggcgggcagaggcacgactggattccagatgaagttccgtggtaggaaggacaagagccagtctctcagcatccaagccagggagtggaaccacaacagctctatccgccaactcttcttcggggaggcgcgaatcaaagcgagggacaagaactacaaagttccgtcagaggtgctctatgccgttcgtctggtgaaggacactcgactgggccattactacctctgcgtgcctcagcctttgaagctcatgggcgagagccaagcccgtgagcaccgaaggagagaggcaggcatcatcgccttggatccaggagtgcgcacattcatgaccacctacaacggctgcggggaggtcaccgagtggggcaaagcggacatcaacgagataggcaagctgtgccaccgcctggatcgcatgcagagtaagggcaccaaggtcaaccacagacaacggcgccgtctccgaagggccgctgctcggcttcgccagaggatccgcaacctggtggatgacctccacaagaagctcgtgtcttggttggtcaggaacttctccgtcatccttctgccagagttcaggagccagcagatggtgcggcgaggccaccgccgcattggctcacgaacggccagagccatgctcacctggtcccactatcgcttcaggcagaggctcctcaacaaggccaaggaatttccgtcctgtacggtctgcctctgcgatgaggaatacacctccaagacctgcggcaagtgcggccaagtccaccaccagttggggggaaacaagacctttcggtgccctcaacccgagtgtggctaccaggcggatcgagatgccaacgccgcccgaaacatcttgatccgcttttttacgttgcaagcacttaccacctcctcctcctctgtgagggggcggtaggcggtaaggttgctttggtgccggcaccgttgcttatagcgagtcgtaagacaagccgtgattaggcacgccggaggtgggttattttttgtgtctgttttttgttttccttttactaattttgctttattttcgttgtcccatggatcggcttgatcttggcgccgccttagtcatgatgtattaatacaaggttatcaattcatctcacacgaggtggagtcgttgggttttaggatggcgcaacaaggcagagggtgtggttagcgcctccggcgacggcaataacgcgcacgccttgtttttggaggtcgttcacccgcccgcgttgcagcgagtctgcggaggagccaattgtgcggcctagctttccaaaactagcgtcaccccatgtgtacaatgcccccttttctagcgttgaaaacacaaagcgcagcgttaggatgaccaagggactactccttcccctaaaataagaaagataagaaccgctgatggccattttatgagtctctccgcacgcgatagccactattttcttcgtatgaggctccttggcaaaagtgtgcaagtagcctgttgaatacacaccgccatcgcctgtattaatggagaaaagttgacaaacaacaacgcacacaggaacgaagaaaaggaaattaccatcaagaagcaggctgaatatttttccagctttgcagcttacaaaccgagcatcagcagggagaggtacctcaacagggatgagaacatcttgctctttgtccgatagtcctagctggtgatactcattagagccccatgcatagaccttcccgttcgttgtgacacaaaggctgtgagaatgtccagcagccaccgctgcaacattcctcaaatggggaactggcgttggtacatttctgttgagggtgtcccccaatcccaattggcctcgttcgttcctcccaaatgcgtagaccgttccatccgctgtttcggtttgttgtggttgtgtaggtgcgatgtgagaaagatgaggagagctcattgcagtcacggtagaaaagcaagcaaacccagtaatgctatggtgtggaacgcgccgccggtcaccgccacaactgttttaccgcaaagagcctcaaccagcttgggctgcgaatacgaagtctgttcaccatgtcctaatgggccgtagtagccgcatcccctacacgcaacatgggcgtgagaaagaaggacgctatggggatggtaataacaaacgtaccaggaatagagctcgccatgttctatatcatcagggagtgggcgcaccagtatcatcaaatataagcacatcaaacgtgagccgagcataacaaacggaaaagagagaacaaagaacaaagaacaaaagggagaagcgaaagaaacggacagaggccaaccagagatggcgagcgaaaaagagtcgccgcaggccacctgtttgaagcgaacagtttgtccagctgagtccctaacgatgaccggagtgggcaggtgccggtcctcatcctcctgaccaagtcccaactggccaaaatggcacttaccccaactgtagagcaaaccttcctcctgctgtagcttcgcttcttcttccgtctctttggtcacgttggcagggacagcggtaatagccaagacgtgaccggcaccgcaggccagctgtccaaactcgacgttcggctgtgaagcgaaccctttcacgaagcgactgtgcgactgctcatccccttaaagatgcgcagggtcaggtgatctctactgcagccgaggagggacaaacaaggaccacaaaccttgggctaagcggccatatacccctctcccgacagcgtacaagttgacaggatacttctgttcgggtttaccagctttcgctgcggcttgttgatcaaccttgccgtcgttgtgctgtcgcgacgctagctttgcttgcagcgcacttttgagatccatccctgaggtgcgattttgttgtgtgctgccctcaggatgacatgaacaaaacaaaaactcagggggaggggtcaaccgagagcggttcatggaaaccggcgacggctcggttggccgtcttcagggatccacaaaattaaacccatcagcagcagcccggcaacctagcaatagctcccatcatcagcagggagagtgagccacatgagagggccccctcgcaacgtggtacacgaattgtagtgtacaaacaaaaaaaacaagcaagcaaggaggcgccctcccttggacacaacaacccttcatcggttcatcctcccgagggaggtgaggccttgtccccgtggggcaaaaccactgctccgagtggccgacgcaaaggctgcgagtggccccccccccgaagatgaccctcgagcgccagcgcggcgaggtccccaccctaacccccccccccgccattaagtaaactgcgaaaagcggaggggaggagcgaaaagctaaccgcagcccgaggggaagcgcacgtgaccgccacgctatggaagcagactccgtagagcaagagatattgctgctttgcaccatgcttgccagccaatgggcgctggagggcaaaatgaccaaacagcacccggctgggtgtgtcgtggaggtgctgctggccacacgccaccagtccaactcgcatacggaggcgctgcgacggaccgtcatcatcaccaactttgaggaggacatcatacaacagggaaacataccgaacgaagtcataaaggtgttcagccactacgaagaggagaggggcatgcttgccgttatagagcttgccctggaggtgttgttgtccacagacgtgctcgttcgcttcctcttcaaaaccgatgcagggagcaacccctacgtcaggatgggcgtatttctgcaaaacgtgggcatcgtttttggctttgtggacaaagtaagagcagagttgcagtttaagcatataagcttaggttggcccactgctaagagcgctgcaccccaacttaatggccataccaccacatcctctataccttcctcgtcttgttcagcttctcctcgttcgtcttcttcctctgcttcttcgtcaccttcttctgcttcaacaatgggatatacgcaattgtttagttatgcaggcggatgtggacaggacttgcttcgcaaacttcaacccaactatcaaacacacccagcccccgttgctccattgttgccaacttctgcgagctcacaatccgtgcaagccacttcctacaaccaacatcaaggccaaaacgataaccaacgccaaagcacgcctccccagcaacttatcgggtcagtctcaaacactacgtcagccagtgtcacatctaccactgttgctccgccccttattacttcaggcaacagccagactgatggcgaaaggaataccctgagcaagaatgaacgcaaacggtcgaaaccagagagagattttaacaaagactcccagctatcaaccacacaacctgctccgactgtagataaagggaaagacaaggtgcccaatcctaatagagaagtaagaaaacgactcgaagaacacagggaatatgttggtgatagcgacggaggcagtgatggtgatggcgactttgactcagaaggttcagacgaggtggactcagaggaggaagtcgagcagacagatagtgacacagatgaagatgaggaagttttgcaagagaacaacaagaaaaagctgaaaacgaaagataacagggtcactgaagaggcaaaaccgaagtattggaaagatgtctatcacctcatacctgaatctcaacacaagcatcctctatccataacgatcggtgcaagcttatggatttgcgccctctgttgtgtggagaatgtgaagaagggacacggacatgggtcaatcgaatacttgcctaaa

SEQ ID NO: 267 - DNA, 18936 bp, unidentified
  source 1..18936: mol_type = other DNA; note = Balamuthia sp.
taacttcatgacgaacaacatcctgcagcaaatagccgcacattgccccaacctaaacgagctgtttctgctccccgcctacggcaaggcatccgcacacaaccatctattcgagaaagacggggagggcgggagcgaagcaaccgccgccgctgacacaataacggatgaagggtttgatgcgctggtgaaaggctgtccgcggctccgtcggttgcgtgtgccaggcaaagtatctgcggggctgcaggacatcatcacggaacacctccgtgcaaatggcaatccgtaccttcgactctccgcctaccatagccaccgtgccaagtgggaacctaccagtgtttttgggtgacacgggaataaaaaaagagcaaatattaaaaaaactacccttgttaagaagcaatgaccatgccactgccactagcagctgcagaaggagaaggggcagcctcgcccctgcttctcgagttgaccaactcgcggtgaatttcgggagagatgacacgatggttcttggtcttgattagccgcttcaattgtttcttctgttgcggggtgagatcctccttatatctctgcacaaatacaagaagggcttgatgccaaagaactggcagctccctttcttcctcgaagaagcgcataaagtgccgaacgagtgagtcgatgacgcggtacggcagattgtacttcttgtccaataagatccggatgaagatactgttggcgccagagtagtccatctctgccagtttgagcagtgccaccgccgagtgtagtgcagggatggataccttcaccacaacacttccaatgatggttgcttctctgagtgtgcaatctcctgcctgttggtcaaatatcagtgaccggtccggttatatgtaaagatgcaatgaagccaacaacaacgcacctcgcacagtggcaaaatgatgcccttaaagaaggcggctggtttaaagacactcttcttgagggccatatacaagtgccagttcagttttttgtgttcttggatgtcatccctcactcgtgggtataagatcagtgaatagaatctgtcatcaaacatacagcacaaaaacaaaaacaaaaaaaaatagtaagcattagcggcactgaagaaggaccaagcagaaaggagaaaatagaggagaatgatggatagattcagtgtaactatgacattaaggtatcatcaccggccagcggcgcgattctctaaggctaaagtttcatcacgagaagggaagagaggagagagagagagagagagagagaacgaatgaggaattgcagtaacagtaccgttgtgccatcttggcgttgaggttagaggcaaaatacgggtggccatgcgcacggcaggaggtgaccaatggtccgggtctgttaggtacaggatctcctcccagttggacaacgaagggataatcttaaaagctttgggcatagccccgcttctgtatcttgaaagcacttgcccccacactagtacgcacagaagatcaaccaacaaagtaagaaactcgaaagaggcaaaaggaaagaaatgaaagaggagacaaaccctttgtagacttccaccactttagggtcgagtcgctgttcgatgggagcgtctccctctttttcgtgttccttgattttctccatgatacatgtcggcaagagtgcgtcgcggttgcagcggtcctgtccacatttgcaatgcacgagcgtcctcctccgtcagttcaatgtcctccacgtcatagtcctctccttcctcttcgtcttcggagccccatcctccgtcctccggttcttcctcctcatctttgctgggaaaaattgtcttgttgcgttttgtcttttttttgaaagaaggacaagtgagaaaacctgatcgcttcctctcgcaacactaataaacatacctttcttcgtttcgttcttcggcttgttgctcctgagctaaagctaacgctttttgactcagtgttttatctataaaagtctgaaaaaaaaataagcaaaatcaatcactccacccaagaacacatttcccgttacccttttctctaattgtttggcctttcgctcttgtcgccgggcttttgtgcgttgtgcggcgcgaggctgcacgcgctccgctcgctctttgtcctcctcaatctctgtgcccaacggcttatgccggtggacccccttggccttggactctttgggcatggcgctctgtgtgtgtggggtgtcttcttccgctactctttttttttctttcttttttttttccttttctgaggaaattcttctttttatttattgtcgacgatgtctgcatttatttaatttcttgccgacacccgccgacgggcactacggttgctggcggtccttgcaaaggccaggaattcttgtgttatgtagattatgggtcttcatcggtatcatcaaagtcattccaaacgtcgctagcatcgtaatcatcaccgccatcgtcatcgtcatcgtcatcgtcatcgtcgtcgtagtcgtcgctatcggaagggtacgttgggggagggggaggcacggtccggttagctagagtccgccacacatactgaactaggtcagactcttctgacaacggtcctgctatcgattgttgtgactgcgcagcgccaccaaagtccagaagaatgaccaccgtcttcacttcttcttgtgggcaatgtagatttctccaaaggtctacaaataggagcgccatgccctctttcaacagtacatcggagtcctcccacgggtcctgcagcagttgccattgcggcttggagcaaagcgttcccttctggatggctggcactggactacccacccaactgcgtactgccgattggttggtaaagaccacatcgaagccacgtggaacacctggctttagtactgttacccgtctgttggtaaaacgctcccttacaaacaaaaaggggcagataaagcgaaaagaagaagatgaaaacaagtcagtgaagtccgttggaatcaaacgtaagaataatgtgggttgcaaaacacacctgagtttgctaaggtgccatctgatagtttcctgctcaggatagggtaagccataacaagaattgccgacagcatccgtcggttggacaaggacgcgactgttacgatgctccgagaatggcaactgttgcaaagtaatgacaaaagccttccataactggtcttcagtggacaggctggccaggcactgcgttctgaacactctggccaaggtcttggtcaaatggaagagttgctcgcatacagcaggttgggaacacttcccatgtttgtgccgaatgtacaacaattctcctccactgtggtgttggctgtcagtcaaggcaaagaaaggaagatggagcaaagagaagagaacgacgaagagaagaacgagaatgatgaagcgaaaagaaggcgagacctgtcactagcggaggcccgaagcagaaaggacaacacgatggcgcacagcttttcaaacctaggtcgttgagagggacgaaggcgaccactctccttgccaaacaacttgaacactggaaaccacagcatacgtcgcccatacaggtacttccatggcaatttgccttctgagccaggcgcttttttttttgagtatgaggtgagtaatctttgtgcaacagcgaataaaaagagagcgtgattcaaccagaaagtacgggaggttggtctggcgcgaggtagtggtacacctcgaaaaagtgttgctgctcgttcaaagcttccttcaagtttgctggcagcttctgcaaaaggaaggggcgaggaagggcttcatcttgggcgagctgcctccaccgttgactcacgagagcacatcgcttgagcacaacagcaaccggcaaaaactgaaatatgtgcaacactaactcatccggcagtccctccatctgtcgctcctcctccttctctttaagtggtagcagagcagtaacagggtatatatggggaaaatgtgactaaaactgttttttttttaaaacaaaaaaggttgttgcttgctacagttatccgccgactgttgtcgagaaagtagcgggcttgggtcctcccctccttccgctcgcacacacatcgatggagctacgatggaagccgccaaccgccacaacaacaattttgtggacctggaggaagggcgacggcctgaaggagcttttcggagaggtggtgaggatggcgaccttgcccgtctgttgcagcacctaagcccaccttctttgtgggctgaagcagacgaagaaggaggcggagaggaagcacacatgacagctgatagcagcacaaccacccgtggggaccagccaccacaggaggaccagcaagcagtgggaataccggaccttagcccaagcactcgcagagtactttcaggttgctactggtactgttactagcaacgttatttatccgtaaaacaaatatgaagatgctgactgttaataggagctacttatgctttatgttgagcagcttgacggcggtagtggtggctcttgttacagctctgtcggtaaatggcagcaatacctgcgagaagccgctgcgggcttgggcctccgttgaaatttgtattgttgtggcacaagcggtgctcactctcctcattcattgtaaatttggtggctctctcaacctcgactctctgcaccggcaccccaatgttcccaggttagtctccaacatttttaatgaagagagagtggaacaggcagagagagagagagagagagagagagaaaagagagaaaagaatacaaagcaatcgtagcacgtaatttaactttattttgtaaaagaggtacattggtgacagcttattcgttcaaccggttattgaacatgttttggtttatatggttcatagtgggttgctcttggacctttgccgatactgattgcgtaaacctctgctttctgcctttaaatcgcatcttttggtatggttctcattcttcattcttttcgttaacagaaagacaaggtgccagtgctatggataacctgtgtagtattgatggcactccatctaaccagcatggggctcgttgtgtgctgttgcttctgtacatgcggcctcatcgtggcactctaccaaatgcggcctcagttctttggggtggtgaagggcgcctctcaaggtcagatcgaacgtaactccaacaaagttaagttcttcaagcacaacggcgatcaaagcaaacaaccatgacaacaaagagcgccaaaagtttgaggaatactttggcaacatagaggagcagagcaggatgtgtgccatttgcctttgcgactatgagcacggggaggagattcgcttcttgccctgccgccatcacttccatgcctcctgcgtggatcagtggctcctccaaaacaagtcctgcgccagctgcagaactcccatcgccacatagacaaaaaaaaaagggcttcccctcgcttttccctttctttgtgtctgtagcaagcaaacacatccctaaaaaaaacgtgccctttgggtaacttattgccaatatggaaatatgctgacgtggataaattgctgacgtgggtgagagcttgctgacgtggaccaggaatagctgacgtgtaacttaaggtgctgacgtggatgggaaaaaaaaagacaaaaaagaaagagcagcaggagagagcagaaccgaaattgtaccattttccatcgaaaggacaaaaacaacggtggcatcaatcatgtcgaagaaagtgttggccctttttgatgtggatggaacgctcactaagcccaggggggtaagtagaattttagcgttttcttgctctctctccctctcctaaatgaaagcgttttttcagcaaatcagtccgcagatgttggcagcgctggcccagctaagaaagcgtgtgcctattgccattgttggtggttctgacttgaagaagcaagaagaacagataggccctgatggtacaatgcatgcacagcaacaaaaatgtttattctattcgattctgacatatctttcttgctgactgcagtgttgaagctttttgactatgtcttctcggagaacggacttgatgccttccaggatggtgaacgcttgggcgaggaggtttgctttgattattcttatttgttgtttgctactggttttgttggctaacttgcttgtgtaatagagcctgaagagttacctgggtgaggagaaggtgaaggagttcgtaaaatacacccttcgcttgatcgctgatcaagatattcctgtcatgaggtttgtttgatcaagcttctggtttattgctagcgttcatcaattgaacttgcttcctctctctctctctctctctctctctctctctctctctctctctctctcttgctctcctcctctccctcctctctcttatctctctggtaatgcaggggcactttcattgaattccgtaagggaatgttcaatgtttctcccattggtcgtaactgctcgcaagaggaacgggaggcctttgagcagtatgacaaggtcttccattctcactgttctcattttctcttgtctcttctgttgctcaccgtaaatataaacaggagcacaacatcagggaaaacatggtgaagcaggtaagttaaactaatttcgtttttctgttttaattcccaaaacgcaacacattccccatgggttccttcgaagttttcacatcccatgacaccaaatacttgggtgtcggggctgtgtgaaaactatttaagcaaccgcttcgctctctccagtcgtatcccacaacccatacatgtcacaaacaactccctctgacactactactaccactgccccacaactaagagaacccaccgaagatctgcactacatcgcccccacggagctggtcgagcgctatggcgtctccctcagtggcctggccaagtggcacaaagagggcaaggtggcggccctccgcacgccaggcgggcaccgccgctacgcggcagagcacgttagacagcttcttggcctccccgccgcagccccgaaccctcgtcccccaaaaagatcaaggccgtctactgccgagtctccagtcacggacaacgagagcacctcaagcatcagattgagagtctgcgagaagcctacccgaggcacaaggtctacagcgacatcggctcgggcatcaactggaagcgcaaggactttgtcgcccttctggagcaggtccttgctggacgtgtcgaggaggttgtggttgcccacagagaccgcctctgtcggatcgcctacgagctcgtcgagcacgtcttccgtaagtgcggaacccgtctcctggtgcaccgtccggacgacgaggaggacgacgagcccgagccaagcaacgtcctcgccgaggacctcctctccctcgttaccgtctttgtctgtcgacaccacggtcaaagacgatatacagctggccaaggaaacagcacaagcgcgccaaagaggccgcggcggaaggaaaaagaaggctcccaaagagacagaaagtccaagcggcggcggcggcgaggggaggaagatcagacgctgttcaagacgagaaagatacgcctgagacccaccagggaacaggctcggatcctcaatcgctggttcgggggtgcgaggaaggtctggaacaccaccctcagggaactcaaacgagggaacgtggggtggaaattgaaccaaatgcagggggtctgtgtggttaggccaagtattacgcttgattacctcgagggtgtgccctactccatcaaacacgaagcggtgaagcagctccacagcaaccacctggcgtgcgagaccctcaaggatcagggccacattcgacgcttctccgtcaaatacaagcgcaaaaaggaccaccgcaccgagtccatcaagatcctcggacactatatccactggtggaatggcttcgtctaccccgatgagctccacaagagcaagttgtggcaagaggccaacaaaaggaaaccgaagcaaaagcggacgcgaaatcctcacgttaagcacgtcgaccccctcttcgatcccgtggcggacgctttcgagggcttggagctggacgacagagggcgcttgaagaggacctgtaccctgcacaaggataagcggcagcatttttggctttgcgtgccgatccccatccaacagcatgaacgggctcccgaaaaccaagggagcatcgtggccttggatccaggggttcgcaccttcctgtgtggatacagtcctaccgaaggggcggtgagggagtttgggcgcaacgactttggccgcatctggcgtctcgggaaacacgcggacgccttgcagtccaaaatcgaccgctccccaccgagccgccgcaagagaaaactccgtgctctgctgaagctgcgcaagaggatcaccaacatggtcgacgattttcaccgcaagacggccctcttcctgtgccgccgctacgatcatgtcatcatccccacctttggtgtaaagggcatgactgccatccgggggagacggcggaggaagatcggcaaaaagacggccaggatgctctactcctggggccattaccgattccgccagtggctgatgcacaaggcgagggaatggggcaccagggtctacgttcgatcggaggcttggaccagtaagacttgcacctggtgcctccgtgtgacccacgaacagaaacaacacaatcgacgagagcggatcttcgagtgcaaacacagggactgtgggatacgactggatcgcgacataaatggagcgcgcaacatactcctccggagcctctgttgcgcagcgttgcccgatggagccaatgggggcgtgctggtgggaaagtggatgggcgcttctgaagccctctagtccaccccatcaccacatcctcgcaagaactttcattttgtgagtttactcacttgtgtgacttttaatccatcagttgagagaacactttagcggatttggtcttcagttttccattggtggtcagatcagttttgatgtgttcccagaaggatggaacaagacctattgcctgcgttacttgcaagactttgacgaaattcatttctttggcgacaagactatgccggtatgtctctctttctctctctgacgctgttttgtactaaagtgaggcgaacaacaggggggtaacgactatgaaatatttatgcacgagaggacaattgggcacacggtcaccagtccagatgacaccatcaaacttttacaagagcttttctctgctaactaatggccttcctgaaaaaaataaagatgcaaatgtgcaggtttcattgatgaaaacgttcaatttttttcacaaacaaaacaaaaaccaggaaggggactcaaggggagaggaaaaaaaggatggcgtaggcagatgaccacttaatctattttgatcatgccgtaaatctttctaacgaagatggatgtgccgataaaaccgatagcaccttttttgaatgtggttaaggagagagagagtgtgtgagagagtgaagtggaaaaagggggaggagaagaaatgataggtaccacaaagaatagcaaggccgaggcagaacatggccatgtagccaaagtagaaggcagtttggaagaaaccagacatcttggtcttcacgaggaagtagtagatggcatagaggtagacatatccggcagtggaggctgcggaaaggaagctggtccattgccaacgatagtcttcagagttgagcaggaaataagtggatacaatagtcacgcacacagtcactatgatcaggatgacgaagaccaggcacataaagccgtagacatagtagtatttgtagaaggaagtgaagatgaagtacatctctatgaagatgctgccgaaaggaagcacaccgccgagggcaacatgcacccatggttgcaggtaccacttcttttcaggaatttgccgagggacttggttaacacggcatggcgcgttgttgtccccattccaattcttaccaatgacagtgccaaccagcgtcaatgggaaggcaataaatatccagatagaaagcacagccacctattatcataaaagatggaggtttagtttgtatgtggtgtgttgaaatgcggactttgatagaggaagaactgaccatagagccgaaaggaatgtagttgagagactcataagagagggcgatgaagttcaaacccaacgcaatgagaaagcagaggcctgggaaaagagaagcagtgcaaagcatggtcttgatccagtgcttaccattattgcgtgcatagtatccgccgctgctgtatccagccacaaacgaagtgaaggcatagcaaacgatggccgcggtgacaacggtgccacgacgggcataatatgttccaaccgtagccaggaacagcacggacaagacgaggatcaccaattggtgaccggtgcccaccagggaggaaaacaggatgagacgtgaaggggcgcggaacacatcgccgtgaacctgcttccaacccgactcgtcgcttatatcatcgtcttgaccgtcctcgtcatctttgatgccgaagcgggcatagtccttccgcagcgtccgcataagaatgatggagaccaaacccaccaggaatataaccatcatgaaagagttgaagatggaaaaccagtgaatctgccgaaaaaaaacaaatattacgacaaagttaatgcgcggttggtacaaaagaaagaggagagatataacacaccttgtgctcgaaaaagcttctgtcgaggtacttcctgaagcgatcctcaaaaggagtgtcggtgtgatgccactctacagagtaggtgaactccagctccattccttcctctacagctttaggttgttcggaagtaagattaacctcaatgaccttttggtgagatataaacagtgagtataattccacttgcaattgttcagaagataaaaggtagactcaccctgttttcattccaggaaatggaaaagctcttgtgcgtgtagataaaggcttgaggagaggtatcatcatccaaatactctccaaccattccccaaatgggcagatcatcttatgttcattaacaaaggattgttaggtcagcgacaaaacaccaagagaaagaaacgacaagacagagagagagagaagaggccacattcagaaaaaaatagtgattccggtttgctgttcttcttccgtagcaatgcttcagaagagggagcattttctcatcatagtaacgtgtggcaagcatagcggcatatggaggaggggaaggagagagagagagagagagagagagaggagagagagagaagatttgataagaaaagacggtacctaaaaagagttggtaccagtaatgctggaagatagcgttcttaaatgacttggcttgttgtttgttgagcgttcttgcacatatctttgctctgggcatatcctctattcattggtttgtacaaaagaagttttagcaacagaaaagcaagaaagcaagaacacaagagagaaacaaattcgtggtaattgtttcagaagctaatacatgaatagccacatggtgctccaagttttgctcggagaacatcggcaaaaatatcatcttgtaacatcaccacattgtcgttctccttaacggggaggccaacaaaaagagagcaagaaagagaaagaagaaaagagtaacaagacaacaaaagaagagaaacacggcaacaacaaaagaaatagagaggaggttacctctaaaccgaatggtaattctgctttcaataagttcatagccgaggagagcctcgccaaggccctcagttttagactcgactatcttatcgggtggacagaagggaaggctgtagtagctataggtctcttggggttccggaaagggcccaccttgttcacgtacagcgtcaccttttcttgtttgtcatactgttgaaggaagaaaataagaaacggtgggcaagagatgaaagacataaaaactcagttggggttggggctcgctcagattggagtggaggtaaggagttgtttttgttcctccgaagacacaaataaaataaacaataaaatacaaaacaaaaacaaaaacgcacgctgtgcctcatgagcccatttggcaggagagaacgggaagtaggcgatcccaatgaacgaaaagagaactacggcgaccaccaccgtccaaatgagcttttgtttctttcatcctcccgctgctgctcctcctcctctgtgcactttaagaaagaaaggacaaaaaaaaagcggtgacaaaaaggaacaaccaccaaaggcaggaaggagaagccgaaggtcttctcttttttgttgtttgttgttttgtgtccttttttcttggttttcttttgcctttttttggcgtagagcacgcgaggggtcttggcccatccttttttcggccgtaatttgaggggtagtctgatcagtgtttttgtcgacaagccacctctctcttctcctttcattcttcctctctcttctcctttaatactatctcttatcctcttctctccctatctctctggccaagagcaaggtaacacaggtttacggtcatgatgtacacatttaggatggcgcaacaaggcagagggtgtggttagcgcctccggcgacggcaataacgcgcacgccttgtttttggaggtcgttcaccggcccgcgttgcagcgagtctgcggaggagccaattgtgcggcctagctttccaaaactagcgtcaccccatgtgtacaatgcccccttttctagcgttgaaaacacaaagcgcagcgttaggatgaccaagggactactccttcccctaaaataagaaagataagaaccgctgatggccattttatgagtctctccgcacgcgatagccactattttcttcgtatgaggctccttggcaaaagtgtgcaagtagcctgttgaatacacaccgccatcgcctgtattaatggagaaaagttgacaaacaacaacgcacacaggaacgaagaaaaggaaattaccatcaagaagcaggctgaatatttttccagctttgcagcttacaaaccgagcatcagcagggagaggtacctcaacagggatgagaacatcttgctctttgtccgatagtcctagctggtgatactcattagagccccatgcatagaccttcccgttcgttgtgacacaaaggctgtgagaaatgtccagcagccaccgctgcaacattcctcaaatggggaactggcgttggtacatttctgttgagggtgtcccccaatcccaattggcctcgttcgttcctcccaaatgcgtagaccgttccatccgctgtttcggtttgttgtggttgtgtaggtgcgatgtgagaagatgaggagagctcattgcagtcacggtagaaaagcaagcaaacccagtaatgctatggtgtggaacgcgccgcggtcaccgccacaactgttttaccgcaaagagcctcaaccagctttgggctgcgaatacgaagtctgttcaccatgtcctaatgggccgtagtagccgcatcccctacacgcaacatgggcgtgagaaagaaggacgctatggggatggtaataacaaacgtaccaggaatagagctcgccatgttctatatcatcagggagtggagcaccagtatcatcaaatataagcacatcaaacgtgagccgagcataacaaacggaaaagagagaacaaagaacaaagaacaaaagggagaagcgaaagaaacggacagaggccaaccagagatggcggagcgaaaaagagtcgccgcaggccacctgtttgaagcgaacagtttgtcagctgagtccctaacgatgaccggagtgggcaggtgccggtcctcatcctcctgaccaagtcccaactggccaaaatggcacttaccccaactgtagagcaaaccctcctcctgctgtagcttcgcttctgctccttcttccgtctctttggtcaagttggcagggacagcggtaatagccaagacgtgaccggcaccgcaggccagctgtccaaactcgacgttcggctgtgaagcgaaccctttcacgaaagcgactgtgcgactgctcatccccttaaagatgcgcagggtcaggtgatctctactgcagccgaggagggacaaacaaggaccacaaaccttgggctaagcggccatatacccctctcccgacagcgtacaagttgacaggatacttctgttcgggtttaccagctttcgctgcggcttgttgatcaaccttgcgtcgttgtgctgtcgcgacgctagctttgcttgcagcgcacttttgagatccatccctgaggtgcgattttgttgtgtgctgcgcctctgcggacagtccaggatgacgtgaacaaaacaaaactcagggggaggggtaaaccgagagcggttcatggaaaccggcggacggctcggttggccgtcttcagggatccacaaaattaaacccatcagcagcagcccggcaacctagcaatagctcccatcatcagcagggagagtgagccacatgagagggccccctcgcaacgtggtacacgaattgtagtgtacaaacaaaaaaacaagcaagcaaggaggcgccctcccttggacacaacaaccttcatcggttcatgagggaggtgaggccttgtccccgtggggcaaaaccactgctccgagtggcgacgcaaaggctgcgagtggccccccccgaagatgacctcgagcgccagcgcggcgaggtcccaccctaacccccccccccgccattaagtaaactgcgaaaagcggaggggaggagcgaaaagctaaccgcagcccgaggggaagccgcacgcgaccgccaacgctatggaagcagactccgtagagcaagagatattgctgctttgcacatgctgtgccagccaatgggcgctggagggcaaaaatgaccaagcagcacccggccgggtgtgtcgttgaggtgctgctggccacacgccaccagtccgactcgcatacggaggcgctgcgacggaccgtcatcatcaccaactttgaggaggacatcatacaacagggaaacataccgaacgaagtcataaaggtgttcagccactacgaagaggagaggggcatgcttgccgttatagagcttgccctggaggtgttgttgtccacagactgtgctcgttcgcttcctcttcaaaaccgatgcggggagcaaccctacgtcaggatgggcgtatttctgcaaacgtgggcatcgtttttggctttgtggacaaagtaagagcagagttgcagtttaagcatataagcttatgttggcccactgttaagagcgctactccccaacttaatggccttaccaccacatcctctataccttcctcttcttgttcagcttctcctcattcgtcttcttcctctgcttcttcgtcaccttcttctgcttcacacaatgggatatacgcaattgtttagttatgcaggcggatgtggacaggacttgcttcgcaaacttcaacccaactatcaaaacacacccagcccccgttgctccattgttgccaacttctgcgagcttacaatccgtgcaagctacttcctacaaccaacaccaaggcaaaaacgataaccaacgccaaagcatgcctccccagcaacttatcgggtcggcttcaaacactacgtcagccagtgtcacatctaccgctgttgctccgccccttattacttcaggcaacagccagactgatggcgaaaggaataccctgagcaagaatgaacgcaaacggtcgaaaccagagagagattttaacaaagactcccagctatcaaccacacaacctgctccgactatagataaagggaaagacaaggtgcccaatcctaatagagaagtaagaaaacgactcgaagaacacagggaatatgttggtgatagcgacggaggcagtgatgatgatggcgactttgactcagaaggttcggacgaggtggattcagaggaggaagtcgagcagacagatagtgacacagatgaagatgaggacgttttgcaagagaacaacaagaaaaaagctgaaaaacgaaagataacagggtcactgaagaggcaaaaccgaagtattggaaagatgtctaccacctcatacctgaatctcaacacaagcatcctctatccataacgatcggtgcaagcttatggatttgcgccctctgttgtgtggagaatgtgaagaagggacacggacatggcccaatcgattacctgcctaaatcagccaggttttcaacccatgtacgcaacctctcatgtgaaagagctcaccgctctgcggagtgttacctctggcaccaaagaaagggtgctctggcgctgctccgaagggcaagaagcctacatggataacgctgactttcacaaggcccattccataagttggaaagaactaagccaggctccttccgtggacatggttctgccctcttgtaaatactttttttcgaaacggtacttcatctcgcgttattcgttctcttcttcttctctctcgcccctgccaactgatgataacacaatgcttggacaggacccaggggagaaaagatagtcccatcaaaacgcggcaaaaacccttcccttgtcgtacgatccaagatagttccacccctccgcgccctcctgcctcctccgcgccgccatcctgaggcaaacgttcgcccaaaacgtatgatggtacctcccaacattctcttttgcccaccacacccttttttcacagcaaataaaaattcaagcaaagcaaagcaaagcaaaaaaaaaagagagagagagagaagagaggagagaggagagaaggagaagagaaggagaagagagaagagagaagagaggagagaagagaagagagaagagagtagagagtggagaaaagagagagcgaggagagaagagagaagagagagagaagggatgaagaaaggagataatggctcgtaacgaagaaaagaactactcggtgctgaatcgcctcctgttgcaaaaggaaaaggaaaagcgagaggagcgaaacccgaagcgtcctcctcttgtatgcatctcattcacacacgcacggttcagccccaaccaccttttttcatgcgtgcgtgtgcagtgctcatcgattaacgcaacccaataacagcacacgctgcgaacagcgagcgaggtgaggcaatggattccttccatcaaggcggagatggaccactgcttgcaccacctctctggcgtgcgcaactactcggacagcaagatcaaagaattccaggagcggttggccctcctccagcgagagcacaagaagtgggtgcggcgggtgctggagctggaccctgctgccgcggagggtggtttcacgccaggcgaccctcacccttacctctccaaacgcaagagaagccaaccccaatcgcacaatactcaacaaaaggaggaagcagtggagcaggaacaacagcgtgagaggacggttgtgtcgtcacaaaagaaagcacgtacaagcgctgccgctctcacaacaacagctacggcaagagcgaccagcatgagcagcaacagcaccggtggaatagcaacgccgctgttggaattggaggaagagaaggaagagcggcaaaaggaagaagctcgccgccacctggaggcctgcttggcccttgacgactctcaaaaccagcccttagctttagtaaccaccaaggcaaacttgccgcaactgccacctccgcacaacaacccgcagaagcagaagaaagaggagaggaagaggaaaccggcctgtcactgctctccgcctatgatgactgatgtagataacatctagcaagtgggcggggccgtggtggcgctataataatggcattattatagcgccaccgcgttgagggcattacagggtgtcttgtatgtttgtgttgtattctctgttgtttgaaagaagaaaagaaggagagagcactactaacagccgtagtggtctcacttggaaggatgatgcctaaacttggtgtccttgctcttcgtctcaatggagacgagggtgccgctcttgggcctgtccttgccgtgcgcccagtcagcgaggagggaggccacaacgggcaagggcgtccagtcgtcaaagttggcggtgggcatggcctgccggttggtcggtgtgtcgaggcagatggggaggatgcccaacacgctgcagcccctgggaagacctccactggggtccaccaagctggcgatcaggtggtgggtggccgctttggtcatgccgtaggccagcatgccaggcgtgggggagagggcggcctcagcgccagccagcacgagcatgctctcctcgccttccttcaaaaagttggcggcaaggtgggcggccgccacggaggactgcaggttgaagctccacattttgtccacctcgtcaaagatggaggggcttttcacgttacctcccacccaacctcctgccacacatatcacggcgctgagctctatttcgttggtgggtgggtgggtggtggtgggtgggtgggtgggtggtggtggtttgcggttgcgtgttggaaaacgagatgtaatcagtctcacttctactactataaggacgcacagacgcaacagcactgaaactgaaacgaaggacaggaaaggaaagggttgccgcaccagcgttaagctttttgagttcctccacaacacgagcggtgttctctttgttggaggagtcgggggagagcacgacgttgtggtcagcttctgggttggtcctaaagtcagccacgaacacggtgcag

SEQ ID NO: 268 - DNA, 22304 bp, unidentified
  misc_feature 1..22304: note = Fanzor polypeptide
  source 1..22304: mol_type = other DNA
cccctgtagcatgtgtgttcatacatgtactatctacggagacgtttccgttactagcacgtcacatgatctcatactcgtacgagtagtacgtattgcaccgctatatagccgtagtacgtgataccaacacattagcccaccctgaatagtcgtagatgcagatcacacgacgatcggaggggatgatcgtttcatcccagaaatcgggaagggaggtcgaagatgcggctattcgaaacacaggtaaaagaggctatacaactaccccacacctcgcaatgaggctacgacgcctcacacgttaattaacgcgccataccggaagaaattcctgcgaaaagccaacggtaagcgggctacggtgaagacaaaagccaagtgaacaaaccgaagcacgaaggtatatcgaaacaaaacaaagcagaaaaaaaaacgaagttaacagccggatgctgaatgtaacaggcaaaagagaaaataatgcatgcggctatgcagagaagcaaagccttgaacttggacttgggcttgaaatatgactgcatagcgtggggccacgggtccggctggaggaaagacaacagacgccggccggtgggaaacacgaaaaagaaaaacgcgaaggctgtaagcgcaacgaaagtgagaagtgtgctgcaaagcaagaccatgggggggtcggtaactgattacgcgtgcactgacaacaacgtggggccgattacgaaagagggacgtagaaaagtaggtggcaaacccactacaagcgcatgctgagacgcagcgaggtgatacgttcgaaaacgagcgaggtcaagaggaaatgcctcgtataccgcgagatgaaaagaagaaacgaacaggccctaaagtatactgcaggggttgaagctacgcgtacggcgcagggaggagtactcgcggttgaggcaggtatgtcgttgtcacaaaggccaagaaaaaccaaacgctcggtacgatgcaacaaaaagcagggaatatgaaacccgtgttaaaacagacactcagaacaaaacaaaaagagggcgtgaagatataagcccaagtaaatatacggtagtaccacggtccggcggccttcatggagaagaagctgcgggaacggcggtgtaagttgaaaacaaaacagcccaagtaaatatacggtagtaccacggtccggcggccttcatggagaagaagctgcgggaacggcggtgtaagttgaaaacaaaacgcaaaacaaagaaaaatgattccgaaagggcaacacccccgaactatgctagtgggttaaagagattgggtcacaagaaaggaccacaaagcttcccaaggttgcaatgctacaaatcggcgaccctcgcgagagtatgcaaacggggtcgggggcgacatgattggagaaagaaagcaaaatagcacgaaaacaagtgaaaataacaaagggaccaacgcccaaacgggtagggtggatcgtaaatgatccgagtctggcgggaaggcttcttggcctgggtttttgttagtggatgagctgcggcaagttccacactacccggagagtttactcttcgggtggctatccccaccgcaccgggccccttcgggggtcaggtcgggtcaacatgctcaagttaccgaaggtcgtagacagcaagggctgatacttccgagggagcatggagtgaattgacacacgacacgaagtgcacgaagtgcacgaagtgagacgtggaagtgtggagggcgtaagctttattttgacccatccgccggaggataaaaaataaacaaaataaaaaaaaataacaaagaacgaataaaaaaaacacaattacaccaacaatattatcgaaataatgttgttgctgaggttcggcggctctcgtgggaagaggcaagcggaacagtggtaggagtacataatacacctttacgtatgaaagtacaataccatggcggttcagcggccctcgcgagaggaggcaggccgaaccgatagtggttggttgaagtagaacactaatacgcccgaaagtacaataccatggcagttcagtggccctcgcgagaggaggcaggccgaaccgatagttgtaggttgaagtagcacgcaaatacgcccgaaagtacaataccatggcagttcagcggccctcgcgagaggaggcaggccgaaccgatagtggtagactggaaaatgaaacgcgaacccgaatcccttgtactaaacggaacaaaagaaaacttatgtcagaaatcggcaacttgagggaaacagaaattaaaacaaaacgatgcccaagcataatcagataactaatcatgggggggcaggagagacattcggagcgccacgggacgcgttcgaactgcgtaataccccgcgagcgacgctcccagtcttgtagcgttgcaaacaccacgatccgtggttggcgacgctggatgttgtgtagctagccggccgaaggttgatcttgatcggcccagggtcgtcgaggaaccggatgatgtaggtgttgtccgaagaggggcccgcgggcgttcgtgaaccggggtcctgggtggtgcggtgagcgatcttgcccagccaccacaggccgtcgcgggccttgtaccacaggtgtgcgcctcggggaaggatggtggagctgaaggtgcgaagccagacgtcacggggaacgagggtgtagccgggggcaaggaaaatctggccttgtgaccgcgacagttcccgctgcgccgaaccgatgcgcatctgtcggtagaggcggttctcttgtcggtgttgtgttggggtgccggaccagtagaggaggatgtagcgtcttgagtgttgaaggtctagttcccgctcccaggaaaggctgagcagtccgacccagtgggtctcgtacaggaccgaaataatcccaccacggccgcgcactagttccggcggtggcgagacatcgtcgagggtgacgtggaaagggggggacttggtggagaaggagctgagaacatacttggtgaggtcggacggtaggtacttgggcatgtcgcaggtgtcgtccgggttccgacagggcttacagcgctcgacaaccgacaaccgatcatactaaccgtgcgcgaaactcccaagtggcaggaggtggtggcgtggcaggtgtgtaatacccaagggcgcatcaaaatcggaacgtaaatgcgcgggggtggggtggtggaagaagtggcgctggttccggggtcggggggcttaggggctcgtcggaccaagatgacggtgtcgtcgtctgtacggtggagttggctttttgcggcgagggaaagcacggctgagaggtgcgggcgcttagacgatggaaataaatccaggaagtcggtcggcgggggagcaggggggtcctaggaaagttagtggagtgtagcggagcagaggggctcagcccgttgttcacgcgcccagtccgagtgcgtgaagtgctggaagcaggaaagaaggtgggggtcgtcatcaggctcgacgacgggttccagcaggtggggcgggagccgaggagttgaacgtcgtggatgaagctctgttggggtcgatcttgaacgagcgccgtcgggctcgacgtcgggctcgacgtcgggctccggggagtgaggcgccggtggtggagaggacgaagttgaaggcggtcttgaaagggcgccgtcgggctcgacgtcgggctcgacgtcgggctccggggagtgaggcgccagtggtagagaggacgatgtcgaaggcgatcttggaagggcgccgtcgggcgcaaagtcgggctcgacgtctggctccggagagtgaggcgccagtggtgaagaggacgatgtcgaaggtgatcttggaccagcgggcgcctgcagtggggcctgcgccgactggagggaggagcggccagaggcgtggttggtggtgaaggcctcggcggtcccttatccgggggcgcagatgcgcggtggcgggcagatgtcgatcttgaaggccgtgcgctgaaaccatagtcggctgttgcacggggggttccagcggcggcggcggcgcgatggcgggtccgagaagagatcagatccggaggagctggagatgtggcgccaatggtggatgtcggggagacgatgggcggcccgaaagccaagccgggaggagcgccggcgtccacggcagaagtcgcggaaatgccgagcgcggcggcggcggtgtagtgggacgaaataggcccgacgaaggtggttggggtggagaaggggccgaaggagtccatgtacggtccaaggcggcggaaatcgccgaagtcgttgtcggtgaaggggattggtcggatgaccgggatgtggaaggagggagggggtactagcccacccaagccgatgcccggcatcgagcgcccgcaaggcgtaaagccgcagaaatgaatgaggaagatgcccacggtgtcagggctcgaaaaaaaagaacaaaacaaaaaaaacaacctactcggcagcgttttttaaacgagtagctctcgtgctttgctatgattttatccagcttcaaaagctgggtatatcaggcggacgcaagaccgcaggcagagcgagagagcgactgctttgaacatgcagtgctgctgcgcgttggcgaagctgatagctaatacaaagctaccaatgttcttaagctgctgatttgatgttgtgaggtaaaaatacaagggtgactctgatctcgcaagaaaggtacttatgatgctcacaaggtgagcagtccgttggagaggaggacaggacgatggcttcgaagaaggtgggccaggctcagcgttgactcagtcctgccgacgacgccaaatgtaagagaataggcaatccaataaggccaggacacaggaatgtcgacgcaaaccagaggcacgcttcttcttgataaagttcttctcgctgctcatctcatggacctcaattgcgcacaagaacagagtgcgatgggagggggaagtccatacctagactgtcccctgaagcatgtatcttcatacatgtactatctacggagacgtttccgttactagcacgacacatgatctcatactcgtagtacgtatccgcgtgtattctcatactgctattctctaaggagacgttcccgttactagcacgccatgtgactcataccggtacgtattgcaccgctttatagccgtagtacgtgataccatcacagtacacccattttctttggcattatgttgctgataagaatatgaacaagccacaaagtggtaccataacctttctttgatcttagcttagttccactggaggcggtggttggactccaccagcttacagttctagtggtggtggctacggcggcggcggtaggtggggtgcggcggccgcgggtacctcttcgggtactcgtgcctcggctaccggcgctactggtggcggcagtaggcggggggcggcgcccgcgggtacgtcttctcgtgcctcggctaccggcactagtggtgttgatgccgaattttcgggtactcgttcctcggctaccggtgctactgccgcgggtacctcttcgggtgctcgttcctcggctaccggctacatccatggcgacagttgggccaaggttaggtggaaggatgaacttaacgattaccggtccccgccgaagttcaaagcggacggtggagtcgaagaatccaaaggaggcttcactgaacctgatggcggcggtaggtggggtgcggcgcccgcgggtaccacttcgggtactcgttcctcggctaccggcgccactggtggcggtagcaggcctggtggctcctttgacgatgatgccaacgaatccaaagaggaaggtaaactccaagagtctaaagagggagatggtggttggacggcgggcacgtattttgatcaccgtgccccaagtgatcggcctagtggcggtggttggagtttgggcccatctggtccgcctccaccagcttacagcttacagttctagtggtggtggtggtggtggtgactacggtggtggctacggtggtggtggtggtggctacggtggtggtggtggtagctacggcggtggtggtggtggtggtggctacggcggtggtggtggtggtagctacggcggcggtggtggtggtggtggtggaggctacggcggcggcggcagctacggtggtggtggcggcgctacagcggtagtgggggacagtcgcctaataaaaaactcacagttctcacagaactctaaattctctaagttacagaaacactagcatcctttacgagcttctcgggaaatatatcgcggtgagatagggtaggtccatttcaattcgggtagccccgttactctagaccggccgtcatcgccctgaaactgtatcaactgtgcttcctatgcagagtagtttcgaaaagccaaacaaaaaactactcaggggtaggccccaaagccaaagtggcgcattcattcttagactctctccttccaagtgagagtcagacgattctcgacacaactcttcatcaagatgttgcgagctccgttctcgtccctgtccatcaccaccgggcacgaaggacaactgaagaccttggacctccccaggttgtgatggagatgtccgcagcacgaacaggtcttggatgtgaactcctccgtgacgatgacaagtttcacaccttcgcggagagccgtggtttttagcaactccttgaacttgtagtgtgaccatgtcatcatcccccgggccgtgccgttaccgatgttccgcttcgccctgttgaccatgtctttcgtgttgaactccggaaggaagatgacgtcgtagttcttgcacaggtgcttcaccgtcttgttccttacgtccgtcaccaggtctttcactctcttgatggctcggtgccaggctttgcgtaagcgatacctctttttgctcttgacggacttgtcgaaagccttggactgtaacaaatccatgtggtgacagagacggtagattctccccacgtccccgggagcgaactccgtgacgtttcccttggaatccactccggtgttgaatgtcctcaccccgggatcgagcgcgactaccttcaagtcctcgtggttctcgacgcggggaggggtaacgtcggactgcttcgtgacgcacgcgtagaagttcttggaccgatccatctggatgacgatctctcccgcgaaggaggtccagtcctcgaaacccttcagcttggattttccacaggtcttcttgaacatgtacccgttcttcacacacgctcccggaatcttgatgacctggacgtccctcctggaccgaaagctcatgtcgaaggtgtggctcggattcttctctcttttctttaggtttgtcacgaagccgttgtacagatccaccatggcggagtcccggatctcgaagggggtctccaacacccacgacgtcttgcactctctcttgaatgtcttcttgggtatcgaccagttgcctctcttgagacctcgcttcttcttcttcttccccgtccttctcttgggatccccgtgattccacccgccgacgaccttcgacctaaagtcagtcttgttgattcggcagttacccttcttgtagtagtcaaggcaccggttgtacgtccacctcgccgtccccatccacttcctcagccgctccttccactccggcgacgggtccagcttgatctttctcgccctcacgtcttttacgcttttttgtgttcctgcctcccctcctcccattgtttctcgcgacgaagaaattgcagacggccaggagatcttcagagagttcttgctcggacccctcagtttctgacttgtggtggaccacgatcttcgtgccgtggaattcacagagctgttggacgagttcaaatccgtaccgacagagcctatccctgtaggacacgacaatctcctggacattgccagcgtggacgcgtcccagaagggcctggaagttcttgcgtctgtagttgagtccggatccgatatccttgagagtcttgtggtccgggtaacttccctggaggtccttgacctgtctgacaaggtcggtggcctgcttggatgagctgactctggcgtagatatagctctcattgtgttttgattctgcggattcgagagagggtccgagccgttcatcgacgtctccgacgtggtagattcgttttcccgagcgtcctccatctccaagtctcctgatcctgatcttcccggagtctccccaggatgccaatgtggctctggagatgtcataccttttcttggtcttggaagccggctggaacatccagctcgtaataaacctattcttgcactcttgtttgtatacaatacataaatattttatttcgtggtggtcgagcgcgttgtgaccgcgtagggctgactcctgtgataaagtgagcttcacactttggtcgtgacatggtccgaaccagtactttcgggatcgttcgatttttatggttcgaatcagagttctggatgttctaaaagttttacatatttttaaaaaccacaatgttccaaaaatggtgttacgataaaatctcatcgggttcaacgttagctggtgtatttccagacgaagaacctgtgtgaatgtcaagttccgtgaaaactggaagaaagcagcaagcggtcgtgagacccatggcacgcattattgtaaacttaggcaccctgacaacttaataaatgtttatatatacaaacatcgaaaaatgacctacttgactcacaacgaaatctatgatgcctttaaaaagtgcgatgcgcaatggatacaaaggcgccgcaaaatagacacatcttctcttttctacactctcacaaagtgttgtattcaggagagaggtattggtcacgttctgaggatggatagggaacactactcgccacaggcgattcactcggccaggaagaaattaccccagggggcgttcaaagaggttaatcgatatatacacagggggccacatgaaccacgtgtgtttgccgtagatggttcgaaagtccatgtacatccttcattcaccaacgctggatacaagactcgaacgaatgataagcccgtcccgcgtcccgcgaaaaggccgctagttatgctatcttcaatggtagatgtaaaaagtaaagcatgtgtggactttgaaattacaaaacatttcaatgaaagaaaggcagccgtatcaatgctccgaagtgtgcgaagaggtgacacattggtttttgaccgaggctattattcaaaagatttactacgcagtgttgatgatgcacatgcattcggggtttggagactcaagagaaacgcattcaagggtacccggtccttcttcaactcgtgtaaaacagaagcaatatgccttattcttggagtcaaatcacgccttttgaaatactttatcaacggaaagacgtacgtttgcctcacaaacgacccctcgttaacacgtgaagaggtcaagtccgtgtacgcgtcgaggtggagggtggaggagagcttcaagcgactaaaatccaatcttaagcttgagaaagcccacgcgaggaccccggccctgtatatacaggaagtagaagcgagagttttactcgacacgatcacactgaggttacagaagaagattaaggaaccgtcctacatttacacgcttgatacgtacgtaacacacatcctccgtaatatcaaaagtgtgtcgacaaagttcgcgagactcgagatggtctctagaccagtgttgaagcaccgtcgccgaatatggcgtattcccacgcatctcgacctgtccaatcgttctcgcggatgacgcacataatcctcaccaccaatcacgtcatcgtatggcgcacgccatcccgaccaatcatgttttgccacatacctagtgttctagaactatcagccaaagcttcctccaaagttgaggcgttcaaacttcgcaaatgagctcacaactcatcatggtccaaccatctctagagggaaacccgcgcaagaagaaaaaacgcaagacggcaacacacgaggcatcgcccaagaccgtcccgggttttctccaaaccgtggtaagactttatcctacgaagtgcctccctgcgtcggggaatctaccccggtcgtacaaggggactttctgctgccggctcttctcgaaagtgaggtttggagaacaagtttcccagcttttgcgaacgaggacagtgaatgttggctttcagtcagcaacaacttacgaaaaccgcgacaccttccagacgaaagtcgatgaggcggtcgatcacttttcccgggaaagagtgctggcctcccttttcgctaacttcttgttcatggaacgcctccgagacggatcaatcatccccgagccagatgaaaagttttacaattcctgcttgtcatcatgcatcaaaagtgccggaggcggcctcaacgaggacttcgaccgtttttccgtgctgacgggactcgcacggctcgagccaccgaagaagctcaatctttcccagattcgaagatacgaggccatttctatggctacctcggcgtcaacccgtgctcaacatcataccgaaaagaggaggattgtgatcacgagatggtttctgcgggggttggtgtccagacgagatatggtgtacaagaagtacgcgacgaaactctacaaccttgccaagaagattatcgttcagtttgacggcacaatcgagaaagaacaagagcttcggaaagacgcacttgatgtggacccggacaccgacatcgcttccatcaccgagtttgcccaaaaagagagggatttttctcttcgagtttccggcgacgaaacgtgtgcaccgacgatcaagcatctgaactggatgttcaaaacctacgtggctggatctcggcgaaggtacgaagaggtcgtctcccgatcccacgcgttttcccccggtgaagacaaggcgtccaggaagcagagggacgagttcgtgaagaaggagttggggaaagaggacaattgtgctccaccaagagacactgccgtgctgcccatctgctcatccggctcggtgttcatccggatcgatacgaagacgctcaagagctggggcttttggcattccgatgatgcgtggtggtacaacaatgtcttgcaacccttctcaaaagcggccaacataaagtgcctcaagagcgaggagaacgccaagtacgcgtcgaaccaacaagggtacctgtcgagtctgttagaaagtggtccggccaagtgcccctggatggttggtgagagttttttgacggatggtgttcagatcaaaatgctcctgttaaccctgagacacacgaggaaggccttccccgggtcaagtgagctgaatgatgcggggtacaacaagttgcctcgtgccgatgctccgttagagagtctactgagagttgggagaggtgtgtacaacattaaaagcctgactgagtccactaggttgccgggagatctcgttgtgatgtccgccgacccggggcaggcgaaggtcatcaacgtttgttcggccacttgcgaagaatgggctaggagagatccgaaagttattctccgaacagcgacttgcgttttcggggatgactaccgtagggacacccgtgcttcctgttcggacgagtacgagacttccagaagaagggatcgtccgtacgggaaagccatcgatcgtctgaggaacgagaaaaagaggacatcttgtctcgacactttcatccggtactgccgaagctggttcatcaacggaccggtggtggccaaggagactctggtgcacgaaaggaagctcaaccggttctcacgcttcagggctacgcaaaagacgttggctaagatagcgaacagatacatgggaactgtaggagaggcgtgtcgggtcatgttgttcggcaaagcgtctttccgcgcacagaaaggaagggcttcggctccgaggaaagctatgatcagagagatggccagtagaggagtggtgttgatggtaggggagtacaacacctccaagaagtgcccggggtgtttggaggatacggttgaggacaaagaacggaggatccggagttgcaaaaactttaaggtcggatatccggaagagtcctgtaagctgcatcctctgacacaagagttcgagatggatcgcgatgatgtagggtcgacaaacatcgggatgcgtggtttcgggcttttacttggtcagaagtggttttagggatttctatcgtatttcactggtcgaattccgtggttcgccactaagttgacgccagtgaacctgttcaccgaagtgtttaagactctacctttgtcttttgatttaggcaaagttatcctgacagtcaccgtggacatagcgaaggagacactaagcaccgccttttcctctttgaaagagttgacgtctctcagcgggatcatggctggatgtcgtggcacggcgtcgtaaaatcgtaaaacaaaatgtattgacgcacatacaatggttttcttttgaagaacgatggtgtgtttgactgcgggaaatcaaactccctcaccttgcacgggagcagatgcagttttactctcctccttcctgccagatccaccctgtacataaatagaacgagtccgacaccaataataaagggacaacgggacagtaagttcatgggtaaaaaaaagaaaaatgcgaagtaatcaacaagagaaacacgcaaaccactcgacttaaatctttaactcaccgctttcatccctttccccagagctccaccgcccctgatctggtcgctcaggtcccggtagttctcctccgtcacgttgaacgtgaactcctgctcgcaccaaatgtcatccccacacctcttcttcttgacggtccagcccctgcccttccgcttgagacgacgtctggtgcacttgccactccaaccaaggccacggcagccccggtgcttgttcttgcgcccactcacgcctacacggcggcgactcctgttccggcaaacccggtaaactttctgcgggtggggcggggtggtgggcgtcggagcagtcgggggcgttggtgtcgccggtgccaccgctggtgccgccgcgcgtgcctgatacgccttcttcctcgccatggcacgcttgctgttcttcacctgcctcttcgtggcgaagacaggggtctcaacacccgcagcggcggcggcagtggagtcgggtgggatcgagaaaggggcctcgtcaccgccgttgacaactgttgccggggaaggaggcacttccgggaaacccggaaaatcgccgaaagagatgtcccacatgtttccgtcgtcgtcaccggaagaagacggggccgggtcgccagaaaaaggctcaccaccggaagaagacggggccgggtcgccagaagaaggctcaccaccggaagaagacggggccgggtcgccagaagcaggctccccgctggaagaagacggggccgggtcgccagaagaaggctccccaccggaagaagacggggccgggtcgccagaagcaggctccccactggaagaagacggggccgggtcgccagaagcaggctcccctccggaagaagacggggccgggtcgccagaagcaggctctccaccgaaagaagacggggccgggggagaagccgggccagacggagtggacgcgatttccgtggaagatagaatcgcttccaggtaatccagcatctcgtccacagagctcgtcgtaccgccagagaaaaagtgatcctgttgttgcgagagacaacaggaaacaaaaaaggagagaatacaaaatcaagtttagtactttacaagcattaatgccatcttgacaaacgggtgaaggtggatttacactctaattctatcacacaaacacgcaaacactccccgcttcaccttggtgacaaccgcctagatgtccacaggatgcgtccattctccctcaggggagtgctgaagccgtaggcgtccctcagcatgtaggtgtcgccctccaccatctgctggattatccgcacctcggttccgcactgctccgcaacaagccaaatgccgcggacatcgagaggtttgccatcgacgatctcctgtgcccatgtgtccaagtcggggagattggtcttctcaccgtcgaccgggtgatccgtgaaagatgtgtcgcgtgggagggaacgcacgtagtcgaccatccgtttgcggccctgtcggagcagcttcatcactcgtccccgactattcttgccgtacaacgcttgctgggcctgcgctgggtgaaagccgccgttgtccaccaagcacagcgtgaacaccgaaaggtcgccgcagtacccgctgccgaagttcttcagccaccacaggcccagctcgcgaagagcggtcgtgttctttttgtgcaaaatagcaggagccatgttcgtttacctggcatccatcgtattggtggggggtgggtggaagcagggtgggacatcggtaaatgcaggtgatgtgaaaagaagtgcacaagggtgagccaaggaggtggttgtttggttgtttggttgtttggttgtttgattgtttgattgtttgattgtttggttgtttggttgtttggttgtttggttgtttgtttgtttggttgttctgagaaatgagtgtcacccaatgcgtatctatgtgttggagaaagacagagaaacgaccactgtgtatttatgtgttaaataaatacagagaaacgactactatttatttatgtattagataaagacagatcacccaacttctgcgatttatgtggtagataacgacgggacagtccacgctcagttaaagtaactggtctgctgtgtctgctgttccactgttgtgttttacttcttcgctgtttggttgtttggttgtttggttgctgtagataaagacagaccacccaactactgcggtttatgtgatagataaagacaaatcactcgaaattgtgtattcatgtggtagataaaggcggggcactccacgctaagttaaagtagctggtctgctggtctgctggtctgctgttccgctgttgtgttttttacttcttcgctgtttggttgtttggttgtttggttgctgtagataaagacagagcacccaactaccgtggtttatgtgataggtaaagacaaatcactcgaaattgtgtattcatgtggtagataaaggcggggcactccacactaagttaaagtagctggtctgctgttctgcggttccactgttgtgttttaattcttcgctgtttggttgtttggttgtttggctgtttggttgtctggttgtttggttgatgtagataaacacagagcacccaactgccgtgatttatgtgttaggtaaagacagaggacctgaaaacccggatttatgtggtagatacatgcgggttgctctacactaagttcaagtagtaaggtgtgtgtttgagttatgctttagataaacccaacaaccaaacatccaaagtttgaaatggacgtatacctggcaaggccggcaaatataaatagcggcctcgaaggtatcattgcgatccgtagtttatattaggaaccacagcacacacacccgtggcatcaatcactcacgcgacaggcatgcgacgattgaccttcgatctcgacataatagactcagcccgcgactaacccacttcgtaccggtcaaggccggcgaatgtatatagcggcctcgaaggtatatcatggcgatccgtagtctagggggtatgggatactgattgatggtgtagcacgccgttaagctctatcatagagctgatacacgagtccccaatcgtcgtaaaaactgctgctgtatttcttttctggtactcgaatgcgtcgtatgtacgacgagacgacgagtaccgtagtagttacatttcgacgaatcaattgataacggttcaacaatgtagaggttgtcccgcttttttatttattgtagatttcaaaatggcccacacgacacgatactcacgagtagcatcgacgggatacaccatcatcaggtatcaacacaacacgtcaagacacctgtacaccatacgtagcacccacgagatatacgtcgcctgtccagcactacttgcccgtggttatcaaccacaggggtccgcatgaaagttaggcctctttttttcctggaattttattttagatatttttttttttcggtggcaaccaaaaaataccgaagagctcataataaagaatcatatatccaccatctctacaagataagcatagctgctggtataggcctgacgtgcttgcgatgaccgcactgacttggaggtgctctcgagaccactcctggctccgccgccctttagtggcgggagaaaaatacttcgatctggccgtgaggcttgtcgtttcgagctgcaaaaaatctgcaaaccgtctgtcccatctgcgttctgcgggatttttttcagcaccgccgtcggacgtcgcgcgcagctaaaagttggttcttgcccaccccaagacccaagggcaactttgtccgtgtttgcttttttgtttcgaggcgttcatcgaggaaggtgtgtcgtgatacgtactcgttcttatcagattcgcgtggaattgcggcatacctacctgggggtattggttggttaaaacgctggtcttaagtcattgttgcttggtgataaaatagtacacttcgaagcttgtcatgcacccgggtttccaccctgtcaggtatcactttccttgtgtggaaaatcgctcgaagattcttgagtataccagcagctcgtggcaaagggagatcacgtttccccgatgataagttggcataaagatagtatagctgtcgctaggaactcgctcagcaggatattagaaactgtcgtcaacttgtgtgcattggtggggagaagtacaggaaaaaacgtcgacgacgtgccccgagaacccccgctgccctgatcttgattgagtttctgattggtttggtggggttaaggttaggttgcggttttttattgatggttttctggcattaaaaattctgcctgtttactgattaaaatagtggatactgctgtgcagatatactgtttttggtcgaaccgtgatcgggagctgtattgttgattgtcagggagatattcaatgataataacggctggtctggtagttcggagaatacattgtacggtattgagatttgtattgaggatctgtcaggtttcgagattcttgcaacgtgcagtgattctgaagttagtactgctggataaacttgtatcgacctattggcaccgagctaatggccgtctgattatcgaggccatatgccctacagtagtttcggcagctgagtgtcttggaagtttgttgaagtttgagccagtatggtttagattttggtatctgaagttagtactactggataaacttgtatcgacctattgacaccgagctgatggccgtctgattatcgaggccttatgccctagtttcggcagctgagtgtcttggaagattgttgaagtttgagccagtatggttgagattttggtatttgagtttgaattaatttgcttgaatttctggtattcagtactttgaatttgcttgaggttttgggacattgttgtccactttcggtacgtgaatttggaatttgtgatattgattcgggaggatgatttgtggttttcgggacagctatgaggtgtgaccatgctatgatattgtgatgctttattgccacactgttcgtcatgcagggaggatattagttgaagggactgtacacctgttcggtatgcatactgcggatgtgtggtgtcgcacagtatcgattgcaaagcagggaggatatcgattgtgcttggtactcgatacagcaggtatgatgacggtttcatatattagggagttcatatacttgatgaggctttctccatctgtgaggtctcgtgcttgctggtgtcttgacttgacccgacttgcttgacttcgtctcgacgaggtccacctgcgaggtacgataatatatacgtggtttatgtctacatgaggagcgctccagctccctgaccctgcccgcctgtgctaggccccgtcatgcccccgaggccgtatcaatacaggcctataccagcaggtatgcttatcttgtagagctgctggagatatgattatttattatgagctcttctgtattttttggttgccaccgaaaaaaaaagatctaaaaccaacgcgcaaacgggtagggtggatcgtaaatgatccgagtctggcgggaaggtttcttggcctgggtttttgttagtggatgagcttcggcaagttccacactacccggagagtttactcttcgggtggctatccccaccgcaccgggccccttcgggggtcaggtcgggtcaacatgctcaagtctccggagtcgtaagcagcaagggctgatacttccgagggggcatggagtgaattgacacacgacacgaagtgagacgtggaagtgtggagggcgtaagctttatttttacccatccgccggaggatttaaaaaaaaaaaaaaaaaaaatctaaaaaaaaattccaggaagaaaaaagaggcctaaccttcatgcgcacccctgtgcgtacttgttcccgccgtatacttgacaatacttgacgatacacatacatataatatgtacgagtacccgtatgataagtactgctgtggggagttttcggagatcatgtcgtagatcttcgttgatctcgacgtcaatgcctcgtgcgaacgctacggcgtaaaccggcggattcacgacgccgcaacacgtatcatcgatcgatttgtgaggactatacagttgtgactcacatacgataccacccacgagagatacaaggtaccaggactcgtactgccaggtataaccctcaaccaactatcttcattccgactaatctgggatcgtggttacctcgtgttgcttctcgtgacggttgctgatcgtacgagcatgatctgttgttggacgcatgcatatttggtatgtgaaccggtatggtccgccttttttcgctgcatcggcggacacggctacgtacgagtacttaacgtatatatgtgttgtctagtaccggtatgtgcgacccggtatgttcgacacgattagacggcctggcgagcgcgcacactgggtgcagcagtgcaacaaaacaaccactttttctgtctttcgattaaaaaacaacaactcctatatcatcttcatattctacatgcatcaatctggccctaccgcagtgggagcgggagggcctttttttccctagtatatcatatgggcatcaagacccaactctatacttataatcccatggttaggtgggcatcagagcaaactgtatgtaagtaatagacacatacaaggttccccttcggggtgtggtcccgggggtgtcgcaagttgaaaaggggtaaaacatcgtcaggtgttcctgtttatatatatgacggggtaggttcaacgtcgtgtggcgtgtggtagattcggacgtggaaatctcctgctgcttgctgtagtcacgattttgcatgtcctggtggtgagcactgcacacaaaaacactaaaaaagcgccgtggccgtcacaaaggccagagtgtgacgcgcgggtgttgtgggactactgttgctgctgctgctgctgctgctgctgccgttgtacgacgtggctggcgcttctttatacttccgagtagatgtagtatcgtccggcccccgcagttcggtcatgagactacgggtatgtatgatatgtgttcattcctattccccaggacgacaggaatcatggcataaacatgcacacacgcagacgcaccgtccgtggccgccacaaaggaagagcttaatgtgcggatactattgtaccgtggctaccacaaagtagtagagggcttgaggactacaaccactgtgatacagtataccgtaataatgcgagtagacgccacccaccccgcaccgacttttcgagctcgatgtctccacagcaagcagctagaagaatatcagcaccgacaagggtggcgttggacagatctctcttaaaccgagggctgtccgaaaacatgtcatttggtattggcacctttgtttaggagcgttattgagctcgaaaaaatgatctggcggggggttgtttactcgcattattacgatagcagcgtatgatacatgtgatacagcagcagcaacttcacctctcggcacctccaacacgattacaagtattaataacgtacactcgattaacaaccatgcgtatataggaaagagaacaaaaccatagtattaataattgtacgtatgtcgcacccatcaaatcgggcgtggtgctaatcatggcatacagaaaactctggattgaccaaccgcacaagaacacccgccggagataaaaccggacgcttacagcgtcattggatcccacgatgactctacgccttcctccttttgaacctttccgcaaggtcgctagcctttgatccagttacagcgcgactttctgcggcaccttgaacaggcttcgattgagctcgacgaaggcgctcttgaagctcagaggtcttgtagccgttgttctgcttcaggggctgcggcctgcaagcacgagtggaaaattggtccaagattaaaaaagaaatgccaatgggtgcgatggtacaggtgattttgagcccgtatgtacagtagtcgtaaccaaactaaaagggcatattccacgtccacaaacaccggaatgcgccaaaacgcgaaaaaatacctgtccggtttgaagtcagcctgggaagatggggcgtgttccactccggagcctgagggtccagctgcccccatagccggttctcgtgtgcccaagccccccatccttctcctgatttcttgcaacctgtttggtcgaggctgggcggcatcttcgtccacgcgggtgacgtctatgaacactggccttacaatattttcgtctgcctcaaacgcaagagacttgcgcgttccttccatgtcctgccccctccgcgcagaccagccgccgtgcacgtctgccatacgtccacgcaggggggtgcttcgaactccgccgtctgcagcatgcggtgctttgcatccctcgaggataaactggcgaaaccgtggcttcaggcgaccaacctgtttcgcacaaaattggaatgttgttgcatgagctgtcatcgtcgcttcttagtgaaagtaatggtgtagtacgacgctaaacaagcagtatggacaaaacttgcacaaaaaaatcctgtgtgtacaccttcattacacgagttgctccaattctacacctacccggctttctagtctcaccacatgcagatcgcagacgcgtcgagtaaaaaggacagtacccacctggtcttcaagcgtggcctgcgcttctggccacctctctaggtagctctttagctcgttgagggcagtagagccatcttcaccaccaccgtgcacgctttgggattcagccgaaaccaacccgatcaaacgggcaatttccgcaacgtggtccgacttaaggtgcagaactggtgaagaatggcgacgacccgagtctccctgacgcaccgagcataaacagtgaaataagcaattggaaataagaaccgtcacaatgaacactgtttagctgtctaatagctcaaccacgggggtcgcagctcaaagcacgcactacatggtacagtaataagtcagatgcctcttccactgctagccttcttctgggacgatctagttgcgagtaaattacatttcgcctttggcacctgctaagcgtgaaaaaaggacaagcgctggggctgcaatgctctttccaacagaaggtatgaaaagtgttcacttcgtgcagaccaagaggttgcgtttcgtcttaacggcggaccagacaggcttgctggtcggtttgcgctcgacgaaatgccgttcattgaaggggaggcgcagttcgtgaggaaaactaacacactgattcacatgggcacggaataagtattggtctagcagacagcaaatgcgtacgtcaatcggacaatcggacaaacgcaaccttgtatgtaccagtaatatatatacgaataaactgctcacatcgttttccttcgacataaccaggagccggttcattgc

SEQ ID NO: 269 - DNA, 22304 bp, unidentified
  source 1..22304: mol_type = other DNA
agaacagagtgcgatgggagggggcagtccatacctagactgtcccctgtagcatgtgtgttcatacatgtactatctacggagacgtttccgttactagcacgtcacatgatctcatactcgtacgagtagtacgtattgcaccgctatatagccgtagtacgtgataccaacacattagcccaccctgaatagtcgtagatgcagatcacacgacgatcggaggggatgatcgtttcatcccagaaatcgggaagggaggtcgaagatgcggctattcgaaacacaggtaaaagaggctatacaactaccccacacctcgcaatgaggctacgacgcctcacacgttaattaacgcgccataccggaagaaattcctgcgaaaagccaacggtaagcgggctacggtgaagacaaaagccaagtgaacaaaccgaagcacgaaggtatatcgaaacaaaacaaagcagaaaaaaaaacgaagttaacagccggatgctgaatgtaacaggcaaaagagaaaataatgcatgcggctatgcagagaagcaaagccttgaacttggacttgggcttgaaatatgactgcatagcgtggggccacgggtccggctggaggaaagacaacagacgccggccggtgggaaacacgaaaaagaaaaacgcgaaggctgtaagcgcaacgaaagtgagaagtgtgctgcaaagcaagaccatgggggggtcggtaactgattacgcgtgcactgacaacaacgtggggccgattacgaaagagggacgtagaaacgtaggtggcaaacccactacaagcgcatgctgagacgcagcgaggtgatacgttcgaaaacgagcgaggtcaagaggaaatgcctcgtataccgcgagatgaaaagaagaaacgaacaggccctaaagtatactgcaggggttgaagctacgcgtacggcgcagggaggagtactcgcggttgaggcaggtatgtcgttgtcacaaaggccaagaaaagccaaacgctcggtacgatgcaacaaaaagcagggaatatgaaacccgtgttaaaacagacactcagaacaaaacaaaaagagggcgtgaagatataagcccaagtaaatatacggtagtaccacggtccggcggccttcatggagaagaagctgcgggaacggcggtgtaagttgaaaacaaaacagcccaagtaaatatacggtagtaccacggtccggcggccttcatggagaagaagctgcgggaacggcggtgtaagttgaaaacaaaacgcaaaacaaagaaaaatgattccgaaagggcaacacccccgaactatgctagtgggttaaagagattgggtcacaagaaaggaccacaaagcttcccaaggttgcaatgctacaaatcggcgaccctcgcgagagtatgcaaacggggtcgggggcgacatgattggagaaagaaagcaaaatagcacgaaaacaagtgaaaataacaaagggaccaacgcgcaaacgggtagggtggatagtaaatgatccgagtctggcgggaaggcttcttggcctgggtttttgttagtggatgagctgcggcaagttccacactacccggagaatttactcttcgggtggctatccccaccgcaccgggccccttcaggggtcaggtcgggtcaacatgctcaagttaccgaaggtcgtagacagcaagggctgatacttccgagggagcatggagtgaattgacacacgacacgaagtgcacgaagtgagacgtggaagtgtggagggcgtaagctttattttgacccatccgccggaggataaaaaataaacaaaataaaaaaaaataacaaagaacgaataaaaaaaacacaattacaccaacaatattatcgaaataatgttgttgctgaggttcggcggctctcgtgggaagaggcaagcggaacagtggtaggagtacataatacacctttacgtatgaaagtacaataccatggcggttcagcggccctcgcgagaggaggcaggccgaaccgatagtggttggttgaagtagaacactaatacgcccgaaagtacaataccatggcagttcagtggccctcgcgagaggaggcaggccgaaccgatagtggtaggttgaagtagcacgcaaatacgcccgaaagtacaataccatggcagttcagcggccctcgcgagaggaggcaggccgaaccgatagtggtagactggaaaatgaaacgcgaacccgaatcccttgtactaaacgcaacaaaagaaaacttatgtcagaagtcggcaacttgaggcaaacagaaaataaaacaaaacgatgcccaagcataatcagataactaatcatgggggggcaggagagacattcggagcgccacgggacgcgttcgaactgcgtagtaccccgcgagcgacgctcccagtcttgtagcgttgctaacaccacgatccgtggttggcgacgctggatgttgtgtagctagccggccgaaggttgatcttgatcggcccagggtcgtcgaggaaccggatgatgtaggtgttgtccgaagaggggcccgcgggcgttcgtgaaccggggtcctgggtggtgcggtgagcgatcttgcccagccaccacaggccgtcgcgggccttgtaccacaggtgtgcgcctcggggaaggatggtggagctgaaggtgcgaagccagacgtcacggggaacgagggtgtagccgggggcaaggaaaatctggccttgtgaccgcgacagttcccgctgcgccgaaccgatgcgcatctgtcggtagaggcggttctcttgtcggtgttgtgttggggtgccggaccagtagaggaggatgtagcgtcttgagtgttgaaggtctagttcccgctcccaggaaaggctgagcagtccgacccagtgggtctcgtacaggaccgaaataatcccaccacggccgcgcactagttccggcggtggcgagacatcgtcgagggtgacgtggaaagggggggacttggtggagaaggagctgagaacatacttggtgaggtcggacggtaggtacttgggcatgtcgcaggtgtcgtccgggttccgacagggcttacagcgctcgacaaccgacaaccgatcatactaaccgtgcgcgaaactcccaagtggcaggaggtggtggcgtggcaggtgtgtaatacccaagggcgcatcaaattcggaacgtaaatgcgcgggggtggggtggtggaagaagtggcgctggttccggggtcggggggcttaggggctcgtcggaccaagatgacggtgtcgtcgtctgtacggtggagttggctttttgcggcgagggaaagcacggctgagaggtgcgggcgcttagacgatggaaataaatccaggaagtcggtcggcgggggagcaggggggtcctaggaaagttagtggagtgtagcggagcagaggggctcagcccgttgttcacgcgcccagtccgagtgcgtgaagtgctggaagcaggaaagaaggtgggggtcgtcatcaggctcgacgacgggttccagcaggtggggcgggagccgaggagttgaacgtcgtggatgaagctctgttggggtcgatcttgaacgagcgccgtcgggctcgacgtcgggctcgacgtcgggctccggggagtgaggcgccggtggtggagaggacgaagttgaaggcggtcttgaaagggcgccgtcgggctcgacgtcgggttcgacgtcgggctccggggagtgaggcgccagtggtagagaggacgatgtcgaaggcgatcttggaagggcgccgtcgggcgcaaagtcgggctcgacgtctggctccggagagtgaggcgccagtggtgaagaggacgatgtcgaaggtgatcttggaccagcgggcgcctgcagtggggcctgcgccgactggagggaggagcggccagaggcgtggttggtggtgaaggcctcggcggtcccttatccgggggcgcagatgcgcggtggcgggcagatgtcgatcttgaaggccgtgcgctgaaaccatagtcggctgttgcacggggggttccagcggcggcggcggcgcgatggcgggtccgagaagagatcagatccggaggagctggagatgtggcgccaatggtgggtgtcggggagacgatgggcggcccgaaagccaagccgggaggagcgccggcgtccacggcggaagtcgtggaattgccgagcgcggcggtggcggtgtcgtgggccgaaataggcccgacgaaggtggttggggtggagaaggggccgaaggagtccatgtacggtccaaggcggcggaaatcgccgaagtcgtcgtcggtgaaggggattggtcggatgaccgggatgtggaaggagggagggggtactagcccacccaagccgatgcccggcatcgagcgcccgcaaggcgtaaagccgcagaaatgaatgaggaagatgcccacggtgtcagggctcgaaaaaaaagaacaaaacaaaaaaaacaacctactcggcagcgttttttaaacgagtagctctcgtgctttgctatgattttatccagcttcaaaagctgggtatatcaggcggacgcaagaccgcaggcagagcgagagagcgactgctttgaacatgcagtgctgctgcgcgttggcgaagctgatagctaatacaaagctaccaatgttcttaagctgctgatttgatgttgtgaggtaaaaatacaagggtgactctgatctcgcaagaaaggtacttatgatgctcacaaggtgagcagtccgttggagaggaggacaggacgatggcttcgaagaaggtgcgccaggctcagcgttgactcagtcctgccgacgacgccaaatgtaagagaataggcaatccaataaggccaggacacaggaatgtcgacgcaaaccagaggcacgcttcttcttgataaagttcttctcgctgctcatctcatggacctcaattgcgcacaagaacagagtgcgatgggagggggaagtccatacctagactgtcccctgaagcatgtatcttcatacatgtactatctacggagacgtttccgttactagcacgacacatgatctcatactgctattctctaaggagacgttcccgttactagcacgccacgtgactcataccggtacgtattgcaccgctttatagccgtagtacgtgataccatcacagtacacccattttctttggcattatgttgctgataagattatgaacaagccacaaagtggtaccataacctttctttgatcttagcttagttccactggaggcggtggttggactccaccagcttacagttctagtggtggtggctacggcggcggcggtaggtggggtgcggcggccgcgggtacctcttcgggtactcgtgcctcggctaccggcgctactggtggcggcagtaggcggggggcggcgcccgcgggtacgtcttctcgtgcctcggctaccggcactagtggtgttgatgccgaattttcgggtactcgttcctcggctaccggtgctactgccgcgggtacctcttcgggtgctcgttcctcggctaccggctacatccatggcgacagttgggccaaggttaggtggaaggatgaacttaacgattaccggtccccgccgaagttcaaagcggacggtggagtcgaagaatccaaaggaggcttcactgaacctgatggcggcggtaggtggggtgcggcgcccgcgggtaccacttcgggtactcgttcctcggctaccggcgccactggtggcggtagcaggcctggtggctcctttgacgatgatgccaacgaatccaaagaggaaggtaaactccaagagtctaaagagggagatggtggttggacggcgggcacgtattttgatcaccgtgccccaagtgatcggcctagtggcggtggttggagtttgggcccatctggtccgcctccaccagcttacagcttacagttctagtggtggtggtggtggtggtgactacggtggtggctacggtggtggtggtggtggctacggtggtggtggtggtagctacggcggtggtggtggtggtggtggctacggcggtggtggtggtggtagctacggcggcggtggtggtggtggtggtggaggctacggcggcggcggcagctacggtggtggtggcggcgctacagcggtagtgggggacagtcgcctaataaaaaactcacagttctcacagaactctaaattctctaagttacagaaacactagcatcctttacgagcttctcgggaaatatatcgcggtgagatagggtaggtccatttcaattcgggtagccccgttactctagaccggccgtcatcgccctgaaactgtatcaactgtgcttcctatgcagagtagtttcgaaaagccaaacaaaaaactactcaggggtaggccccaaagccaaagtggcgcattcattcttagactctctccttccaagtgagagtcagacgattctcgacacaactcttcatcaagatgttgcgagctccgttctcgtccctgtccatcaccaccgggcacgaaggacaactgaagaccttggacctccccaggttgtgatggagatgtccgcagcacgaacaggtcttggatgtgaactcctccgtgacgatgacaagtttcacaccttcgcggagagccgtggtttttagcaactccttgaacttgtagtgtgaccatgtcatcatcccccgggccgtgccgttaccgatgttccgcttcgccctgttgaccatgtctttcgtgttgaactccggaaggaagatgacgtcgtagttcttgcacaggtgcttcaccgtcttgttccttacgtccgtcaccaggtctttcactctcttgatggctcggtgccaggctttgcgtaagcgatacctctttttgctcttgacggacttgtcgaaagccttggactgtaacaaatccatgtggtgacagagacggtagattctccccacgtccccgggagcgaactccgtgacgtttcccttggaatccactccggtgttgaatgtcctcaccccgggatcgagcgcgactaccttcaagtcctcgtggttctcgacgcggggaggggtaacgccggactgcttcgtgacgcacgcgtagaagttcttggaccgatccatctggatgacgatctctcccgcgaaggaggtccagtcctcgaaacccttcagcttggattttccacaggtcttcttgaacatgtacccgttcttcacacacgctcccggaatcttgatgacctggacgtccctcctggaccgaaagctcatgtcgaaggtgtggctcggattcttctctcttttctttaggtttgtcacgaagccgttgtacagatccaccatggcggagtcccggatctcgaagggggtctccaacacccacgacgtcttgcactctctcttgaatgtcttcttgggtatcgaccagttgcctctcttgagacctcgcttcttctttttcttccccgtccttctcttgggatccccgtgattccacccgccgacgaccttcgacctaaagtcagtcttgttgattcggcagttacccttcttgtagtagtcaaggcaccggttgtacgtccacctcgccgtccccatccacttcctcagccgctccttccactccggcgacgggtccagcttgatctttctcgccctcacgtcttttacgcttttttgtgttcctgcctcccctcctcccattgtttctcgcgacgaagaaattgcagacggccaggagatcttcagagagttcttgctcggacccctcagtttctgacttgtggtggaccacgatcttcgtgccgtggaattcacagagctgttggacgagttcaaatccgtaccgacagagcctatccctgtaggacacgacaatctactggacattgccagcgtggacgcgtcccagaagggcctggaagttcttgcgtctgtagttgagtccggatccgatatccttgagagtcttgtggtccgggtaacttccctggaggtccttgacctgtctgacaaggtcggtggcctgcttggatgagctgactctggcgtagatatagctctcattgtgttttgattctgcggattcgagagagggtccgagccgttcatcgacgtctccgacgtggtagattcgttttcccgagcgtcctccatctccaagtctcctgatcctgatcttcccggagtctccccaggatgccaatgtggctctggagatgtcataccttttcttggtcttggaagccggctggaacatccagctcgtaataaacctattcttgcactcttgtttgtatacaatacataaatattttatttcgtggtggtcgagcgcgttgtgaccgcgtagggctgactcctgtgataaagtgagcttcacactttggtcgtgacatggtccgaaccagtactttcgggatcgttcgatttttatggttcgaatcagagttctggatgttctaaaagctttacatatttttaaaaaccacaatgttccaaaaatggtgttacgataaaatctcatcgggttcaacgttagctggtgtatttccagacgaagaacctgtgtgaatgtcaagttccgtgaaaactggaagaaagcagcaagcggtcgtgagacccatggcacgcattattgtaaacttaggcaccctgacaacttaataaatgtttatatatacaaacatcgagaaatgacctacttgactcacaacgaaatctatgatgcctttaaaaagtgcgatgcgcaatggatacaaaggcgccgcaaaatagacacatcttctcttttctacactctcacaaagtgttgtattcaggagagaggtattggtcacgttctgaggatggatagggaacactactcgccacaggcgattcactcggccaggaagaaattaccccagggggcgttcaaagaggttaatcgatatatacacagggggccacatgaaccacgtgtgtttgccgtagatggttcgaaagtccatgtacatccttcattcaccaacgctggatacaagactcgaacgaatgataagcccgtcccgcgtcccgcgaaaaggccgctagttatgctatcttcaatggtagatgtaaaaagtaaagcatgtgtggactttgaaattacaaaacatttcaatgaaagaaaggcagccgtatcaatgctccgaagtgtgcgaagcggtgacacattggtttttgaccgaggctattattcaaaagatttactacgcagtgttgatgatgcacatgcattcggggtttggagactcaagagaaacgcattcaagggtacccggtccttcttcaactcgtgtaaaacagaagcaatgtgccttattcttggagtcaaatcacgccttttgaaatacttcatcaacggaaagacgtacgtttgcctcactaacgacccctcgttaacacgtgaagaggtcaagtccgtgtacgcgtcgaggtggagggtggaggagagcttcaagcgactaaaatccaatcttaagcttgagaaagcccacgcgaggaccccggccctgtatatacaggaagtagaagcgagagttttactcgacacgatcacactgaggttacagaagaagattaaggaaccgtcctacatttacacgcttgatacgtacgtaacacacatcctccgtaatgtcaaaagtgtgtcgacaaagttcgcgagactcgagatggtctctagaccagtgttgaagcaccgtcgccgaatatggcgtattcccacgcatctcgacctgtccaatcgttctcgcggatgacgcacataatcctcaccaccaatcacgtcatcgtatggcgcacgccatcccgaccaatcatgttttgccacatacctagtgttctagaactatcagccaaagcttcctccaaagttgaggcgttcaaacttcgcaaatgagctcacaactcatcatggtccaaccatctctagagggaaacccgcgcaagaagaaaaaacgcaagacggcaacacacgaggcatcgcccaagaccgtcccgggttttctccaaaccgtggtaagactttatcctacgaagtgcctccctgcgtcggggaatctaccccggtcgtacaaggggactttctgctgccggctcttctcgaaagtgaggtttggagaacaagtttcccagcttttgcgaacgaggacagtgaatgttggctttcagtcagcaacaacttacgaaaaccgcgacaccttccagacgaaagtcgatgaggcggtcgatcacttttcccgggaaagagtgctggcctcccttttcgctaacttcttgttcatggaacgcctccgagacggatcaatcatccccgagccagatgaaaagttttacaattcctgcttgtcatcatgcatcaaaagtgccggaggcggcctcaacgaggacttcgaccgtttttccgtgctgacgggactcgcacggctcgagccaccgaagaagctcaatctttcccagattcgaagatacgaggccatttctatggctacctcggcgtcaacccgtgctcaacatcataccgaaaagaggaggattgtgatcacgagatggtttctgcgggggttggtgtccagacgagatatggtgtacaagaagtacgcgacgaaactctacaaccttgccaagaagattatcgttcagtttgacggcacaatcgagaaagaacaagagcttcggaaagacgcacttgatgtggacccggacaccgacatcgcttccatcaccgagtttgcccgaaaagagagggatttttctcttcgagtttccggcgacgaaacgtgtgcaccgacgatcaagcatctgaactggatgttcaaaacctacgtggctggatctcggcgaaggtacgaagaggtcgtctcccgatcccacgcgttttcccccggtgaagacaaggcgtccaggaagcggagggacgagttcgtgaagaaggagttgggggaagaggacaattgtgctccaccaagagacactgccgtgctgcccatctgctcatccggctcggtgttcatccggatcgatacgaagacgctcaagagctggggcttttggcattccgatgatgcgtggtggtacaacaatgtcttgcagcccttctcaaaagcggccaacataaagtgcctcaagagcgaggagaacgccaagtacgcgtcgaaccaacaagggtacctgtcgagtctgttagaaagtggtccggccaagtgcccctggatggttggtgagagttttttgacggatggtgttcagatcaaaatgctcctgttaaccctgagacacacgaggaaggccttccccgggtcaagtgagctgaatgatgcggggtacaacaagttgcctcgtgccgatgctccgttagagagtctactgagagttgggagaggtgtgtacaacattaaaagcctgactgagtccactaggttgccgggagatctcgttgtgatgtccgccgacccggggcaggcgaaggtcatcaacgtttgttcggccacttgcgaagaatgggctaggagagatccgaaagttattctccgaacagcgacttgcgttttcggggatgactaccgtagggacacccgtgcttcctgttcggacgagtacgagacttccagaagaagggatcgtccgtacgggaaagccatcgatcgtctgaggaacgagaaaaagaggacatcttgtctcgacactttcatccggtactgccgaagctggttcatcaacggaccggtggtggccaaggagactctggtgcacgaaaggaagctcaaccggttctcacgcttcagggctacgcaaaagacgttggctaagatagcgaacagatacatgggaactgtaggagaggcgtgtcgggtcatgttgttcggcaaagcgtctttccgcgcacagaaaggaagggcttcggctccgaggaaagctatgatcagagagatggccagtagaggagtggtgttgatggtaggggagtacaacacctccaagaagtgcccggggtgtttggaggatacggttgaggacaaagaacggaggatccggagttgcaaaaactttaaggtcggatatccggaagagtcctgtaagctgcatcctctgacacaagagttcgagatggatcgcgatgatgtagggtcgacaaacatcgggatgcgtggtttcgggcttttacttggtcagaagtggttttagggatttctatcgtatttcactggtcgaattccgtggttcgccactaagttgacgccagtgaacctgttcaccgaagtgtttaagactctacctttgtcttttgatttaggcaaagttatcctgacagtcaccgtggacatagcgaaggagacactaagcaccgccttttcctctttgaaagagttgacgtctctcagcgggatcatggctggatgtcgtggcacggcgtcgtaaaatcgtaaaacaaaatgtattgacgcacatacaatggttttcttttgaagaacgatggtgtgtttgactgcgggaaatcaaactccctcaccttgcacgggagcagatgcagttttactctcctccttcctgccagatccaccctgtacataaatagaacgagtccgacaccaataataaagggacaacgggacagtaagttcatgggtaaaaaaaagagaaatgcgaagtaatcaacaagagaaacacgcaaaccactcgacttaaatctttaactcaccgctttcatccctttccccagagctccaccgcccctgatctggtcgctcaggtcccggtagttctcctccgtcacgttgaacgtgaactcctgctcgcaccaaatgtcatccccacacctcttcttcttgacggtccagcccctgcccttccgcttgagacgacgtctggtgcacttgccactccaaccaaggccacggcagccccggtgcttgttcttgcgcccactcacgcctacacggcggcggctcctgttccggcaaacccggtaaactttctgcgggtggggcggggtggtgggcgtcggagcagtcgggggcgttggtgtcgccggtgccaccgctggtgccgccgcgcgcgcctgatacgccttcttcctcgccatggcacgcttgctgttcttcacctgcctcttcgtggcgaagacaggggtctcaacacccgcagcggcggcggcagtggagtcgggtgggatcgagaaaggggcctcgtcaccgccgttgacaactgttgccggggaaggaggcacttccgggaaacccggaaaatcgccgaaagagatgtcccacatgtttccgtcgtcgtcaccggaagaagacggggccgggtcgccagaaaaaggctcaccaccggaagaagacggggccgggtcgccagaagaaggctcaccaccggaagaagacggggccgggtcgccagaagcaggctccccgctggaagaagacggggccgggtcgccagaagaaggctccccaccggaagaagacggggccgggtcgccagaagcaggctccccactggaagaagacggggccgggtcgccagaagcaggctcccctccggaagaagacggggccgggtcgccagaagcaggctctccaccgaaagaagacggggccgggggagaagccgggccagacggagtggacgcgatttccgtggaagatagaatcgcttccaggtaatccagcatctcgtccacagagctcgtcgtaccgccagagaaaatgtgatcctgttgttgcgagagacaacaggaaacaaaaaaggagagaatacaaaatcaagtttagtactttacaagcattaatgccatcttgacaaacgggtgaaggtggatttacactctaattctatcacacaaacacgcaaacactccccgcttcaccttggtgacaaccgcctcgaagtggcacttagatgtccacaggatgcgtccattctccctcaggggagtgctgaagccgtaggcgtccctcagcatgtaggtgtcgccctccaccatctgctggattatccgcacctcggttccgcactgctccgcaacaagccaaatgccgcggacatcgagaggtttgccatcgacgatctcctgtgcccatgtgtccaagtcggggagattggtcttctcaccgtcgaccgggtgatccgtgaaagatgtgtcgcgtgggagggaacgcacgtagtcgaccatccgtttgcggccctgtcggagcagcttcatcactcgtccccgactattcttgccgtacaacgcttgctgggcctgcgctgggtgaaagccgccgttgtccaccaagcacagcgtgaacaccgaaaggtcgccgcagtacccgctgccgaagttcttcagccaccacaggcccagctcgcgaagagcggtcgtgttctttttgtgcaaaatagcaggagccatgttcgtttacctggcatccattgtattggtggggggtgggtggaagcagggtgggacatcggtaaatgcaggtgatgtgaaaagaagtgcacaagggtgagccaaggaggtggttgtttggttgtttggttgtttggttgtttgattgtttgattgtttgattgtttggttgtttggttgtttggttgtttggttgtttgtttgtttggttgttctgagaaatgagtgtcacccaatgcgtatctatgtgttggagaaagacagagaaacgaccactgtgtatttatgtgttaaataaatacagagaaacgactactatttatttatgtattagataaagacagatcacccaacttctgcgatttatgtggtagataacgacgggacagtccacgctcagttaaagtaactggtctgctgtgtctgctgttccactgttgtgttttacttcttcgctgtttggttgtttggttgtttggttgctgtagataaagacagaccacccaactactgcggtttatgtgatagataaagacaaatcactcgaaattgtgtattcatgtggtagataaaggcggggcactccacgctaagttaaagtagctggtctgctggtctgctggtctgctgttccgctgttgtgttttttatttcttcgctgtttggttgtttggttgtttggttgctgtagataaagacagagcacccaactaccgtggtttatgtgataggtaaagacaaatcactcgaaattgtgtattcatgtggtagataaaggcggggcactccacactaagttaaagtagctggtctgctgttctgcggttccactgttgtgttttaattcttcgctgtttggttgtttggttgtttggctgtttggttgtctggttgtttggttgatgtagataaacacagagcacccaactgccgtgatttatgtgttaggtaaagacagaggacctgaaaacccggatttatgtggtagatacatgcgggttgctctacactaagttcaagtagtaaggtgtgtgtttgagttatgctttagataaacccaacaaccaaacatccaaagtttgaaatggacgtatacctggcaaggccggcaaatatacatagcggcctcgaaggtatcattgcgatccgtagtttatattaggaaccacagcacacacacccgtggcatcaatcactcacgcgacaggcatgcgacgattgaccttcgatctcgacataatagactcagcccgcgactaacccacttcgtaccggtcaaggccggcgaatgtatatagcggcctcgaaggtatatcatggcgatccgtagtctagggggtatgggatactgattgatggtgtagcacgccgttaagctctatcatagagctgatacacgagtccccaatcgtcgtaaaaactgctgctgtatttcttttctggtactcgaatgcgtcgtatgtacgacgagacgacgagtaccgtagtagttacatttcgacgaatcaattgataacggttcaacaatgtagaggttgtcccgcttttttatttattgtagatttcaaaatggcccacacgacacgatactcgcgagtagcatcgacgggatacaccatcatcaggtatcaacacaacacgtcaagacacctgtacaccatacgtagcacccacgagatatacgtcgcctgtccagcactacttgcccgtggttatcaaccacaggggtccgcatgaaagttaggcctctttttttcctggaattttattttagatatttttttttttcggtggcaaccaaaaaataccgaagagctcataataaagaatcatatatccaccatctctacaagataagcatagctgctggtataggcctgacgtgcttgcgatgaccgcactgacttggaggtgctctcgagaccactcctggctccgccgccctttagtggcgggagaaaaatacttcgatctggccgtgaggcttgtcgtttcgagctgcaaaaaatctgcaaaccgtctgtcccatctgcgttctgcgggatttttttcagcaccgccgtcggacgtcgcgcgcagctaaaagttggttcttgcccaccccaagacccaagggcaactttgtccgtgtttgcttttttgtttcgaggcgttcatcgaggaaggtgtgtcgtgatacgtactcgttcttatcagattcgcgtggaattgcggcatacctacctgggggtattggttggttaaaacgctggtcttaagtcattgttgcttggtgataaaatagtacacttcgaagcttgtcatgcacccgggtttccaccctgtcaggtatcactttccttgtgtggaaaatcgctcgaagattcttgagtataccagcagctcgtggcaaagggagatcacgtttccccgatgataagttggcataaagatagtatagctgtcgctaggaactcgctcagcaggatattagaaactgtcgtcaacttgtgtgcattggtggggagaagtacaggaaaaaacgtcgacgacgtgccccgagaacccccgctgccctgatcttgattgagtttctgattggtttggtggggttaaggttaggttgcggttttttattgatggttttctggcattaaaaattctgcctgtttactgattaaaatagtggatactgctgtgcagatatactgtttttggtcgaaccgtgatcgggagctgtattgttgattgtcagggagatattcaatgataataacggctggtctggtagttcggagaatacattgtacggtattgagatttgtattgaggatctgtcaggtttcgagattcttgcaacgtgcagtgattctgaagttagtactgctggataaacttgtatcgacctattggcaccgagctaatggccgtctgattatcgaggccatatgccctacagtagtttcggcagctgagtgtcttggaagtttgttgaagtttgagccagtatggtttagattttggtatctgaagttagtactactggataaacttgtatcgacctattgacaccgagctgatggccgtctgattatcgaggccttatgccctagtttcggcagctgagtgtcttggaagattgttgaagtttgagccagtatggttgagattttggtatttgagtttgaattaatttgcttgaatttctggtattcagtactttgaatttgcttgaggttttgggacattgttgtccactttcggtacgtgaatttggaatttgtgatattgattcgggaggatgatttgtggttttcgggacagctatgaggtgtgaccatgctatgatattgtgatgctttattgccacactgttcgtcatgcagggaggatattagttgaagggactgtacacctgttcggtatgcatactgcggatgtgtggtgtcgcacagtatcgattgcaaagcagggaggatatcgattgtgcttggtactcgatacagcaggtatgatgacggtttcatatattagggagttcatatacttgatgaggctttctccatctgtgaggtctcgtgcttgctggtgtcttgacttgacccgacttgcttgacttcgtctcgacgaggtccacctgcgaggtacgataatatatacgtggtttatgtctacatgaggagcgctccagctccctgaccctgcccgcctgtgctaggccccgtcatgcccccgaggccgtatcaatacaggcctataccagcaggtatgcttatcttgtagagctgctggagatatgattatttattatgagctcttctgtattttttggttgccaccgaaaaaaaaagatctaaaaccaacgcgcaaacgggtagggtggatcgtaaatgatccgagtctggcgggaaggtttcttggcctgggtttttgttagtggatgagcttcggcaagttccacactacccggagagtttactcttcgggtggctatccccaccgcaccgggccccttcgggggtcaggtcgggtcaacatgctcaagtctccggagtcgtaagcagcaagggctgatactttcgagggggcatggagtgaattgacacacgacacgaagtgagacgtggaagggtggagggcgtaagctttatttttacccatccgccggaggatttaaaaaaaaaaaaaaaaaaaatctaaaaaaaaattccaggaagaaaaaagaggcctaaccttcatgcgcacccctgtgcgtacttgttcccgccgtatacttgacaatacttgacgatacacatacatataatatgtacgagtacccgtatgataagtactgctgtggggagttttcggagatcatgtcgtagatcttcgttgatctcgacgtcaatgcctcgtgcgaacgctacggcgtaaaccggcggattcacgacgccgcaacacgtatcatcgatcgatttgtgaggactatacagttgtgactcacatacgataccacccacgagagatacaaggtaccaggactcgtactgccaggtataaccctcaaccaactatcttcattccgactaatctgggatcgtggttacctcgtgttgcttctcgtgacggttgctgatcgtacgagcatgatctgttgttggacgcatgcatatttggtatgtgaaccggtatggtccgccttttttcgctgcatcggcggacacggctacgtacgagtacttaacgtatatatgtgttgtctagtaccggtatgtgcgacccggtatgttcgacacgattagacggcctggcgagcgcgcacactgggtgcagcagtgcaacaaaacaaccactttttctgtctttcgattaaaaaacaacaactcctatatcatcttcatattctacatgcatcaatctggccctaccgcagtgggagcgggagggcctttttttccctagtatatcatatgggcatcaagacccaactctatacttataatcccatggttaggtgggcatcagagcaaactgtatgtaagcaatagacacatacaaggttccccggggtgtggtcccgggggtgtcgcaagttgaaaaggggtaaaacatcgtcaggtgttcctgtttatatatatgacggggtaggttcaacgtcgtgtggtgtgtggtagattcggacgtggaaatctcctgctgcttgctgtagtcacgattttgcatgtcctggtggtgagcactgcacacaaaaacactaaaaaagcgccgtggccgtcacaaaggccagagtgtgacgcgcgggtgttgtgggactactgttgctgctgctgctgctgctgctgccgttgtacgacgtggctggcgcttctttatacttccgagtagatgtagtatcgtccggcccccgcagttcggtcatgagactacgggtatgtatgatatgtgttcattcctattccccaggacgacaggaatcatggcataaacatgcacacacgcagacgcaccgtccgtggccgccacaaaggaagagcttaatgtgcggatactattgtaccgtggctaccacaaagtagtagagggcttgaggactacaaccactgtgatacagtataccgtaataatgcgagtagacgccacccaccccgcaccgacttttcgagctcgatgtctccacagcaagcagctagaagaatatcagcaccgacaagggtggcgttggacagatctctcttaaaccgagggctgtccgaaaacatgtcatttggtattggcacctttgtttaggagcgttattgagctcgaaaaaatgatctggcggggggttgtttactcgcattattacgatagcagcgtatgatacatgtgatacagcagcagcaacttcacctctcggcacctccaacacgattacaagtattaataacgtacactcgattaacaaccatgcgtatataggaaagagaacaaaaccatagtattaataattgtacgtatgtcgcacccatcaaatcgggcgtggtgctaatcatggcatacagaaaactctggattgaccaaccgcacaagaacacccgccggagataaaaccggacgcttacagcgtcattggatcccacgatgactctacgccttcctccttttgaacctttccgcaaggtcgctagcctttgatccagttacagcgcgactttctgcggcaccttgaacaggcttcgattgagctcgacgaaggcgctcttgaagctcagaggtcttgtagccgttgttctgcttcaggggctgcggcctgcaagcacgagtggaaaattggtccaagattaaaaaagaaatgccaatgggtgcgatggtacaggtgattttgagcccgtatgtacagtagtcgtaaccaaactaaaagggcatattccacgtccacaaacaccggaatgcgccaaaacgcgaaaaaatacctgtccggtttgaagtcagcctgggaagatggggcgtgttccactccggagcctgagggtccagctgcccccatagccggttctcgtgtgcccaagccccccatccttctcctgatttcttgcaacctgtttggtcgaggctgggcggcatcttcgtccacgcgggtgacgtctatgaacactggccttacaatattttcgtctgcctcaaacgcaagagacttgcgcgttccttccatgtcctgccccctccgcgcagaccagccgccgtgcacgtctgccatacgtccacgcaggggggtgcttcgaactccgccgtctgcagcatgcggtgctttgcatccctcgaggataaactggcgaaaccgtggcttcaggcgaccaacctgtttcgcacaaaattggaatgttgttgcatgagttgtcatcgtcgcttcttagtgaaagtaatggtgtagtacgacgctaaacaagcagtatggacaaaacttgcacaaaaaaatcctgtgtgtacaccttcattacacgagttgctccaattctacacctacccggctttctagtctcaccacatgcagatcgcagacgcgtcgagtaaaaaggacagtacccacctggtcttcaagcgtggcctgcgcttctggccacctctctaggtagctctttagctcgttgagggcagtagagccatcttcaccaccaccgtgcacgctttgggattcagccgaaaccaacccgatcaaacgggcaatttccgcaacgtggtccgacttaaggtgcagaactggtgaagaatggcgacgacccgagtctccctgacgcaccgagcataaacagtgaaataagcaattggaaataagaaccgtcacaatgaacactgtttagctgtctaatagctcaaccacgggggtcgcagctcaaagcacgctctacatggtacagtaataagtcagatgcctcttccactgctagccttcttctgggacgatctagttgcgagtaaattacatttcgcctttggcacctgctaagcgtgaaaaaaggacaagcgctggggctgcaatgctctttccaacagaaggtatgaaaagtgttcacttcgtgcagaccaagaggttgcgtttcgtcttaacggcggaccagacaggcttgctggtcggtttgcgctcgacgaaatgccgttcattgaaggggaggcgcagttcgtgaggaaaactaacacactgattcacatgggcacggaataagtattggtctagcagacagcaaatgcgtacgtcaatcggacaatcggacaaacgcaaccttgtatgtaccagtaatatatatacgaataaactgctcacatcgttttccttcgacgtaaccaggagcc

SEQ ID NO: 270 - DNA, 21434 bp, unidentified
  misc_feature 1..21434: note = Fanzor polypeptide
  variation 6179..6236: note = n is any nucleotide
  variation 18412: note = n is any nucleotide
  source 1..21434: mol_type = other DNA
gttattcctgttgtctgtcgctcttgtttgcagccatgcgtctatggaactatttgtccccttttcgtgttgcattgctatcgcatgtgtcacgcctagtcgcgcgtccacttcagcccctctccccgccttcgtttggtggttggtggcctctctctttttgacaaaagagtccggtaccatccggctccctgaacgccacaatatgccatttcgtcgttgttttgtttctcatccctgtggcatccgcccacttctcattcttctgctgcccccatccccatgttctcaccaccccgttcctgctgttgatggtagatgacggcgctgggtttggcgaaaagggtgttgctaatgcgggtatcgttagcgccacgggaagagcagaggagctggtcgctcaggaggcttaagaaggatgccgagggcaacgtcaaaaaggcttcatgtagggagaagcacctggaggtgaaaagtaccgtcatacttgggaatatattgcattttaaagtggcgacaccagcagcgttttctgcacatctctctgtagcagaagccgcagcaacagacacaggcgcgtaaatggcaacaatcctttgagagagacgaactgaaaacactttggctaccccacaaccgcttacaccctccccgaaatccccacatctttctccctgcctgttcaagttgcgaccgagagcaaaggggggctctgtgggacatgaggaggagtaggccgacgccgccgtcgccgtcgccgactccttgagcatggattaagggcaaattccgcaggagcggcaccaggaacagcgacgtcagctacagcacctgctcgaagaggagcttcagctgaaactgtttgtgcggcaacacgaggggcagcggctccgggagcagttgattgtgtttgagcaactgcagcggcaccggcagacacaggtgcgtgaagggaaaacatcatttgagagagggagagttagagacgaaatgaaaacgcgtcggctgtacatttttgttgagtcgtcatccaaaacgagactccacgaagttccaacattatcacgtcatttctgaaaccgctatcgtcgcggggttctaattgttcccttcgtgatcgcccgagtcgatggcgtactttttgttttgagtcacggagacatttccgacgggaaaatagacagttttaatggaatgtaggtttagaagtcgggggacactgcaaatgtgccaaagaaaatggccgaaccgattacaaggactacgtgttcgttagcacgggatagtgtttggtcaaatcatctacattctgaaatatgtcctgctcaggttgagaccgagggcggtgggagctcggttgaattgaggaggaggccgccggcagagcctcagctgcagtcggagagggcgaggttggggccggtgatgcccaagcagcgccagcgtaccagagggcggacgaagggcagcatgcaggagaagctctcgcggaggcccagtcaggagcgtggcctacgggagggcttgtaaaggtgggtttcgtgtgtactgaagtagccaggaggcatgattgtgtatcctgaagtagtccggcatgcttcacgcgcccggatacacggccaaaaactcgtggaggtatgttgtgtatcctgacgaaacctggcctctctccccgtggccggatacaaggcaaaagagtcgtgatgggaagttttgtggatcctgaaacaatctggcattgctccccgctcccggatacccgatatgaagcgcgcagttcttggtgagatgtgtttttgcacacaaccgttttgaagattaccccgcttccttccccggcaccgccccccccaacgctgccgtctgcagatccatagcccgttcgtgcggaggccgaggcagaagggcgctcggcaacaagagcgagagtagcatgatgtattggagactgcggcacttgcatgctgagcttgtgaggaggaacggatacacggcgaaccaaatgggggactttcactggacgccatggaagacgccgcaggtagcacgagtagagcggagacaattcgcgtgctatccgtcggcacccgctttggtagttgtggtgttttgtgtgatttgtgtgttttgttttcttgcagtaaaacgcaaggtagaccacatcgaccatcgacgggcggataccgcaagaacgattgtagctgttgatgttggcgcctgcgttgatgagcaccaccatgcctgttcagaatcctttgctcgcggccacattgagcggtgtaccggacacacctcccactttgaagaagttgataagagcttcgatgtccgcgccagccttgaccaacgccttggttacagcaaggtgcttaccacagactaaaggtgtagagtggtatgcccgtgctcggtcttggtcgaaatatcagcaccccattgcagaagaactcgtatcaaatgcaagtaacccctgtacgcggcgaacatgagtggggtccagtcattgtcaccacgtgcgcggctaatactggctgaccctgtcgagaggagattaatcgtaagctcgacggaaccactggatgccgcatggtgtagcttgctcagagcagatggtatgttgaggatgtgtgttcgaaaacacgctcgtccaaacaaagtttatggtcaacaagtgtttgatcgaggccgttatctcgaaaagccaccaaatgcttttagcctggtacaaaatgagagtgggaatggcacggtatggtaaagcgtcacacaactcagctgaagaatttcctgagcgagaccgcgagcccgctacataatggcgccggtggtagtagaagtctgtcccgtgaccgacaggaacagtatgtcgttccaggcgttttgcgatgattgacgcattgtgagtttgtgtctatgtgcgagcggggttttgtctaagtgacaatgagtctcttttgtggagagcggcttgttcaagcacacaggtcgattttagaagttattcaaatcacatccatccggcacgcagtacccgctacaccgctagcctgactcttgtcctcggtgggggccacgcgccttgaaacatccccggcctttcaccgctgccgtcggagcgtgatgaatcgccgacagcgggtgctgaaagacgccgcaaactaggccgcctttcaaaggcatatttcaccgttcacgacatgaaacacccccatcttcttcgtcccgctcgactcacagcgatggaacattacttgcactcgtcaggacacgaaccaacggatgcagggctggaatcgttccccgagctctttgcagctgttggaggtgatcgtaatcacactaagggggaactcttgtgctgatgtggacgtcaaatgatgcgctgggcgcggcgttggttacggtgggtgcggccacgatgtatttcatcaaacgatttggggaagatggctagcgatggccgcgttgcaaagttgttaccggataatggaggcaattgttgcgcgcgatttccccgaccagaagtttattaacaggagcttccgctcggcggccctgcagttttctggcgacaggcaggtcccggacaggctcgatccgtaaagactggttgatgcggtgatcgcaacccgtacgtgatgtctgctgtagtccatcttggcgcggatcgggccatgatggttcgggactggcagcgggggctgagaaacacatcccttcgtcggttggcagagagtcagttcgtggatgtggtccaggcgttggtactgaatttgtcggcaaaggagatggggacgacggactaatttggctgtgctcctaccgaacatgtggcctcggaggcatacctttggcaacgtttctgattggtagggaggggtgtatcgtgtcccccctcgaccgcagcggcaatcaagtatcgcagacgttgtggggaatgaagcagcctttccgcgatttcagtcgtagcgcgtgatagggagaattcggccaagcgtcggggggttcttctttggcgcaagcgtggtgtcaatggtgatgctggtgaagtccctccgccaggaatagtcggagtgttgcaagaatctggtaggatttgttaaaacgaaagtgtttcaattgactcaggagcagccgctgtctgtccaagtgagacaattcttcagaccgccgccagttgcgttcactgagggtctagaccgcactctgcgtcatgttgacgagggaaagggactactgaacattctcgcgataatctgaagacatgcgccgcaggaggaatgtgatgagaagggggaaatccccggtgtttttgtgtcccggccgatcgttgtacagagatcatacacagaaatgcgtagtacaagacacctaaaacgaacaggtgacgccagacgccaatagatgggacgtgaaacacacacaccgcgttgcaattgctattgctgtttccgtctgacaaaacacaactctgcaggctaaaaaaacggtcgatgaaacttttttgtgggatgacaaaacactcggacagcgaccatcgaacaattgtcctttcccgtcaaaatggtccggagaaccacgagaaagtggacgcacacggagcacattgcttttctctgcggcgtgcagatgtgggagaggaactgggccgtggcctcgctagtgccggccgacccgctttgtggtccaaacaagaacgtcctcaaaatcgacaaaggagagcgattgacggatagattttcgaggagaattgacatttacaccgtggaccgcacgaaccacacgtttttgccgattacacctccctcaatcatgcgtttacgaaggaaatacgacgaacccctgcttgtcctccaagacactcaagcatcctagcgctcagaaatttaccttttggtttcattaccacgccccgtctgtatctacgttcgctttctcatgcccttggtcaccaacttgacgggtttgaagcggtagatctcgcgtgaatcgctgactatgaagcctaagcccttcttgttcttgagcagcgtctccactttgcggcaggctttcgacgcggctatgacattaaaagaaagttgcgtctttccctccttgagccatcctaaaacccactgcccgttgtacgcggaatcagagctgtccttaactcttgtgtagaatatatcaggaaactcccccttctcgtttggcttcacaagattgtacgggaatttgacgccctcttggaaaaacttcttctggaaggttctaaacctcgtctgcaatacagaaagcgacatgggggccaaaacatgcggttgttggtatgcgattgttggtaaatgtcacaagttgacaaatggatgaacgggtgcggaagcgacagatcggaccgagccgctctctacatacgattggaagctcgcgtttctgaccgaaattcacgctaacatgttttctgaaatgcgtaagctgtcttctcaccacagtttcgccttggaagtggtgaaccatctcctcccaaacttcatccgagtaacacgtcttgctcttatccttccgcgcattgagaagagcaggaagaaatcctgcgtgacagcgaacagggagaaacgcaacacatgtatgaatgaaatgacgtttggtgctccgatataaaaaccttccattcttactttggccactttcctcctcttcctcgtcgcctgcgttgcctgtgaaacgggcggcaacgagattagacaaccaatacatcgccaagtgagaaaaaaaacaagagaaggcgcaacgtgcgtccaaaaaaaaaactttcatgcgtaccgtggccgctccccccgccttcttcgtcctcgtcgccctcctcctcttgatcgtctaccgcgttgcctgtgcaaagggcaagacaaccaactattattcgacaaccaatacatcgccaaaagagaaagttatgtcaaggaggggcgccaggtgcatccaagaaaaaattagtccatgcttaccgtggccgcattcctcccctgcgtccgcgtcggcttgctcctcttcttcatcacctgcgatggctgtgacaacggtggcaacgtggtcacgcaaccaacattttgccaaatgaggaagcatttcaagtcgcttccccccgcttctacgtccattgtgccctcctgcaatgtagagaactacccccccccccnnnnnnnnnnnnnnnnnnnnnnnnnnnnnnnnnnnnnnnnnnnnnnnnnnnnnnnnnnctgcaatgtagagaactcccccccccccctcgccaccatcacgcgtgtccccggtgccttctggagacgaagagctggcaggaacaatgcgtgtgtcttcgtcggtgcatggcacaaggaagggcggcaccgtggttggacaaccaacacatcgccaaatgagaaaaagtgctaagctctcaccggtcttccttgacacacgcctagcggtagtcagacgagtagcaccaacagcagtagcagcagcagcacgctttggcctctttgacggccctgttacacgaaacaacaaatcgaacaacacaggaacaaacactcagaagatgccaagccgtcttcgtttcttccccggtggccatcgcgtccttctttcaagttcccgagcgcgtaccgcactcacctacgtccccatccgctcctcctgtcatcttcccctgcaccctctttcgcgagcattccggtagtgaaggggtttcacctgcgtattgatgtgcaaacacctcgccaaatgagaagatatttcgcgtattgctgcgatttgttggtgagcaggtgaatcgcgccatgtgagacaacaaatccacacataccgaactttcgtgccttaccgtggccatttcccttgtctccagcgttacgcgagcaagcaactataggggtcaatgctgtcgtcgaccggccttgccacagcaatgatggagttgtcaccaggggctgaggctagcatggcgttggtcgccgaggcgcgccgctggatgtccttgatgcgatcggcgaattcgatcccgtcgcgcccggagaattggttgacggactgcagttggtccctgcaggttctgcaaatgtcgatctcgttcagtgcaatggtttttttggccatgaccgaaacgaaaaagcccttttctcttcgtccgatgcgtactcaaaccaaaagggttcttccgaccgttgctttttggcgggtccttggtccaaaagaaagccctggtacgccctgccttcctccgtgctctgtaagcgatcgcagcgctgttcgatctcatcgcaaagacttgtgtcaccaccgagcaccctggtgatggtttgggctgattgacgcctgaattccttcgcagcgttcgaaggcagtagccaaatgatttctacgagagttgaagcgtcgcaaataggggtgacagggcccttgtcgttgatcctgacgtattcaatgcgttcagaaagtggaatcgtactctgtgcattttgtccaggcctttccatgccatcccttttttccttttcaaggacacgtgtgagcatttttgcagcatattcggcagacgcctcgggacacagcatgcggttgacatcgataatggaccctttcccagtgttctcgtcgatgcgcacggaaccatggattcccacggtcctcagcgccttttccaacctagcagttttcgtttcagcgtgagcgacatggtccgataactgatgttgcgcctgtgcacgcagacactgacaaacgcgctcgacgtggtttctgagcgattgtttaaatgcctctcccgacgtgtcccgccacgtgtcccaacctttcccagatatgttgttcaatatatagtcacatacttcgctcggaacgacagatgtgattctgccgtgtacctgacgcttcgaaatttttggaccactgaaatcattgttgtaaagttaagcatgttgacaacttaaatgttttttacaataagaaaaaaatgactcgcccgatatctcctgaaatatacgatgcattcaaaaagtgcgacgcgcaatggatgcagaggcggcgaaaactggacacatcttcagtgttctacacgatcacaaagtgctgtactcgagagagaggagtttctcatgttttgaaaatggaagccgaagaatattcgtcgcaggcggtacacttggccagaaagaagcttccgatcggggctttcaaagaggtgaaccgttttttgcatcgagggccacatgaaccacgcatatttgccattgatggttcgaaggtgcatgtacacccgtctttcatcaaggctggttacaaaacacgaacaaacgacaagccagtgccgcgtcctgctaaaagacctctggtcatgctttcgtcgatggtcgatgtgagaacgaaatcatgtatagactttgagcttacgaaacacttcgacgaacgaagggcagctgtttcgatgctccgtagtgtgcggaaaagtgacacgctgttgtttgacaggggatattactccaaagacctactccgcagtgtccatgactccggtgcatttggcgtctggcgactcaggataatgcgttcaagggtactaggtctttctttaactcgcaccacacggaggtagcgtgtctcattcttggtgttagggtgcgcctcttgaaatatttcatcaaaggtaagacgtatgtctgcctgacgaacgatccgtccttatctcgacgagacatcaagactatgtacgcatggagatggagagtggaggaatccttcaagcgattgaaatcaaatctcaagctcgagaaagctcacgcaaaaacacccgctctttatatccaggaggtggaagccagggtgttgttagacacgatcactctgagaatgcaaagcagtacgaaggagtcgtcatatctgtatacccttgatacacacgtcacacacattctccgtaacgttaaaagagtctccggtcacacgagctacaggtttgtagcagagctacagtcaaaaaggccgtttggtcggattcattgcagaccaccggatgacaaacgtcacaccaatcacgccctcggacgttacacgcggtggaataccggaagcgaaagtttactcaaaagttcttgactacaaaacctcgcaccccgtctcacacttcatcatcatcaccatcatccttttcgtcatggtgagaccgtcttcggatggaaactcgcacaagaagaagaaacacaagaagatacatccgagagctcctccaaaggacgtcccgggatttctgcggacggtggggagtctctaccccaagggatacctcaccgagtcaggaaatctaccaaagaaatacaagggtacttattgttgccagctcttctccagagtcaagttcgggaaagaagtgtctcaaaagacaaggctgagaaccgtgagcgtcggatttcgggcagcaacgaccgatgagaaacgcgacacttttcagtccaagatcgatgaggcggtgtatcacctctctcgcgaacgagttctggcgtctctcttcgcgaactttgtgttcttggaacgtcttcaaaacggatcagcccttccagagcccgacagtgccttttacaggtcatgcttgtcatcatgcatcgaaagcagcggaggagggagtcgcaacgacgacttcgatcgtttttccgacacaacgggactgacaaggctcgtgcctcccagaaaactgaaccttaaccaacagcgagagcacgaggcacaacgcatggcaacggcaacgtcgacgcgtgcaacacaccacgcggaaaagaggagaatttcgatcacgaggtggtttctgtgcttgcggatatccaggggcgacctcgtgtacaagaagtatgctaccaagctatacgatctagcgaagaaaatcatcacggagttcgacggcacacccgagtacgcagaagacctccgacaaaaggcacaatcaatagaccctggcacggacatcgacaccatcctcgacttcgctcggtaagaaaaggagttctccgatcgtcaggatgggaagtgcgcgtcgacgatcaaacacctgtactggatgttcaacacgtacgtcgccgactccagacgcatgtacgaggagaccgtatcccgagctcattcgtatttccccggtgaagacaaggagtgcaggaacaagaggtacgaattcgtgaagaacgagctcggagaagagttcacctacgctccccccaaagacaccgccgttctacccatttgctcaacgggttcggtgttcatctacatcgacatgaagacgcttaagtcatgggggcttctgcactccaacgatgcttggtggtacaaggacgtcctccgaccgttctccaaagaggccaatatcaagtgtctcgcgaacaaagagaactccaggtacgcgtcaagcgagcatggatacctctcgagtttgctaggaagtggtccggacaagtgcccctggatgattggtgagagttttttgacggacggtgtgcagatcaagcttctgcttgtgacactggaacatggaagaaaagctttccccgggtccacccagctgaacgaggcggggtacaacaaacttccccgggctgacgtgcaactagaaagtctgctgagagagggaagaggagtgtacaatatatccagcctcttggattctccaagcatcagggaagacgttgtcgtgatgtccgcggacccgggacaggcgaaggtgatcaacgtttcttcggccacggccagaacttgggcgaggcaggaccctggtgttattcttaacagttcgacgtgtgtgttcggggatgactatcgtcgcgatactcttgcctcacgttcagacaagtacgagactttcaggcgcaaggaccagccttacggagtggctatcgatcgtctacgcaacgagaagaaaagaacttcctgcctcgcgacgttcatccggtactgtaaaagttggtgtgcaaacggtgcggcactgttgcttgagacgcttcaggaagcaaggaagttcttgcgttttgatcgattcagagctacgcagaagacactcgccaagatagcggacaagtacatgggacatgtaggagacccctgcagggtcatgttgttcggtaaagcgtcttttcgtgcgcagaaagggagggcatccgccccaaggaaagctttgatcagagagatggccagcaggggagtagtgttgatggtggaagagtacaacacttccaagaagtgcccggggtgtggggaggacacggtcgaggacaaagaacggagaatccggagttgcaaaaactttaagatcggatcaccggaagagtcctgtagacttcaccccctgacaccagagtttgaaatggatcgcgacgacgtagggtcgactaacatcggtatgcgtggtttcggcaaattgctgggtcaggagtggttttaaggatttttttcggattttcacttgcggatgatactttatagttggttttggttttcctaaagttgacaatagtgactgaaatcacggagaattccctccaccttcctcagaatatctttttgatttatcgaaggcctagccgtttttatcagagaagcgactccgacatgacctgtggaagcatccacgaccaggttgtccatgatttacgtttgagagatgaaagacattttttattggcagttttgtacgcgccagtgttgaaggcaaacgagtctgtcgcccccagcaacgcgtgtggcactggtatcggagcgtgctacaaacgtaaacccggtcgcggaatttaaatacccctccacattcccgtggcccgtacctcatcgagaaagctcgtggtaccatcttgctccaaggccgatggcccgtcgctactgctctgccgccgaaccccgcccaaatggcgcctattgtggaaaaatgctgccctggcgcccccgcttggcaacccgacaaaaaatggaacgattgccctcctgctagcacctggctactgttctgccacctagcgcacgagggcacaattgcctacaatttcgacgacccgaccatctgtgtcagggtactacccaaggccggcggggcgcacatataccaatgccacagaaactgccataaatcggcaagaacgatgttaacttacggacagaagcggtcaagaatgcgtttactccaaccgcgtccccaactcgcaactgggcgctacatcaccggcgtctcgatcgcttacttgctcttttcggcggttgtggtcgctttgcccccttcggagggtcagcatattcgatggtaacctccgctcctacctcgatgtctgcacacgctacgatagagcattcataccaccatccatactccacaccccccgccctctcgtaccaccatggcttcattcgtcctccacccccatgtattaccaatttagcattcggcgcgaacgagtggttgagtagtcgcaacaagctgatttccatgaacgctcgacaggcggggatcgtgccgcgcatggttttgctcggatcgatcacgagcgctcctagaccatccgcatgcatgatgtaacccatgcacgtatatccaccacctttcttttcgtaccccgcgggcacatctacatccgggagaactaccgtcaagagagtatcgccttcggcaaaagcgaccttggtgccgagacccttgcagtggattaggctattgatttccttgagcgcgtcgtgcgaaaatagatctttttccatcacgtcgtgtacctgattgatttgcaaagggaatcagcggcgtttgtttggatgacgcgcatcgtatgagggcactgctttctgcaacaacatgtgaagcaccgactacatgcgcttaccgttaaagcgggccgctgtaccggcggttgctgctgtgtgctgcgccgcaggtggtcacgtgcgggtgggctagccttcttcagttggtcgcgtagtttgtctctgtcttgctgtactctcgcgagtcgccgctccaacttttctgtgtctgccttcgcttgtgccgctgcattgatttccgcctgctgctctcgtctcttggcctcgagctgcatattcccgggacacacaaggtcaagtcaaaacagcgcgtgtgtgcgtgttgactaccgtctatatagaaatgaaaatgccatgtgtgacaacaccaactcacagttgcaagcttgcgtcgcagctcgtcgttctcctctttcgccttgtctgctgcctctctctccctttcacgcacaagcttctccgattcttcctttcttttcttctctgcttgtgcaaccctctctgcatcctgtgagaaatgcgaaaactacagcatgcggtagcggtcaaagggtagacgcgcgaatgggcagctgtcgtggtttttttgttgcgcagaggagtgcatctgttttcgatttaaaacagaatttacagcgcctcagctactgctgtacatacaaatcgggaacatgtggatcccacactccccacctcgcgtccctgaacgcttgctgcttcggctgctgatacgaggacacttagcctgctgatcccttgctccgctccggtcgctggctcaacatcgctcgccgccgccgatcctgcaccgggcgatgcgctggactccatagcggtcacccccgctgcaacgaatgctgctgctgcgacgtctactgctgttgcaggtgctcgtggctgagggacgactggtcgctctgctgtacctttagatggaccagccattccgttcttcttgtgctggccacagtgagtccgagcgaggccaggaaagccatagctggctgtctttctacactcttcgcactttttgagcaaattggtcataccctccgcgacgtggtcggcacagcacctcttcttgccatccgccttgaaaccatacgaagggtacttgttgcaacccgtgtgactacacttttgggaatgtatgaggtgaaacaccccttccttcgcctcatccttgcactgcttgcatttcccgtcgattctaccctgtgtgtctgcaatgaaagcgccgttgccatctgaagggaacacgtcaaagttgaaaaaaggggcaagcaggagagatgccacaccctttttcagatgttttgtacttctgctgtcgtggaaacaaaaatgcgagactcgcacgcgtcactgtgttgtagtacagctgacgtccagccagagctctagagcgccaatagcataccgccttgaagcttgacgtgtcgagggctccatctacagtcttctccagatgcggcccaacagcacaaacagtacacacagcagcgtgctctcggtcggagctcggttttggaaacgatctctcacctttccttgcatacacccctctccctcgtccgcaactacattttcgtggcatgttgtgagctgacctcgggtcgactgtgctcaggttccctccctctctcctccgccctactgctgtctactattggccccggggcacgctttttgtactattggcccatatgcggggatggggtgtactattggccctggggcacagtgataagtgtactattggcccgcgttttttcggacggaagatcaagcagcgcacctcgagttgcgcacaagagcagaggaaacacacacaacgccgccgtgcctctgctgctgctccgctgctgatctgttgctctgctgctctgctgccctgctccgctgctctgctgctctgctgctccgctgctgctctgctgctccgctgctgctctgctgctctgctgccctgctgctcggctgcccttctgccctgctgctgccgaagcgctgccgccgctgctgctactctactggtgtgctgctgccgaagcgctgccgccgctgctgctcctctactggtgtgttggtgtactggtgtgctggtgtactggtgtgctggcgtactgatgtgctgctgctgctgccgctgctgtgctgctgtgctgccaagcgctgccgcgttgcaggtgagctcgatgttgcacgagagagagccgtgatgcgcgtgaatgaagcaaggagtaaaaagggtgttgtctacagcgccgtttcgtctccgtgaaggaaaggagaagctgggccacaatacggtttgcttttcggcgcaattgaccagcaccggtaaggcacgagccgagctttcagccgttgtgctgtgcgagcgtcaaggttttgagtgtgtttgatttaaaaaactgcttcagcaacaaagacagccggtgcacactgctgcaacaagatgctagagttcaaactcggcatcaagagtaccatcgtctaccagccgcgccacacacttctgtcgcattcccttgtcgtgaggtacttccgtaccgatgctcgagtgtgccaaaaaagaatggccggccagtggacgaacgagtcaccgccgctcggcggccaagccctgctgatttgcaacacggtcacaattaacatcgcaacatcaatccagagcgccaaatcctctgcctgtaaaactatcgaaacgcttcacgttgtcatggcccatccgccgaagcctcgcccaccggcaccgccacgcacgtaatcgaaccactgacagccgtagtttaacgcctctggacagtaataaattaacccgtaagaaatgaacaaaaccatccaaaattggtaggtctcgttgaatccggagggtctatattgtcgaaagtaactacttccggacagttattgccgtacccaaatacgacactcatcaacaaacaacgattttctaaagcttaaacaaggttaggggttctcgcgaaaactaatcggggctgactttctttcgaaatctgccgctcctctcgctgactgtcgatattagtcgctatcatgctattgaggagagtacctccattttatgtacacttttctatcgatgtagcctgtgatgatcaaacttccatttaacgactgatgtcgatcctcgtggaaacccctgtggaggcccttaaagagcgattcatggggatcgttggttgcgcgatgtagagctcgttgtagttttttcgtagcgtgttgaatttgacgaccctgtacagcagtgttgtgatgtcggccttcttcttcctcttcttttttttcctcgtctttgattttgtggcggtggttgccatggtgaaggtgaattgtgaccgatgtggacgatcaacacactccagtgtttaccgataaaattgaaatcaaacgtcttttttgcaacattttatttctcgccaatcgaacgcacttctagaaaaagctcttgattgccgaatttagtacacttgtcattcactagttgacaacacccctgatcctttccgcgaaccaatctttgtcgagttcgtcgaaacaccccaccgactccaactattctttacatgatgtcaaggtgtcaatctctgactgaaaattgatacccgctccacccctttgaccactcgtctcaataggttccggacgtttcgcaggagctcgcggctgcacaggtgactggcactcagccagacgaggcagtggcggcatctgcatctgcgtaggccgtggtcgagacggtgacgcctgtgcaagagacggagcatgagcagcctgttccggccagagaggccttggtgaaggtgacggggcggtgcaggcagctggagaggccgatgcaggcgaagtgacgtcagtgtctagcgcgttggctgtggtagcacaagagccgggcgaagcacagcgactacagaaaagccgcggctcgcacgacatgctcgggcatgcaccagcagcaacggcactccagtgtttaccgataaaattgaaatcaaacgtcttttttctagaacattttaggatagtactgtctactatgcttttttgcaacattttatttctcgccaatcgaacgcacttctagaaaaagctcttgattgccgaattaagtacatttttcattcactagtcgacaacaccatattttttggagctaaatttacgcagtacgttttacacgaaacatttggatatgtgaggtgacgacccgacgatctgtgtcagagtgagggagcgcaacgaagccggtggcccaaaaacgcatccgccgacgccatcaggcaaatagctaaaacagatggcggccgagaagcaagagtccgagacactcacgcgacagcacaacgacaacacgctgtggcgcaacggcgtgctgatgaaaaagttttttttaaaggcgggcgacggcatcgtccgtagctacgggtggaagaaggcgcccgaagagcaataactactcccaagccccgccaggcccaagcgcaccaaggttgcgtagctcatcccccaagcccccatcacccccactcgttccagcgtggcggcgcaccccgaaaccagtgtgtccgacctggcacagctgaaacatgtggccaagcataccctccccgcagcctaccccgccccgccgatttcaaaaacgacacccgccccggttgaaaacaatgctagaatcgtgtgcagtcgttaccccaccccctccaccccctgttccccccgtgcacagtcgcctaaaagtgcgcgacatggtccgatgactggttgcgcctgtgcacgccgtcgctactgctctgccgcctagcgcctccccccagcccgctggaccccgccccaatggcgcctattgtggaaaaatgctgccctggcgcccccgcttggcaacccgacaaaagaatggaaagattcctctacccactactgctctgccatctagcgcccgcccaccccgctcatcagatgccagcaaccatggctagtttcggttcgcagtctatcatttcatcagggcaatcgtaaccccatgcacggtacttgcaataaatctgaaaccgggcgtcctccttgtccgcgtcgacggcacggaggtccgcttcaacctctctatgtgtcttttccggagtcttaggaagtttccagccacttggcttcgtcagtgtcatcgtcttgatctttcccacgctttcgacactaacacttcgaatattagcctgctccgaccgaatgtggatccatttgcgatcccatgggttgagatccggcagggacaccgaactttcagacgatgaaatgaagtccttaaaaaccctgtcgagaacctccgtaggttgagaaggttgtggttttttatatcctccccgcttgcgcttggacttgaccgatgtcgtcatctcgtgtgcgatgtggtcaggtcgcctggcccctctgatccattcttcataatcgtaccagtcgatgagccagaagtcaaatagttcaacatcctcgtctttcattgttgaccagcgaagtccgtctgcgtagctcgaaagaaggttccactgatgttgcgtcttgaatacggcgtcgaagcgagagtcccatgtgtctncttggacttgaccgatgtcgtcatctcgtgtgcgatgtggtcaggtcgcctggcccctctgatccattcttcataatcgtaccagtcgatgagccagaagtcaaatagttcaacatcctcgtctttcattgttgaccagcgaagtccgtctgcgtagctcgaaagaaggttccactgatgttgcgtcttgaatacggcgtcgaagcgagagtcccatgtgtcttgcgaaaaatacttcgcatcaggaaataacattctcataggtacgagatcgttgtggaggttttccagcgcgtttgttgcctcttcttcagttggtttccagttggtgatttgtgatgccatgttttttgtaggaagtgtgagacggaatgcgcgttttaaagttcataacttttgagtaaactttcgtttgctgacgtcggggctcgactcatcctcgacactgagagagatccgatgtgacgatgagatgctccagctcggatgcaaatgcgagcgtctttcggatcacatctttcgcgctcccctttttcgatgttgtgtcaacgcggatagtagaactatccatgctttcgatgaggtccatgtttgtttgtttagttgaactttgagaacatatttttgggagctaaatttacgcagtacgttttacacgaaacatttggatatgtgccgagaaactggcagaggaaaagtgtccaaagtgtaatagagtaggaacgctttgtgggtgggattagtgggttacatttggttgccaccgccccgaccatcccggctatcgctagaataaacctgtctttacgaagttgactttgaattgtttgtaccccatttttgtccggatacgtttgaatcttccgccaataaccaattccaaactattgatttcatctagcaactcgttagatacgtcttttttgctctcaaggtgccggcgagccagcattctcccgaccaagcgtattactacaaaaagaacgatcaaaacgccgaagacaatgccagattttttcaacatgatgctgtcccgtatttataaataaaaacattttattttaatatatccagtcattttgtgacctcggcacccgctgatcaacccgctgccaactggtgcactcctcctactgtgcccacccgccattttgtgacctcggcacggttgaaaacaatgctagaatcgtgtgcagtcgttaccccaccccctccaccccctgttccccccgtgcacagtcgcctaaaagtgcgcgacatggtccgatgactggtgctgcgcctgtgcacgccgtcgctactgctctgccgcctagcgcctccccctctgccccgtctgggctgttcgcgaggcctctttttgcgacgagcttgtgtgccacacacatgagaaatcaagtcaccgatgcctctgacagtctactctagggcagcatccgccacacatgttgtatttgcacttcatcgcagacagggagccacaaccacatgtccttcccgtgccctgagaggacggcgtactattcccgaccatactcctcttcagcgctctcttttcgcgtgagaccagaatgctacgagcactgtttacatcataaccgcggcggagcaagaccaccgcttgttctccgtgcttacgaacgagtgcatacgggccgctcaattctcttccccgtttaagaactacactgtgcgcctcttcggacaggtctgcgttggcgcggatgatggttgccgcggcaacgctctcctccgccgacagcttggacacgaacttcttggcgaatttcgggaccgtgcgcatccacttgaggtaggtcgtgtcaaccatgccctcgatcgacgccctccggtcctcgtttaaaaccttctgccttttctgacgcgtaatcctctgctcctctgccgcgcgctcacgcttctcttgttttgctgtttcttccgcacgcactctctccagacaggcgttcaccttgtctccatgagccttgaagaaaaactcgagagtcatgctctcggggatgacgccagggatggccttggtgatgatggtgttgtattcgaactggccgtagtacgagctgtagccgcccctgacgttgaccgggatggtcgaccacacgaggcgcattagcccggtcagtattccgccgttgatgtagcgcacgttggtctctaggcccttggtacacgctggatgcgccgggattccccacggcgctcgaattccgcccatgtagctcttgtggcagacgagacacctgcgctccacgatggctttcaggtgcccgagtcccggattctcggcgagattgcacagagtttctttctggtatttggtcatgttgtgctgcgcggcattcaaggcgagcgggatgttgccgtacacgtcgtctttcgtgaacctatcggtccttgcgaacgctgccacaaatttcgtatcgggtaggaaggcgaccaccaggtcgatgctgaattcggcgagcatatgtagtgattgtaagagtgcttatgccttgccactattttaatgtttacagttaacaaagtaaggcaccttcgccaaattaattgcccaccagctacccctggtgcgtagaaatcaaccgccccatccccaaccaccgttactacgctgagaccacacgagtaaaaatattgccatggcacaagatggagaacctactcgaggtttgcggggagatgggccttgaggtagactacctcagtctgacagaacgcggggcgttcgcctttccgatgaaggaaaccactagggcgttcaacatgagcgaagataaccctcaaaccgtcacaactgtgcgcgataaaaacgatattgccaacaggaagatgtctgccacactgtacaaccggcggctaagtggggagagcgtgctcagtgcccctgaacaagactgcgagggagatattggtttaattttttgcaacggcgtcgtgcattcgtgggatcatcccaaatcggtctcagagtggagaaaatttttcaagtagtgtgcta

SEQ ID NO: 271 - DNA, 19877 bp, Ectocarpus sp.
  variation 1..5167: note = n is any nucleotide
  variation 18175: note = n is any nucleotide
  source 1..19877: mol_type = other DNA
nnnnnnnnnnnnnnnnnnnnnnnnnnnnnnnnnnnnnnnnnnnnnnnnnnnnnnnnnnnnnnnnnnnnnnnnnnnnnnnnnnnnnnnnnnnnnnnnnnnnnnnnnnnnnnnnnnnnnnnnnnnnnnnnnnnnnnnnnnnnnnnnnnnnnnnnnnnnnnnnnnnnnnnnnnnnnnnnnnnnnnnnnnnnnnnnnnnnnnnnnnnnnnnnnnnnnnnnnnnnnnnnnnnnnnnnnnnnnnnnnnnnnnnnnnnnnnnnnnnnnnnnnnnnnnnnnnnnnnnnnnnnnnnnnnnnnnnnnnnnnnnnnnnnnnnnnnnnnnnnnnnnnnnnnnnnnnnnnnnnnnnnnnnnnnnnnnnnnnnnnnnnnnnnnnnnnnnnnnnnnnnnnnnnnnnnnnnnnnnnnnnnnnnnnnnnnnnnnnnnnnnnnnnnnnnnnnnnnnnnnnnnnnnnnnnnnnnnnnnnnnnnnnnnnnnnnnnnnnnnnnnnnnnnnnnnnnnnnnnnnnnnnnnnnnnnnnnnnnnnnnnnnnnnnnnnnnnnnnnnnnnnnnnnnnnnnnnnnnnnnnnnnnnnnnnnnnnnnnnnnnnnnnnnnnnnnnnnnnnnnnnnnnnnnnnnnnnnnnnnnnnnnnnnnnnnnnnnnnnnnnnnnnnnnnnnnnnnnnnnnnnnnnnnnnnnnnnnnnnnnnnnnnnnnnnnnnnnnnnnnnnnnnnnnnnnnnnnnnnnnnnnnnnnnnnnnnnnnnnnnnnnnnnnnnnnnnnnnnnnnnnnnnnnnnnnnnnnnnnnnnnnnnnnnnnnnnnnnnnnnnnnnnnnnnnnnnnnnnnnnnnnnnnnnnnnnnnnnnnnnnnnnnnnnnnnnnnnnnnnnnnnnnnnnnnnnnnnnnnnnnnnnnnnnnnnnnnnnnnnnnnnnnnnnnnnnnnnnnnnnnnnnnnnnnnnnnnnnnnnnnnnnnnnnnnnnnnnnnnnnnnnnnnnnnnnnnnnnnnnnnnnnnnnnnnnnnnnnnnnnnnnnnnnnnnnnnnnnnnnnnnnnnnnnnnnnnnnnnnnnnnnnnnnnnnnnnnnnnnnnnnnnnnnnnnnnnnnnnnnnnnnnnnnnnnnnnnnnnnnnnnnnnnnnnnnnnnnnnnnnnnnnnnnnnnnnnnnnnnnnnnnnnnnnnnnnnnnnnnnnnnnnnnnnnnnnnnnnnnnnnnnnnnnnnnnnnnnnnnnnnnnnnnnnnnnnnnnnnnnnnnnnnnnnnnnnnnnnnnnnnnnnnnnnnnnnnnnnnnnnnnnnnnnnnnnnnnnnnnnnnnnnnnnnnnnnnnnnnnnnnnnnnnnnnnnnnnnnnnnnnnnnnnnnnnnnnnnnnnnnnnnnnnnnnnnnnnnnnnnnnnnnnnnnnnnnnnnnnnnnnnnnnnnnnnnnnnnnnnnnnnnnnnnnnnnnnnnnnnnnnnnnnnnnnnnnnnnnnnnnnnnnnnnnnnnnnnnnnnnnnnnnnnnnnnnnnnnnnnnnnnnnnnnnnnnnnnnnnnnnnnnnnnnnnnnnnnnnnnnnnnnnnnnnnnnnnnnnnnnnnnnnnnnnnnnnnnnnnnnnnnnnnnnnnnnnnnnnnnnnnnnnnnnnnnnnnnnnnnnnnnnnnnnnnnnnnnnnnnnnnnnnnnnnnnnnnnnnnnnnnnnnnnnnnnnnnnnnnnnnnnnnnnnnnnnnnnnnnnnnnnnnnnnnnnnnnnnnnnnnnnnnnnnnnnnnnnnnnnnnnnnnnnnnnnnnnnnnnnnnnnnnnnnnnnnnnnnnnnnnnnnnnnnnnnnnnnnnnnnnnnnnnnnnnnnnnnnnnnnnnnnnnnnnnnnnnnnnnnnnnnnnnnnnnnnnnnnnnnnnnnnnnnnnnnnnnnnnnnnnnnnnnnnnnnnnnnnnnnnnnnnnnnnnnnnnnnnnnnnnnnnnnnnnnnnnnnnnnnnnnnnnnnnnnnnnnnnnnnnnnnnnnnnnnnnnnnnnnnnnnnnnnnnnnnnnnnnnnnnnnnnnnnnnnnnnnnnnnnnnnnnnnnnnnnnnnnnnnnnnnnnnnnnnnnnnnnnnnnnnnnnnnnnnnnnnnnnnnnnnnnnnnnnnnnnnnnnnnnnnnnnnnnnnnnnnnnnnnnnnnnnnnnnnnnnnnnnnnnnnnnnnnnnnnnnnnnnnnnnnnnnnnnnnnnnnnnnnnnnnnnnnnnnnnnnnnnnnnnnnnnnnnnnnnnnnnnnnnnnnnnnnnnnnnnnnnnnnnnnnnnnnnnnnnnnnnnnnnnnnnnnnnnnnnnnnnnnnnnnnnnnnnnnnnnnnnnnnnnnnnnnnnnnnnnnnnnnnnnnnnnnnnnnnnnnnnnnnnnnnnnnnnnnnnnnnnnnnnnnnnnnnnnnnnnnnnnnnnnnnnnnnnnnnnnnnnnnnnnnnnnnnnnnnnnnnnnnnnnnnnnnnnnnnnnnnnnnnnnnnnnnnnnnnnnnnnnnnnnnnnnnnnnnnnnnnnnnnnnnnnnnnnnnnnnnnnnnnnnnnnnnnnnnnnnnnnnnnnnnnnnnnnnnnnnnnnnnnnnnnnnnnnnnnnnnnnnnnnnnnnnnnnnnnnnnnnnnnnnnnnnnnnnnnnnnnnnnnnnnnnnnnnnnnnnnnnnnnnnnnnnnnnnnnnnnnnnnnnnnnnnnnnnnnnnnnnnnnnnnnnnnnnnnnnnnnnnnnnnnnnnnnnnnnnnnnnnnnnnnnnnnnnnnnnnnnnnnnnnnnnnnnnnnnnnnnnnnnnnnnnnnnnnnnnnnnnnnnnnnnnnnnnnnnnnnnnnnnnnnnnnnnnnnnnnnnnnnnnnnnnnnnnnnnnnnnnnnnnnnnnnnnnnnnnnnnnnnnnnnnnnnnnnnnnnnnnnnnnnnnnnnnnnnnnnnnnnnnnnnnnnnnnnnnnnnnnnnnnnnnnnnnnnnnnnnnnnnnnnnnnnnnnnnnnnnnnnnnnnnnnnnnnnnnnnnnnnnnnnnnnnnnnnnnnnnnnnnnnnnnnnnnnnnnnnnnnnnnnnnnnnnnnnnnnnnnnnnnnnnnnnnnnnnnnnnnnnnnnnnnnnnnnnnnnnnnnnnnnnnnnnnnnnnnnnnnnnnnnnnnnnnnnnnnnnnnnnnnnnnnnnnnnnnnnnnnnnnnnnnnnnnnnnnnnnnnnnnnnnnnnnnnnnnnnnnnnnnnnnnnnnnnnnnnnnnnnnnnnnnnnnnnnnnnnnnnnnnnnnnnnnnnnnnnnnnnnnnnnnnnnnnnnnnnnnnnnnnnnnnnnnnnnnnnnnnnnnnnnnnnnnnnnnnnnnnnnnnnnnnnnnnnnnnnnnnnnnnnnnnnnnnnnnnnnnnnnnnnnnnnnnnnnnnnnnnnnnnnnnnnnnnnnnnnnnnnnnnnnnnnnnnnnnnnnnnnnnnnnnnnnnnnnnnnnnnnnnnnnnnnnnnnnnnnnnnnnnnnnnnnnnnnnnnnnnnnnnnnnnnnnnnnnnnnnnnnnnnnnnnnnnnnnnnnnnnnnnnnnnnnnnnnnnnnnnnnnnnnnnnnnnnnnnnnnnnnnnnnnnnnnnnnnnnnnnnnnnnnnnnnnnnnnnnnnnnnnnnnnnnnnnnnnnnnnnnnnnnnnnnnnnnnnnnnnnnnnnnnnnnnnnnnnnnnnnnnnnnnnnnnnnnnnnnnnnnnnnnnnnnnnnnnnnnnnnnnnnnnnnnnnnnnnnnnnnnnnnnnnnnnnnnnnnnnnnnnnnnnnnnnnnnnnnnnnnnnnnnnnnnnnnnnnnnnnnnnnnnnnnnnnnnnnnnnnnnnnnnnnnnnnnnnnnnnnnnnnnnnnnnnnnnnnnnnnnnnnnnnnnnnnnnnnnnnnnnnnnnnnnnnnnnnnnnnnnnnnnnnnnnnnnnnnnnnnnnnnnnnnnnnnnnnnnnnnnnnnnnnnnnnnnnnnnnnnnnnnnnnnnnnnnnnnnnnnnnnnnnnnnnnnnnnnnnnnnnnnnnnnnnnnnnnnnnnnnnnnnnnnnnnnnnnnnnnnnnnnnnnnnnnnnnnnnnnnnnnnnnnnnnnnnnnnnnnnnnnnnnnnnnnnnnnnnnnnnnnnnnnnnnnnnnnnnnnnnnnnnnnnnnnnnnnnnnnnnnnnnnnnnnnnnnnnnnnnnnnnnnnnnnnnnnnnnnnnnnnnnnnnnnnnnnnnnnnnnnnnnnnnnnnnnnnnnnnnnnnnnnnnnnnnnnnnnnnnnnnnnnnnnnnnnnnnnnnnnnnnnnnnnnnnnnnnnnnnnnnnnnnnnnnnnnnnnnnnnnnnnnnnnnnnnnnnnnnnnnnnnnnnnnnnnnnnnnnnnnnnnnnnnnnnnnnnnnnnnnnnnnnnnnnnnnnnnnnnnnnnnnnnnnnnnnnnnnnnnnnnnnnnnnnnnnnnnnnnnnnnnnnnnnnnnnnnnnnnnnnnnnnnnnnnnnnnnnnnnnnnnnnnnnnnnnnnnnnnnnnnnnnnnnnnnnnnnnnnnnnnnnnnnnnnnnnnnnnnnnnnnnnnnnnnnnnnnnnnnnnnnnnnnnnnnnnnnnnnnnnnnnnnnnnnnnnnnnnnnnnnnnnnnnnnnnnnnnnnnnnnnnnnnnnnnnnnnnnnnnnnnnnnnnnnnnnnnnnnnnnnnnnnnnnnnnnnnnnnnnnnnnnnnnnnnnnnnnnnnnnnnnnnnnnnnnnnnnnnnnnnnnnnnnnnnnnnnnnnnnnnnnnnnnnnnnnnnnnnnnnnnnnnnnnnnnnnnnnnnnnnnnnnnnnnnnnnnnnnnnnnnnnnnnnnnnnnnnnnnnnnnnnnnnnnnnnnnnnnnnnnnnnnnnnnnnnnnnnnnnnnnnnnnnnnnnnnnnnnnnnnnnnnnnnnnnnnnnnnnnnnnnnnnnnnnnnnnnnnnnnnnnnnnnnnnnnnnnnnnnnnnnnnnnnnnnnnnnnnnnnnnnnnnnnnnnnnnnnnnnnnnnnnnnnnnnnnnnnnnnnnnnnnnnnnnnnnnnnnnnnnnnnnnnnnnnnnnnnnnnnnnnnnnnnnnnnnnnnnnnnnnnnnnnnnnnnnnnnnnnnnnnnnnnnnnnnnnnnnnnnnnnnnnnnnnnnnnnnnnnnnnnnnnnnnnnnnnnnnnnnnnnnnnnnnnnnnnnnnnnnnnnnnnnnnnnnnnnnnnnnnnnnnnnnnnnnnnnnnnnnnnnnnnnnnnnnnnnnnnnnnnnnnnnnnnnnnnnnnnnnnnnnnnnnnnnnnnnnnnnnnnnnnnnnnnnnnnttcgcaccatgcatgtccgaatgacgtctccgatgcagcgggaaaataggctgtccacccccctttcaccgccatccgctgtcacctccacaccaatctgtcaagtcaatgcgcgtgcgacgagggtaaaaacgagcaaacacagatgaaaacatgtatttggaagaaataggtaagtgggagcgatgggacagagagagagagagagagagagagagagagagagagagagagatgtgcatgtacaacgttatatattcaagacttgttcgtaccatccatgcccgaacgacgtccccgatgcagcgggagaaggccacgacgattcgaagcaacgccaggatcgcacacgcgaacaggagcgttgaaagcaaagaagaggcggtgtctccggccccgcgaacacccccgcccgcggcatagtcgatggcgccgtcgagcagcccaaccgtgaacgttcgggtttcccactcctcggcggcgacaccttcctcctctacgccaagcttggagattcggggcccccattgctcgacggcgacaccttcctgctcgcacttctcgacggcgacacctgcctcctctacgtcatcggtcacctattgaagagttgtttgaaaaaaacgaagacaatgtgagggaaaatgcccgggctggctatcttccctaaaacaaagttgtacacgaatacacaacactctcttcatttcatttcgaggagacaggactcaccggaagcagttcctcgagtgatgcgagagcctcgaagtgcgcgtgtccgtcgaaaaagataggggcctccgcgttgtgcaccaggtcgttgaacgaaagaatctcgtccttgatgtcggagctgtgctcatcgaagacgtcgcggccgtgcgagttgctgacggtggcgtcgcgaatgcactgcagggcatccttgacatcacccgcgagctcgccattggtggcttcgatgatggcaggaatcggcactccgtcacggaccatcgatcgttggagcaaggagatggggccgcagctgttgctagagccactgttggacatggccacaaacatcttgccatccagagtgtaatatacacgttgcactctcttcgccgccgccgccgccgccgccgccgccgctgctgccgctgttgctgctgctgctgctgctgcccccgccggtgtctgcgcccgcgctcgtgtacgggaacgcctcttcgccttcgccctctctttcctctgcctgttcctcgtcttcgctgccatgcttcacctgacacatggacgtaacaaaagaggaggggttcagattacgacgacagatctgcaacagatcaatcttgctttggaaccatcctatcttcaggcataggagaaacagaaagcgatcaagtgtcgtggtctatcgcgcgccaaataaagattctggagggggttccgtgggtgcaagattcgggccggggtcccgtggatggaaatttcacagtggggcggtaggtggagtacaagtgtgggtgggggtgtcctatgtcatactccgtatatgattgtgcgtgggaacggagataacacacaacaaccctcttgcacaaaataagtcgcgcgacttatcgataagtcgcgcgacttcaaaatgacgtattggcccgaaaatgccacccagaggtcagaaatttaaaatctttatgcagtagatgttggcaaggggttttacttgagtttagtgtaggaatcgggcattttcatttatcttgtaggtaatgccgggactgtgagagggaatcgtccaaatcgatttataccatctgtacgatgatcctgtaccgtttgcgccgtggttcgtggtcgcgctggtcgaagaaaaagaagagggggatcagaggcagagagtctgttttgtcattgcgatgactttggtacacaacagcttacatctgtcggtagacaccagtacatttgctgtcttgcatcccgtctggagtacatattatatttcaagttcaccttcttctcgggagacggtgccattgctgtctaaaacgtcgacgtccgtctcctcatattcgctttcggtaaccgaatccgagacgccaggatccgtcttcgagtcttcgccgacggtaaccggatctgcgaacagcgatgaatttttttaggaaacgtcacatggtacacgaccggccctcttgtgtgtgctgaacagcagcgcctgcgtcaaagcaagcaccgatctggatgacgccagagccacccgaactgtattctttgtgcgggcgtcatctcaaatacaagatacgggcgtgcttcagggacccgggacgggcgacttacattatatgttcgtgtagtggattatgccatccttacgaaggctactgtggtagtactcatgtgtggttttgagctatgtaagtgcgcaagtgcttggccgtccatcggtcatttggatcttcggggtatctccggcagtagaatctttggccacgcgtcacgcgtcccgtgctgtctgtgttcccgagttccgaatgtgtcttgcgactgttgctcgcgtgcctcggcgtttgtgatacaccgtggtgcccactctcttccgttgcttgtgtctacgagggcgaccaatagtaaacgacttaaccatctcttcacattatcaaccgggacagccgtggttatccagcagcactcggctcggatcaaatcagcattataaagctaccgagccctcaccttccagtagttgaggatcttcatcatttgacgcgttggccgccatggatcttgatggaatgcggtggtctggagaaacgaggagtcagtgtaaggtgcaaggtggtgaaagcgtcgagatgagttaccagttagaggatcttcgtcgtttgacacgttggcccatgtagatcattgttgtaaacttaagcatgttggaaacttaaatgttttctatgataacatacaaaaatggctcgcccgatgtcacccgaaatatacgatgcattcagaaaatgcgaccaacaatggatacagagacggagaaaaatggatacatcttcgctgttcttcacgctcacgaggtgctgtgttcaaggtagaggtgttagccatgtccttaaaatggaagacgaggcttactcgtcgcaggcagtacactcggccaggaaaaagcttccgatcggggcctttaaagaggtgaatcggttcttacaccgaggaccacacgagccacgagtattcgccgtagatggatcgaaggtgcacgtgcacccctctttcatcaattctggttacaagacacgaacaaacgaccaaccagtatcgcgtcctgccaaaagacctctcgtcatgctctcttcgatggtagatgtcaaaaccaaagcgtgtatcgactttgagctcacgaagcatttcaatgaaagaagagcagcgacttcgatgctccgaagtgtacggaaaggtgacacgctgttgttcgatagaggatactattccaaagacttacttcgcagtgttcacgactctcatgcatttggcgtttggcggctcaagatagacgctttcaaaggcaccaggtctttctttaactcgtgtcgcacggaggccgcgtgccttattctcggtatcgaggcgcgtcttttgaaatattttatcgacggtaaaacatacgtttgcctcacgaacgacccgtcgctatctcgaagggatatcaagactatgtacgcctcgaggtggcgggtcgaagagtcgttcaaacgattaaaatcaaatctcaagctcgaaaaagctcacgcaaaaacaccggctttgtacatccaggaggtggaggccagagtgttgttagacacgatcactctgagaatgcaaagcagtacgaaggagtcgtcatatctctatactctcgacacgcatgtcacacacatccttcgtaacgtgaaaagagtctctagtcccacgagatacaagtttctacgagtagcagagctagagtcaaaaacgccgttcggtcggatgcactacagaccatcgggtgagaaacgtcttaccaatcatgtcctcggacgttacatgcggtggaataccgaaagcgaaagtttactcaaaagtttttgactgtgaaacctcgcatcccgtctcacaattcatcatcatctccatcatcctcttcatcatggtgagaccatcttcggatggaaactcgcacaagaagaagaaacacaagaagatacctccgagggcacctccaaagaacatcccgggctttctgcagacggtgaggggcctgtacccgaatcaatacctcacggcctcaggaaatctacccaaaagttgcaagggtacttactgctgccagctcttctcgagagtcaggttcggggagaaagtgtctcaaaaggagcggataagaaccgtgagcgtcggatttcgggcggcaacgaccgatgaggaacgcgacacatttcagtccaaggtcaatgatgcggtcgatcatctctcccgtgaacgagttctggcgtctctcttcgcaaactttgtgtttatggaacgtcttcaaaacgggtcagcccttccggagcccgacagggcttttttcaagtcgtgcttgtcatcatgcatcgaaagcagaggaggggggaatctcaacgccgacttcgaccgtttttccgagataacgggtttgacacgactcgtgcctcccaaaaaactgggccttgaccaacagcgagagcacgaggcacaacgcatggcaacggcaacgtcgacgcgtgcaacacaccacacggaaaagaggaggatttcgatcacgatgtgctttctgcgagggcggatatctcaaggagaccttgattacaagaagtacaagacgaagctctacaacctggcggagaagatcatcacaaacttcgacggcacacccgaagacacacaaaagcttcgaagaacgtcacgagcgttagacccttgacagacaccgacatcattatcgacttcgcacggagggagaaggacttctctgatcgagactgtggagacggcaaaatcgcaaaaacgatcaaacacctgtactggatgttcaacacctacgtcgccgagtcaagaagaatgtacgaggaggccgtgtcccgagcccacttgttcgctcccggtgaagacaaggcgtgcagaaagaagagggacgagttcgtgaagcacgagctgggcgagaagttcacctacgctccacccaaagacactgccgtgctacccatttgctcaacgggggcagtgttcatccacatcgacatgaagacgctcaagtcatgggggcttctgcactccaacgatgcttggtggtacaaggacgtcctccgacctttttccaaagaggcaaatatcaagtgtctcgtgaacaaggagaacgccaggtacgcgtcaagcgagcatggctacctctcgagtctgctaggaagtggtccggacaagtgcccctggatgattggcgagagtttcttgacggacggtgtacagatcaagcttctgcttgtgacactagaccacggaaggaaagctttttccgggtccagcgagctgaacgaggcggggtacaacaaactgccccgggctaacgctcagctagaaagcctcttgaaagagggaagaggggtgtacaacatatccagccttttggagtcgacaagcatcagggaagacgtcgtcgtgatgtccgcggacccgggccaggccaaggtgatcaacgtttcttcggctacggctagcacttgggcgaagcaagaccctggcgtcatcctcaaaacttcgacgtgtgtgttcggggacgattatcgtcgtgacactcttgcatcacgttcagacgagtacgagacgttcaggcgcaaggaccagccgtacggagtagccatcgatcgtcttagcaacgagaagaaaagaacttcctgcctcgcaacgttcatccagtactgcaaaagttggtgtgcaaatggtccggcgttattcctagagactttgcagacaggaaggaagttcatgaggtttgatcgtttcagagctacgcagaagacacttgccaagatagcggacaggtacatgggacacgtagaagacacttgcaggatcatgttgttcggtaaagcgtcttttcgtgcgcagaaagggagggcatctgccccaaggaaagctttgattagagagatggccagcagaggcgtggtgttgatggtgaaggagtacaatacttccaagaagtgcccggggtgtggagaggacacggtcgaggacaaagaacggagaatccggagttgcaaaaactttaagatcggatcaccggaagagtcctgtagacttcaccgcctgacaccagagtttgaaatggatcgcgacaacgtagggtcgactaacatcggtatgcgtggtttcggccaattgctcggtcaggtgtggttttaaggattttttccggattttcacttgcggatgatactttatagttggtttttctaaagttgacaatagtgatgtagatcaacggtggtggccagaagaggggtattgtagtgtcacaagcgtcgagatgagtagcgcagaacacgaggtcggtgcgttgatgcccatggttcattgctgcgcaattaaacatctgcacaagcacttaccactcgcgtcgacgcgctgaagctggtgctagttgcggtctcttgggtaggaggagagggggaggaatggagtggtgtggtggtcgaaagtgtgtgtggggaggcgggggtggatcatcggagttgcttcatatctgcactgtggccaacagccaatcagcgcatatcggaaaaagcaaataacgcattagactaaccgacatttatgttcttgattcgtgaacaatgtcccgttgcctgcacaaccacatcggaaaaagcaatcagtcgacaatgtttgcatcagccgatgcaaaggagcaacgcatactcagcacttgatttcacagatgaactgatttttcgcacgacgaacgaccgctgacgcaccgtgagccgctacagcgcagctgtggatcctgcacccgacagcagaaagcagtccccgcatgtacgtatatatatgtataccaaccttttcaacactccccttgtttttgtgctgttttcgatgctattccgtgtagacgtgcgtgcttttcaagtagtcttgcacagttcgagcacggttggcggtgtcgcaaaaacagttattcaggagggtttaccttgtcagtaacgcaaccaaccgcatgatgtatgccattacgtcgacagccaatgctaatggccatgaaccaaacgggtacacgtcttggaaaatgtacaaggagacatctgacgtacaggctgtcgtgaattaatttgagttggtgcccgtggtcgaaacaaatattcacaaaaaaaacgacagctgcgcaagcgtgtcaactgcttgtgaggaaaatctgggcatacccacgccgaagtctactttctctcgtacctaactcatcgccgaatgcatgcatactcacgaaacttcgcaggcgcatgcacacgacccgtacagcagtattgaaaaaaaaattaggtcaatccgatgatttggcgacattttattgcccttatttccaaaatatccgaagtggcaatcgaactcgggtcgggcatttctttgccgcgcagaacagcatcacacgccgccagcggcgctcacagcacgcaccgtggtcatacgaaccgaacgcaaaaaacccgaggtcaatcggagcacgtggtgtcgagaaaatgcccaaaaagctctctggctgaaaatgcctccatattgttttcgacagtcccgccacctgacagtcccgtgaccgtcgcgtgcctgcgtctgtgtcacacgctcgttctgcctcacacgacaacggaagcgagcggcgcagcagcgggatcggttaccagggtgcccgggggactctgtgcgacaggaaggtgtgtttgcgggtgtctgcgcgtgtagacgtgtgcacaggtagacgtgtgcgcgcgagatgtgtgtgctgcgcaccagctgccgcgccgcgcgcattctgggtttttggtcacgctcgtatgtgtcacacaactcgcccgcgcgctgcgtgaacgctggcaaatcgtccccgtaggtgtcccggtgccttcccgtgcaggaagttttattttagacgcgcctatcgtgcttgctgttttctcccccctgcgtgcgcacgtgacgtattgtacgtcgaataacacgggggtgtaaaattacaccccaccctcccctccccaaaaaaaacaaattatgtgggtttcacgcgtacccactgatcaaataatacggattggtgggtgtgggggtgttctgtctgtgtgtcggcagtaaatcacttgaaattagagacccccctggcgcgcgtaccacgtttaggcccgtatctcggccccaattatgggttgaccataaaaaaaatatacagcagtgcgcctgacctggcggaacaacacaccaaattacaagttaatcctcgaagatcctgaattttaaagctcgaaacaagctgtacagcagtgttcacgggtaaagtgtacgcataactctgcaccatttctagtgttcggccttgaaattttgcacgatggtgcccctgactcgtgcgcctgtgcacaaaaaatcagaaatgaaatcggagcatgtggaggcgctggcggccgatttcagtgctgtacagcagcagataacaccttacgctgccacagtcgcccctgtttttcttttttcgccttgatattttggcacgcttgccatctgttcacaggaccaccgttgtgtgtgtttatggtggaagatatgtacagctgcgcaagcgtgtcaaccgtttttataagggacataattattattaatttgcaaatcacactcacgtgtccatctacgaacttctgttattcattttcacacacatcacacacacgccgtctttctgaacttggtaaagcttgtctcgccttcatctttaaaaaacgtattctcggacctaaaccacttctcgccgtcccggagctgaccaactttgcgctttttcaccaaatcacgaaacatgagttttccatcccccccgtacttgtgtagagacgtgcgaatgtcatctatgaacaccatcctcgctgcgttaagtctcttgccgtatggatggttaaccttctccgacgctccccccgtgcaagccgagtcaactacgccacctagcacgacgttgcctattgtgtgggcagctgtgtttgcagaggcagctgcatagctactccttaacgtggcactcgacacctggagataggagctaaagtcgtcgatattactgctattgacttggcccgaattcagggcgtgtgtggcccaaaacgtacggcacacatggggagagaagttttcaattcctagccagtacgccccaatctttttgaaacgcgaccgagtgtcgtttggggtccacccttcccccttcgaattgacaaacagcctcctgttgccgtcgcgcatgtctacgtcgcagaagcggtggcccacacaggctacaaaatgtatcatcatgctttggtctgctgacatttcaaagtgactaacgggaagagccccactcgacgctgaggcggtagccgtcttccaagttcggtccttgaaagtgtgcctgaagtgggtgccgtccggaacaagagcgaactcgttcatcgttgcctcccgcatgacctgggacctctgaaaacagttgcttagcgcgagtaagacgcagagattggctacgtcggagtatagcacacccttattcttagcgtgctcgtacaggagctcggcctcctgattggaaattttaagaaacgcggaggggtgttccatgctaaccccgagttcctcaccgatcaggctcttcagggggtgccaaacgccgaaacagacgcctttgagcatgtcgtacatcatctccaccgccttggggtccgtgggatccaacatacgcccgccatccaccttcttgttgaggccggcggggtccaggttggtgctgacggtgtttgccattttgagccttttcctcgttttccaaagctggctgtcgaagtgcgccatgatctccgtcagtttcgccgacactagcgtcgaagagcgttgggccgccctgcggtgtgttgcaagcagccttcgccgcgacgcctgctctctctccatacgtcaaatgtatggaacccaacacggagccgtccatgcggccgacagagtccacgggtcgctgtcggattatgtccagactcccaaccacaggtccgcactcgatcccatactttgttttttcggtgtacgcccgaaacagtgtagctatcctctcggcgtcacccggggccgagcgggttgccttaaaaagaccgtacgcgtctcctacgtggaacccctcaatgtacttgtcttggcacgcccgctccaacattatgtaggctatgtttctgtgcggtacgtttatcgcacgaaacacgcccctccagtctgtctcccagccgcggatagcgccgtccaagtggcagggggggcaaagccacctctcctcgagcacgcgacgctccatcacgttcaggggcaagacgaccgattcgaaagctgtggggcgcccgatgatgacggtcgcgaaccacataagcccgattgcagaagaacatgacgcatacacactcgaagagctggtctcccctcgcttcccagatattgtggcaaaatctcgctgcaggaagaaccgctgcctcgaatcgtcgtcgtcgaaatccatgttcatgaactgtagtatactcttcgatttgtccacagagtacgggagcccgtgaaacaccgaactagccgagccgacccgttggagtcttgtgagggcttctcggcgctgctctagttgcgtcctgccctcgggcgtcgcgcggtcgatgtctctgtagtggtggctcgccttgttcagtttgattcgattttcgagtaggctcgggaagagctgggcgtagacgtgaaaaccgatcagggtcaggttgtctctcagagactcttgccacgcgagcttctcggtttgaggtaaccgatcgtatgaagtgccactaaaatttctggcgccgtagaactgccgcacctggccgtcggtgggttcaagaaatatttttctgggtgagacgggacacttgaagctgctggtggtctccttggtcgcgcgcttgacctcgtttgcgttgaaattcggttttttcagggtggtgatttgtttcttcaccttcgagatacttgaaactttaatgcgcttgggtgcggtagaaacaggagccatggttgaggtcgggggagtgagcttggatggggcatgaagccacacaaaagttgttcgttcagaatgcaggggggccacgcgtacgagaccgattttgcacgaggggtgtaggggttgttcaaggtgtgttcacagacagatttgttggttttaatttactctcgtgaagcgcactaccgacctcactttcctcgaatctgcgccaaaccaaaccatggctgagatgtggcacgaacacttcctgtcggacattatcggtgaaataacacttcacgaccggcgcacctgtttgttggatgaagggcagttcattgatcgcttgatccgatacaatgctgttgaagactacaacatatgcatcgaaaagcaggagattatttgggcggtgatagtatactatgaagcgtatgatgtcgctggttggatggatgccaagggatacactgcaacaggggacagttatgaagacgctgcgtcgtgtgtcccctacgacgcagccaggtgggaccagtggttgcgatcccgtttgatgctgcctccttcttcaagtcttccggaaaatcacgtagagaatgtcgcctgcgggatggtcagtatggggtacattaaaatccccctgaattcgggttatccgacctacgtctggttgctcgatggacacacgcaggacgatttttgcgagccgtacagttgcatacagttcttcactgagcatttccactcgggaaactacaccgaattgtggtcttttacgctgatagaagagtgtctcgagtttcatctagacgaatgtatgcgggctggtacagctatctacatggtccgggcgttatcggaacgttctcctgtggtcgcgcaacagtacattggaaaggttctcgctaagttgctggggaaaatatatcgaaagacagggccaggaagcagctggcggcaactaggattcagtgtgcgttccgggtgtatagtagcacgaagagagtgaatgtcctccggtcgcaccctgacaatctcttttccgagttcagtgtgttgaggaagaggaagctcgaaatagacacggtttggggccgtagtgcagtgaatcgggtggtgttcatacgcatacgcgtgcttatgtgctggggtgacgtttgctgggcggcggtaaacacgcatgcgcgtgcttatgcgctggggtgacgtttgctgggcggcggtaaacatgctggttcgactgaaatgaaaaaaaaaacactccatacattttcaaaaaaatggcgccgcactgggatcctagccaactgctcaggaaaaggggcaatgcatcgccacgagtacgagtttgctttcaatatttggccaacgtcaccactagacacagaagagtcatatcgggacatcacgggtttttttctcggccccgtctggtcaccgggtcgttgtttttgtgatcgcccgtagggcacaaatgtgtgcggtgtgaggaatacatgcctcgtgtccgagttcagcctgggcacactgctggcacgatgcgcgggggtcagcagcaacccgtacacacatcacacatacatacagagtacgcacgcacgcacgcacgcacgtgaaaaaaatcgtgttaatgaccgcggggacgccacaatacgttggaggtgctgatgaaggttatcaccagcagcaacacaccnaaaaaaaacgaggtcaaacggagcccgtagcggcgaggaaccgccgttttggtattccccccgcatctccgccgaaacggcaaatttgtttttccggaactggaagtttgcgctctgcacgaattttgcctctcacatcccacatcccacctccctctttctccccctcgacacagctcggacatcgtaatccacggcagcgtagcgtaacaggacttagctgagaggcatctggagagctgtgaggaagcgaggtatgcggtgttgtctctctttccgctctcgggcacgttctcagtttgtttcaaccatggcaggcggtggggcgtaccacgtcgcgcatttgagagcttagctggcgaccgcgcgctcatgaaacgcccccgcggcgcgcgagaccggtcgctttcgcctcctatgatgtgtatgtggctttgtgcgcgcctcctctttatgttttgagcggcgctgtgatgttgagttgatcgcttttgcctgactgtattttcgtagtctgctacgcaaaataacacccccaaatgttcgaatttggtttttttggcgccaaaacactcccacttcatgcaaatacagacttaggtacccgtacccaccccctacatcccaaataatgcatgtgggtggtttgggggtgcacgcagctttggatttaacctgagaccagcgctgacagcagactttcagctgtttacagcagtaccccggcccaaaagtctagacatttggctgcacagctccccgccaccttcgaatctgaggatgaaactttgcacgaggctccccctcgccgatgcgcattcgaagagttttttttatcgaaatcggagcacttctcgatttttagagcccccaacagtgtactctcagcagcactatgtacgcgtttcgctgcctcactacgcccaacacgtgtgtctcgcccccaaactcggtgggcatgcgtattggggccacagctgtccatggctgccccagtggtcaccatctgcgcgcacgtttgttgatgcatgtctacccacccccttgcccgcactgccaggcaccgcccagcactgccgtgtattacccgccattgctatcaccaccccctccctccccattcgcattttttgagctaacctgtcacactttcaacatctagtctagtgctggtgccacgatacaacagccttcattgcatccggccccctgacgacaccaccaggcaccgccccagcaccgccgtgtattacccgcgatcgcgtatcatgcccccccccccctctcttttcgcattttttaactcgcctacggcaggtgccgcacgagacgcaaacgagagaggcgaggagttcctgaatcgtgtttcatgcagcttttgcaggggcgttgaatcggaacgtgtatcggcaactttttcgtagttgatacgccccgtagtttttcttgtgcagtccaataggaaggttagagggggtgttgaatcggacagtgtatcggacaggttttggtgccgatacatcctatagggatcgaatcggcaacgaatcggcgcatagtgttttcaagacattgtatctgattcgagtccgattcgggaggtcgcaattccgtttatacagcaggtatctctaccagatctacgaaatggaggaagctggcgggtctcattctacgcaggcgtgcatggcacatgcgggga

SEQ ID NO: 272 - DNA, 21434 bp, unidentified
  misc_feature 1..21434: note = Fanzor polypeptide
  variation 6176..6233: note = n is any nucleotide
  variation 18409: note = n is any nucleotide
  source 1..21434: mol_type = other DNA
attcctgttgtctgtcgctcttgtttgcagccatgcgtctatggaactatttgtccccttttcgtgttgcattgctatcgcatgtgtcacgcctagtcgcgcgtccacttcagcccctctccccgccttcgtttggtggttggtggcctctctctttttgacaaaagagtccggtaccatccggctccctgaacgccacaatatgccatttcgtcgttgttttgtttctcatccctgtggcatccgcccacttctcattcttctgctgcccccatccccatgttctcaccaccccgttcctgctgttgatggtagatgacggcgctgggtttggcgaaaagggtgttgctaatgcgggtatcgttagcgccacgggaagagcagaggagctggtcgctcaggaggcttaagaaggatgccgagggcaacgtcaaaaaggcttcatgtagggagaagcacctggaggtgaaaagtaccgtcatacttgggaatatattgcattttaaagtggcgacaccagcagcgttttctgcacatctctctgtagcagaagccgcagcaacagacacaggcgcgtaaatggcaacaatcctttgagagagacgaactgaaaacactttggctaccccacaaccgcttacaccctccccgaaatccccacatctttctccctgcctgttcaagttgcgaccgagagcaaaggggggctctgtgggacatgaggaggagtaggccgacgccgccgtcgccgtcgccgactccttgagcatggattaagggcaaattccgcaggagcggcaccaggaacagcgacgtcagctacagcacctgctcgaagaggagcttcagctgaaactgtttgtgcggcaacacgaggggcagcggctccgggagcagttgattgtgtttgagcaactgcagcggcaccggcagacacaggtgcgtgaagggaaaacatcatttgagagagggagagttagagacgaaatgaaaacgcgtcggctgtacatttttgttgagtcgtcatccaaaacgagactccacgaagttccaacattatcacgtcatttctgaaaccgctatcgtcgcggggttctaattgttcccttcgtgatcgcccgagtcgatggcgtactttttgttttgagtcacggagacatttccgacgggaaaatagacagttttaatggaatgtaggtttagaagtcgggggacactgcaaatgtgccaaagaaaatggccgaaccgattacaaggactacgtgttcgttagcacgggatagtgtttggtcaaatcatctacattctgaaatatgtcctgctcaggttgagaccgagggcggtgggagctcggttgaattgaggaggaggccgccggcagagcctcagctgcagtcggagagggcgaggttggggccggtgatgcccaagcagcgccagcgtaccagagggcggacgaagggcagcatgcaggagaagctctcgcggaggcccagtcaggagcgtggcctacgggagggcttgtaaaggtgggtttcgtgtgtactgaagtagccaggaggcatgattgtgtatcctgaagtagtccggcatgcttcacgcgcccggatacacggccaaaaactcgtggaggtatgttgtgtatcctgacgaaacctggcctctctccccgtggccggatacaaggcaaaagagtcgtgatgggaagttttgtggatcctgaaacaatctggcattgctccccgctcccggatacccgatatgaagcgcgcagttcttggtgagatgtgtttttgcacacaaccgttttgaagattaccccgcttccttccccggcaccgccccccccaacgctgccgtctgcagatccatagcccgttcgtgcggaggccgaggcagaagggcgctcggcaacaagagcgagagtagcatgatgtattggagactgcggcacttgcatgctgagcttgtgaggaggaacggatacacggcgaaccaaatgggggactttcactggacgccatggaagacgccgcaggtagcacgagtagagcggagacaattcgcgtgctatccgtcggcacccgctttggtagttgtggtgttttgtgtgatttgtgtgttttgttttcttgcagtaaaacgcaaggtagaccacatcgaccatcgacgggcggataccgcaagaacgattgtagctgttgatgttggcgcctgcgttgatgagcaccaccatgcctgttcagaatcctttgctcgcggccacattgagcggtgtaccggacacacctcccactttgaagaagttgataagagcttcgatgtccgcgccagccttgaccaacgccttggttacagcaaggtgcttaccacagactaaaggtgtagagtggtatgcccgtgctcggtcttggtcgaaatatcagcaccccattgcagaagaactcgtatcaaatgcaagtaacccctgtacgcggcgaacatgagtggggtccagtcattgtcaccacgtgcgcggctaatactggctgaccctgtcgagaggagattaatcgtaagctcgacggaaccactggatgccgcatggtgtagcttgctcagagcagatggtatgttgaggatgtgtgttcgaaaacacgctcgtccaaacaaagtttatggtcaacaagtgtttgatcgaggccgttatctcgaaaagccaccaaatgcttttagcctggtacaaaatgagagtgggaatggcacggtatggtaaagcgtcacacaactcagctgaagaatttcctgagcgagaccgcgagcccgctacataatggcgccggtggtagtagaagtctgtcccgtgaccgacaggaacagtatgtcgttccaggcgttttgcgatgattgacgcattgtgagtttgtgtctatgtgcgagcggggttttgtctaagtgacaatgagtctcttttgtggagagcggcttgttcaagcacacaggtcgattttagaagttattcaaatcacatccatccggcacgcagtacccgctacaccgctagcctgactcttgtcctcggtgggggccacgcgccttgaaacatccccggcctttcaccgctgccgtcggagcgtgatgaatcgccgacagcgggtgctgaaagacgccgcaaactaggccgcctttcaaaggcatatttcaccgttcacgacatgaaacacccccatcttcttcgtcccgctcgactcacagcgatggaacattacttgcactcgtcaggacacgaaccaacggatgcagggctggaatcgttccccgagctctttgcagctgttggaggtgatcgtaatcacactaagggggaactcttgtgctgatgtggacgtcaaatgatgcgctgggcgcggcgttggttacggtgggtgcggccacgatgtatttcatcaaacgatttggggaagatggctagcgatggccgcgttgcaaagttgttaccggataatggaggcaattgttgcgcgcgatttccccgaccagaagtttattaacaggagcttccgctcggcggccctgcagttttctggcgacaggcaggtcccggacaggctcgatccgtaaagactggttgatgcggtgatcgcaacccgtacgtgatgtctgctgtagtccatcttggcgcggatcgggccatgatggttcgggactggcagcgggggctgagaaacacatcccttcgtcggttggcagagagtcagttcgtggatgtggtccaggcgttggtactgaatttgtcggcaaaggagatggggacgacggactaatttggctgtgctcctaccgaacatgtggcctcggaggcatacctttggcaacgtttctgattggtagggaggggtgtatcgtgtcccccctcgaccgcagcggcaatcaagtatcgcagacgttgtggggaatgaagcagcctttccgcgatttcagtcgtagcgcgtgatagggagaattcggccaagcgtcggggggttcttctttggcgcaagcgtggtgtcaatggtgatgctggtgaagtccctccgccaggaatagtcggagtgttgcaagaatctggtaggatttgttaaaacgaaagtgtttcaattgactcaggagcagccgctgtctgtccaagtgagacaattcttcagaccgccgccagttgcgttcactgagggtctagaccgcactctgcgtcatgttgacgagggaaagggactactgaacattctcgcgataatctgaagacatgcgccgcaggaggaatgtgatgagaagggggaaatccccggtgtttttgtgtcccggccgatcgttgtacagagatcatacacagaaatgcgtagtacaagacacctaaaacgaacaggtgacgccagacgccaatagatgggacgtgaaacacacacaccgcgttgcaattgctattgctgtttccgtctgacaaaacacaactctgcaggctaaaaaaacggtcgatgaaacttttttgtgggatgacaaaacactcggacagcgaccatcgaacaattgtcctttcccgtcaaaatggtccggagaaccacgagaaagtggacgcacacggagcacattgcttttctctgcggcgtgcagatgtgggagaggaactgggccgtggcctcgctagtgccggccgacccgctttgtggtccaaacaagaacgtcctcaaaatcgacaaaggagagcgattgacggatagattttcgaggagaattgacatttacaccgtggaccgcacgaaccacacgtttttgccgattacacctccctcaatcatgcgtttacgaaggaaatacgacgaacccctgcttgtcctccaagacactcaagcatcctagcgctcagaaatttaccttttggtttcattaccacgccccgtctgtatctacgttcgctttctcatgcccttggtcaccaacttgacgggtttgaagcggtagatctcgcgtgaatcgctgactatgaagcctaagcccttcttgttcttgagcagcgtctccactttgcggcaggctttcgacgcggctatgacattaaaagaaagttgcgtctttccctccttgagccatcctaaaacccactgcccgttgtacgcggaatcagagctgtccttaactcttgtgtagaatatatcaggaaactcccccttctcgtttggcttcacaagattgtacgggaatttgacgccctcttggaaaaacttcttctggaaggttctaaacctcgtctgcaatacagaaagcgacatgggggccaaaacatgcggttgttggtatgcgattgttggtaaatgtcacaagttgacaaatggatgaacgggtgcggaagcgacagatcggaccgagccgctctctacatacgattggaagctcgcgtttctgaccgaaattcacgctaacatgttttctgaaatgcgtaagctgtcttctcaccacagtttcgccttggaagtggtgaaccatctcctcccaaacttcatccgagtaacacgtcttgctcttatccttccgcgcattgagaagagcaggaagaaatcctgcgtgacagcgaacagggagaaacgcaacacatgtatgaatgaaatgacgtttggtgctccgatataaaaaccttccattcttactttggccactttcctcctcttcctcgtcgcctgcgttgcctgtgaaacgggcggcaacgagattagacaaccaatacatcgccaagtgagaaaaaaaacaagagaaggcgcaacgtgcgtccaaaaaaaaaactttcatgcgtaccgtggccgctccccccgccttcttcgtcctcgtcgccctcctcctcttgatcgtctaccgcgttgcctgtgcaaagggcaagacaaccaactattattcgacaaccaatacatcgccaaaagagaaagttatgtcaaggaggggcgccaggtgcatccaagaaaaaattagtccatgcttaccgtggccgcattcctcccctgcgtccgcgtcggcttgctcctcttcttcatcacctgcgatggctgtgacaacggtggcaacgtggtcacgcaaccaacattttgccaaatgaggaagcatttcaagtcgcttccccccgcttctacgtccattgtgccctcctgcaatgtagagaactacccccccccccnnnnnnnnnnnnnnnnnnnnnnnnnnnnnnnnnnnnnnnnnnnnnnnnnnnnnnnnnnctgcaatgtagagaactcccccccccccctcgccaccatcacgcgtgtccccggtgccttctggagacgaagagctggcaggaacaatgcgtgtgtcttcgtcggtgcatggcacaaggaagggcggcaccgtggttggacaaccaacacatcgccaaatgagaaaaagtgctaagctctcaccggtcttccttgacacacgcctagcggtagtcagacgagtagcaccaacagcagtagcagcagcagcacgctttggcctctttgacggccctgttacacgaaacaacaaatcgaacaacacaggaacaaacactcagaagatgccaagccgtcttcgtttcttccccggtggccatcgcgtccttctttcaagttcccgagcgcgtaccgcactcacctacgtccccatccgctcctcctgtcatcttcccctgcaccctctttcgcgagcattccggtagtgaaggggtttcacctgcgtattgatgtgcaaacacctcgccaaatgagaagatatttcgcgtattgctgcgatttgttggtgagcaggtgaatcgcgccatgtgagacaacaaatccacacataccgaactttcgtgccttaccgtggccatttcccttgtctccagcgttacgcgagcaagcaactataggggtcaatgctgtcgtcgaccggccttgccacagcaatgatggagttgtcaccaggggctgaggctagcatggcgttggtcgccgaggcgcgccgctggatgtccttgatgcgatcggcgaattcgatcccgtcgcgcccggagaattggttgacggactgcagttggtccctgcaggttctgcaaatgtcgatctcgttcagtgcaatggtttttttggccatgaccgaaacgaaaaagcccttttctcttcgtccgatgcgtactcaaaccaaaagggttcttccgaccgttgctttttggcgggtccttggtccaaaagaaagccctggtacgccctgccttcctccgtgctctgtaagcgatcgcagcgctgttcgatctcatcgcaaagacttgtgtcaccaccgagcaccctggtgatggtttgggctgattgacgcctgaattccttcgcagcgttcgaaggcagtagccaaatgatttctacgagagttgaagcgtcgcaaataggggtgacagggcccttgtcgttgatcctgacgtattcaatgcgttcagaaagtggaatcgtactctgtgcattttgtccaggcctttccatgccatcccttttttccttttcaaggacacgtgtgagcatttttgcagcatattcggcagacgcctcgggacacagcatgcggttgacatcgataatggaccctttcccagtgttctcgtcgatgcgcacggaaccatggattcccacggtcctcagcgccttttccaacctagcagttttcgtttcagcgtgagcgacatggtccgataactgatgttgcgcctgtgcacgcagacactgacaaacgcgctcgacgtggtttctgagcgattgtttaaatgcctctcccgacgtgtcccgccacgtgtcccaacctttcccagatatgttgttcaatatatagtcacatacttcgctcggaacgacagatgtgattctgccgtgtacctgacgcttcgaaatttttggaccactgaaatcattgttgtaaagttaagcatgttgacaacttaaatgttttttacaataagaaaaaaatgactcgcccgatatctcctgaaatatacgatgcattcaaaaagtgcgacgcgcaatggatgcagaggcggcgaaaactggacacatcttcagtgttctacacgatcacaaagtgctgtactcgagagagaggagtttctcatgttttgaaaatggaagccgaagaatattcgtcgcaggcggtacacttggccagaaagaagcttccgatcggggctttcaaagaggtgaaccgttttttgcatcgagggccacatgaaccacgcatatttgccattgatggttcgaaggtgcatgtacacccgtctttcatcaaggctggttacaaaacacgaacaaacgacaagccagtgccgcgtcctgctaaaagacctctggtcatgctttcgtcgatggtcgatgtgagaacgaaatcatgtatagactttgagcttacgaaacacttcgacgaacgaagggcagctgtttcgatgctccgtagtgtgcggaaaagtgacacgctgttgtttgacaggggatattactccaaagacctactccgcagtgtccatgactccggtgcatttggcgtctggcgactcaggataatgcgttcaagggtactaggtctttctttaactcgcaccacacggaggtagcgtgtctcattcttggtgttagggtgcgcctcttgaaatatttcatcaaaggtaagacgtatgtctgcctgacgaacgatccgtccttatctcgacgagacatcaagactatgtacgcatggagatggagagtggaggaatccttcaagcgattgaaatcaaatctcaagctcgagaaagctcacgcaaaaacacccgctctttatatccaggaggtggaagccagggtgttgttagacacgatcactctgagaatgcaaagcagtacgaaggagtcgtcatatctgtatacccttgatacacacgtcacacacattctccgtaacgttaaaagagtctccggtcacacgagctacaggtttgtagcagagctacagtcaaaaaggccgtttggtcggattcattgcagaccaccggatgacaaacgtcacaccaatcacgccctcggacgttacacgcggtggaataccggaagcgaaagtttactcaaaagttcttgactacaaaacctcgcaccccgtctcacacttcatcatcatcaccatcatccttttcgtcatggtgagaccgtcttcggatggaaactcgcacaagaagaagaaacacaagaagatacatccgagagctcctccaaaggacgtcccgggatttctgcggacggtggggagtctctaccccaagggatacctcaccgagtcaggaaatctaccaaagaaatacaagggtacttattgttgccagctcttctccagagtcaagttcgggaaagaagtgtctcaaaagacaaggctgagaaccgtgagcgtcggatttcgggcagcaacgaccgatgagaaacgcgacacttttcagtccaagatcgatgaggcggtgtatcacctctctcgcgaacgagttctggcgtctctcttcgcgaactttgtgttcttggaacgtcttcaaaacggatcagcccttccagagcccgacagtgccttttacaggtcatgcttgtcatcatgcatcgaaagcagcggaggagggagtcgcaacgacgacttcgatcgtttttccgacacaacgggactgacaaggctcgtgcctcccagaaaactgaaccttaaccaacagcgagagcacgaggcacaacgcatggcaacggcaacgtcgacgcgtgcaacacaccacgcggaaaagaggagaatttcgatcacgaggtggtttctgtgcttgcggatatccaggggcgacctcgtgtacaagaagtatgctaccaagctatacgatctagcgaagaaaatcatcacggagttcgacggcacacccgagtacgcagaagacctccgacaaaaggcacaatcaatagaccctggcacggacatcgacaccatcctcgacttcgctcggtaagaaaaggagttctccgatcgtcaggatgggaagtgcgcgtcgacgatcaaacacctgtactggatgttcaacacgtacgtcgccgactccagacgcatgtacgaggagaccgtatcccgagctcattcgtatttccccggtgaagacaaggagtgcaggaacaagaggtacgaattcgtgaagaacgagctcggagaagagttcacctacgctccccccaaagacaccgccgttctacccatttgctcaacgggttcggtgttcatctacatcgacatgaagacgcttaagtcatgggggcttctgcactccaacgatgcttggtggtacaaggacgtcctccgaccgttctccaaagaggccaatatcaagtgtctcgcgaacaaagagaactccaggtacgcgtcaagcgagcatggatacctctcgagtttgctaggaagtggtccggacaagtgcccctggatgattggtgagagttttttgacggacggtgtgcagatcaagcttctgcttgtgacactggaacatggaagaaaagctttccccgggtccacccagctgaacgaggcggggtacaacaaacttccccgggctgacgtgcaactagaaagtctgctgagagagggaagaggagtgtacaatatatccagcctcttggattctccaagcatcagggaagacgttgtcgtgatgtccgcggacccgggacaggcgaaggtgatcaacgtttcttcggccacggccagaacttgggcgaggcaggaccctggtgttattcttaacagttcgacgtgtgtgttcggggatgactatcgtcgcgatactcttgcctcacgttcagacaagtacgagactttcaggcgcaaggaccagccttacggagtggctatcgatcgtctacgcaacgagaagaaaagaacttcctgcctcgcgacgttcatccggtactgtaaaagttggtgtgcaaacggtgcggcactgttgcttgagacgcttcaggaagcaaggaagttcttgcgttttgatcgattcagagctacgcagaagacactcgccaagatagcggacaagtacatgggacatgtaggagacccctgcagggtcatgttgttcggtaaagcgtcttttcgtgcgcagaaagggagggcatccgccccaaggaaagctttgatcagagagatggccagcaggggagtagtgttgatggtggaagagtacaacacttccaagaagtgcccggggtgtggggaggacacggtcgaggacaaagaacggagaatccggagttgcaaaaactttaagatcggatcaccggaagagtcctgtagacttcaccccctgacaccagagtttgaaatggatcgcgacgacgtagggtcgactaacatcggtatgcgtggtttcggcaaattgctgggtcaggagtggttttaaggatttttttcggattttcacttgcggatgatactttatagttggttttggttttcctaaagttgacaatagtgactgaaatcacggagaattccctccaccttcctcagaatatctttttgatttatcgaaggcctagccgtttttatcagagaagcgactccgacatgacctgtggaagcatccacgaccaggttgtccatgatttacgtttgagagatgaaagacattttttattggcagttttgtacgcgccagtgttgaaggcaaacgagtctgtcgcccccagcaacgcgtgtggcactggtatcggagcgtgctacaaacgtaaacccggtcgcggaatttaaatacccctccacattcccgtggcccgtacctcatcgagaaagctcgtggtaccatcttgctccaaggccgatggcccgtcgctactgctctgccgccgaaccccgcccaaatggcgcctattgtggaaaaatgctgccctggcgcccccgcttggcaacccgacaaaaaatggaacgattgccctcctgctagcacctggctactgttctgccacctagcgcacgagggcacaattgcctacaatttcgacgacccgaccatctgtgtcagggtactacccaaggccggcggggcgcacatataccaatgccacagaaactgccataaatcggcaagaacgatgttaacttacggacagaagcggtcaagaatgcgtttactccaaccgcgtccccaactcgcaactgggcgctacatcaccggcgtctcgatcgcttacttgctcttttcggcggttgtggtcgctttgcccccttcggagggtcagcatattcgatggtaacctccgctcctacctcgatgtctgcacacgctacgatagagcattcataccaccatccatactccacaccccccgccctctcgtaccaccatggcttcattcgtcctccacccccatgtattaccaatttagcattcggcgcgaacgagtggttgagtagtcgcaacaagctgatttccatgaacgctcgacaggcggggatcgtgccgcgcatggttttgctcggatcgatcacgagcgctcctagaccatccgcatgcatgatgtaacccatgcacgtatatccaccacctttcttttcgtaccccgcgggcacatctacatccgggagaactaccgtcaagagagtatcgccttcggcaaaagcgaccttggtgccgagacccttgcagtggattaggctattgatttccttgagcgcgtcgtgcgaaaatagatctttttccatcacgtcgtgtacctgattgatttgcaaagggaatcagcggcgtttgtttggatgacgcgcatcgtatgagggcactgctttctgcaacaacatgtgaagcaccgactacatgcgcttaccgttaaagcgggccgctgtaccggcggttgctgctgtgtgctgcgccgcaggtggtcacgtgcgggtgggctagccttcttcagttggtcgcgtagtttgtctctgtcttgctgtactctcgcgagtcgccgctccaacttttctgtgtctgccttcgcttgtgccgctgcattgatttccgcctgctgctctcgtctcttggcctcgagctgcatattcccgggacacacaaggtcaagtcaaaacagcgcgtgtgtgcgtgttgactaccgtctatatagaaatgaaaatgccatgtgtgacaacaccaactcacagttgcaagcttgcgtcgcagctcgtcgttctcctctttcgccttgtctgctgcctctctctccctttcacgcacaagcttctccgattcttcctttcttttcttctctgcttgtgcaaccctctctgcatcctgtgagaaatgcgaaaactacagcatgcggtagcggtcaaagggtagacgcgcgaatgggcagctgtcgtggtttttttgttgcgcagaggagtgcatctgttttcgatttaaaacagaatttacagcgcctcagctactgctgtacatacaaatcgggaacatgtggatcccacactccccacctcgcgtccctgaacgcttgctgcttcggctgctgatacgaggacacttagcctgctgatcccttgctccgctccggtcgctggctcaacatcgctcgccgccgccgatcctgcaccgggcgatgcgctggactccatagcggtcacccccgctgcaacgaatgctgctgctgcgacgtctactgctgttgcaggtgctcgtggctgagggacgactggtcgctctgctgtacctttagatggaccagccattccgttcttcttgtgctggccacagtgagtccgagcgaggccaggaaagccatagctggctgtctttctacactcttcgcactttttgagcaaattggtcataccctccgcgacgtggtcggcacagcacctcttcttgccatccgccttgaaaccatacgaagggtacttgttgcaacccgtgtgactacacttttgggaatgtatgaggtgaaacaccccttccttcgcctcatccttgcactgcttgcatttcccgtcgattctaccctgtgtgtctgcaatgaaagcgccgttgccatctgaagggaacacgtcaaagttgaaaaaaggggcaagcaggagagatgccacaccctttttcagatgttttgtacttctgctgtcgtggaaacaaaaatgcgagactcgcacgcgtcactgtgttgtagtacagctgacgtccagccagagctctagagcgccaatagcataccgccttgaagcttgacgtgtcgagggctccatctacagtcttctccagatgcggcccaacagcacaaacagtacacacagcagcgtgctctcggtcggagctcggttttggaaacgatctctcacctttccttgcatacacccctctccctcgtccgcaactacattttcgtggcatgttgtgagctgacctcgggtcgactgtgctcaggttccctccctctctcctccgccctactgctgtctactattggccccggggcacgctttttgtactattggcccatatgcggggatggggtgtactattggccctggggcacagtgataagtgtactattggcccgcgttttttcggacggaagatcaagcagcgcacctcgagttgcgcacaagagcagaggaaacacacacaacgccgccgtgcctctgctgctgctccgctgctgatctgttgctctgctgctctgctgccctgctccgctgctctgctgctctgctgctccgctgctgctctgctgctccgctgctgctctgctgctctgctgccctgctgctcggctgcccttctgccctgctgctgccgaagcgctgccgccgctgctgctactctactggtgtgctgctgccgaagcgctgccgccgctgctgctcctctactggtgtgttggtgtactggtgtgctggtgtactggtgtgctggcgtactgatgtgctgctgctgctgccgctgctgtgctgctgtgctgccaagcgctgccgcgttgcaggtgagctcgatgttgcacgagagagagccgtgatgcgcgtgaatgaagcaaggagtaaaaagggtgttgtctacagcgccgtttcgtctccgtgaaggaaaggagaagctgggccacaatacggtttgcttttcggcgcaattgaccagcaccggtaaggcacgagccgagctttcagccgttgtgctgtgcgagcgtcaaggttttgagtgtgtttgatttaaaaaactgcttcagcaacaaagacagccggtgcacactgctgcaacaagatgctagagttcaaactcggcatcaagagtaccatcgtctaccagccgcgccacacacttctgtcgcattcccttgtcgtgaggtacttccgtaccgatgctcgagtgtgccaaaaaagaatggccggccagtggacgaacgagtcaccgccgctcggcggccaagccctgctgatttgcaacacggtcacaattaacatcgcaacatcaatccagagcgccaaatcctctgcctgtaaaactatcgaaacgcttcacgttgtcatggcccatccgccgaagcctcgcccaccggcaccgccacgcacgtaatcgaaccactgacagccgtagtttaacgcctctggacagtaataaattaacccgtaagaaatgaacaaaaccatccaaaattggtaggtctcgttgaatccggagggtctatattgtcgaaagtaactacttccggacagttattgccgtacccaaatacgacactcatcaacaaacaacgattttctaaagcttaaacaaggttaggggttctcgcgaaaactaatcggggctgactttctttcgaaatctgccgctcctctcgctgactgtcgatattagtcgctatcatgctattgaggagagtacctccattttatgtacacttttctatcgatgtagcctgtgatgatcaaacttccatttaacgactgatgtcgatcctcgtggaaacccctgtggaggcccttaaagagcgattcatggggatcgttggttgcgcgatgtagagctcgttgtagttttttcgtagcgtgttgaatttgacgaccctgtacagcagtgttgtgatgtcggccttcttcttcctcttcttttttttcctcgtctttgattttgtggcggtggttgccatggtgaaggtgaattgtgaccgatgtggacgatcaacacactccagtgtttaccgataaaattgaaatcaaacgtcttttttgcaacattttatttctcgccaatcgaacgcacttctagaaaaagctcttgattgccgaatttagtacacttgtcattcactagttgacaacacccctgatcctttccgcgaaccaatctttgtcgagttcgtcgaaacaccccaccgactccaactattctttacatgatgtcaaggtgtcaatctctgactgaaaattgatacccgctccacccctttgaccactcgtctcaataggttccggacgtttcgcaggagctcgcggctgcacaggtgactggcactcagccagacgaggcagtggcggcatctgcatctgcgtaggccgtggtcgagacggtgacgcctgtgcaagagacggagcatgagcagcctgttccggccagagaggccttggtgaaggtgacggggcggtgcaggcagctggagaggccgatgcaggcgaagtgacgtcagtgtctagcgcgttggctgtggtagcacaagagccgggcgaagcacagcgactacagaaaagccgcggctcgcacgacatgctcgggcatgcaccagcagcaacggcactccagtgtttaccgataaaattgaaatcaaacgtcttttttctagaacattttaggatagtactgtctactatgcttttttgcaacattttatttctcgccaatcgaacgcacttctagaaaaagctcttgattgccgaattaagtacatttttcattcactagtcgacaacaccatattttttggagctaaatttacgcagtacgttttacacgaaacatttggatatgtgaggtgacgacccgacgatctgtgtcagagtgagggagcgcaacgaagccggtggcccaaaaacgcatccgccgacgccatcaggcaaatagctaaaacagatggcggccgagaagcaagagtccgagacactcacgcgacagcacaacgacaacacgctgtggcgcaacggcgtgctgatgaaaaagttttttttaaaggcgggcgacggcatcgtccgtagctacgggtggaagaaggcgcccgaagagcaataactactcccaagccccgccaggcccaagcgcaccaaggttgcgtagctcatcccccaagcccccatcacccccactcgttccagcgtggcggcgcaccccgaaaccagtgtgtccgacctggcacagctgaaacatgtggccaagcataccctccccgcagcctaccccgccccgccgatttcaaaaacgacacccgccccggttgaaaacaatgctagaatcgtgtgcagtcgttaccccaccccctccaccccctgttccccccgtgcacagtcgcctaaaagtgcgcgacatggtccgatgactggttgcgcctgtgcacgccgtcgctactgctctgccgcctagcgcctccccccagcccgctggaccccgccccaatggcgcctattgtggaaaaatgctgccctggcgcccccgcttggcaacccgacaaaagaatggaaagattcctctacccactactgctctgccatctagcgcccgcccaccccgctcatcagatgccagcaaccatggctagtttcggttcgcagtctatcatttcatcagggcaatcgtaaccccatgcacggtacttgcaataaatctgaaaccgggcgtcctccttgtccgcgtcgacggcacggaggtccgcttcaacctctctatgtgtcttttccggagtcttaggaagtttccagccacttggcttcgtcagtgtcatcgtcttgatctttcccacgctttcgacactaacacttcgaatattagcctgctccgaccgaatgtggatccatttgcgatcccatgggttgagatccggcagggacaccgaactttcagacgatgaaatgaagtccttaaaaaccctgtcgagaacctccgtaggttgagaaggttgtggttttttatatcctccccgcttgcgcttggacttgaccgatgtcgtcatctcgtgtgcgatgtggtcaggtcgcctggcccctctgatccattcttcataatcgtaccagtcgatgagccagaagtcaaatagttcaacatcctcgtctttcattgttgaccagcgaagtccgtctgcgtagctcgaaagaaggttccactgatgttgcgtcttgaatacggcgtcgaagcgagagtcccatgtgtctncttggacttgaccgatgtcgtcatctcgtgtgcgatgtggtcaggtcgcctggcccctctgatccattcttcataatcgtaccagtcgatgagccagaagtcaaatagttcaacatcctcgtctttcattgttgaccagcgaagtccgtctgcgtagctcgaaagaaggttccactgatgttgcgtcttgaatacggcgtcgaagcgagagtcccatgtgtcttgcgaaaaatacttcgcatcaggaaataacattctcataggtacgagatcgttgtggaggttttccagcgcgtttgttgcctcttcttcagttggtttccagttggtgatttgtgatgccatgttttttgtaggaagtgtgagacggaatgcgcgttttaaagttcataacttttgagtaaactttcgtttgctgacgtcggggctcgactcatcctcgacactgagagagatccgatgtgacgatgagatgctccagctcggatgcaaatgcgagcgtctttcggatcacatctttcgcgctcccctttttcgatgttgtgtcaacgcggatagtagaactatccatgctttcgatgaggtccatgtttgtttgtttagttgaactttgagaacatatttttgggagctaaatttacgcagtacgttttacacgaaacatttggatatgtgccgagaaactggcagaggaaaagtgtccaaagtgtaatagagtaggaacgctttgtgggtgggattagtgggttacatttggttgccaccgccccgaccatcccggctatcgctagaataaacctgtctttacgaagttgactttgaattgtttgtaccccatttttgtccggatacgtttgaatcttccgccaataaccaattccaaactattgatttcatctagcaactcgttagatacgtcttttttgctctcaaggtgccggcgagccagcattctcccgaccaagcgtattactacaaaaagaacgatcaaaacgccgaagacaatgccagattttttcaacatgatgctgtcccgtatttataaataaaaacattttattttaatatatccagtcattttgtgacctcggcacccgctgatcaacccgctgccaactggtgcactcctcctactgtgcccacccgccattttgtgacctcggcacggttgaaaacaatgctagaatcgtgtgcagtcgttaccccaccccctccaccccctgttccccccgtgcacagtcgcctaaaagtgcgcgacatggtccgatgactggtgctgcgcctgtgcacgccgtcgctactgctctgccgcctagcgcctccccctctgccccgtctgggctgttcgcgaggcctctttttgcgacgagcttgtgtgccacacacatgagaaatcaagtcaccgatgcctctgacagtctactctagggcagcatccgccacacatgttgtatttgcacttcatcgcagacagggagccacaaccacatgtccttcccgtgccctgagaggacggcgtactattcccgaccatactcctcttcagcgctctcttttcgcgtgagaccagaatgctacgagcactgtttacatcataaccgcggcggagcaagaccaccgcttgttctccgtgcttacgaacgagtgcatacgggccgctcaattctcttccccgtttaagaactacactgtgcgcctcttcggacaggtctgcgttggcgcggatgatggttgccgcggcaacgctctcctccgccgacagcttggacacgaacttcttggcgaatttcgggaccgtgcgcatccacttgaggtaggtcgtgtcaaccatgccctcgatcgacgccctccggtcctcgtttaaaaccttctgccttttctgacgcgtaatcctctgctcctctgccgcgcgctcacgcttctcttgttttgctgtttcttccgcacgcactctctccagacaggcgttcaccttgtctccatgagccttgaagaaaaactcgagagtcatgctctcggggatgacgccagggatggccttggtgatgatggtgttgtattcgaactggccgtagtacgagctgtagccgcccctgacgttgaccgggatggtcgaccacacgaggcgcattagcccggtcagtattccgccgttgatgtagcgcacgttggtctctaggcccttggtacacgctggatgcgccgggattccccacggcgctcgaattccgcccatgtagctcttgtggcagacgagacacctgcgctccacgatggctttcaggtgcccgagtcccggattctcggcgagattgcacagagtttctttctggtatttggtcatgttgtgctgcgcggcattcaaggcgagcgggatgttgccgtacacgtcgtctttcgtgaacctatcggtccttgcgaacgctgccacaaatttcgtatcgggtaggaaggcgaccaccaggtcgatgctgaattcggcgagcatatgtagtgattgtaagagtgcttatgccttgccactattttaatgtttacagttaacaaagtaaggcaccttcgccaaattaattgcccaccagctacccctggtgcgtagaaatcaaccgccccatccccaaccaccgttactacgctgagaccacacgagtaaaaatattgccatggcacaagatggagaacctactcgaggtttgcggggagatgggccttgaggtagactacctcagtctgacagaacgcggggcgttcgcctttccgatgaaggaaaccactagggcgttcaacatgagcgaagataaccctcaaaccgtcacaactgtgcgcgataaaaacgatattgccaacaggaagatgtctgccacactgtacaaccggcggctaagtggggagagcgtgctcagtgcccctgaacaagactgcgagggagatattggtttaattttttgcaacggcgtcgtgcattcgtgggatcatcccaaatcggtctcagagtggagaaaatttttcaagtagtgtgctacaa

SEQ ID NO: 273 - DNA, 21257 bp, Ectocarpus sp.
  source 1..21257: mol_type = other DNA
gacgcgaataaaaagtgctcccggagttttcgactctgaccactgcaacacattcatttctattataaaaagaacccgactggtgtcgggcgtgtgcaacagttaccactgataattgcgggcgtccagattccatgtactctcttggtacaaaaacaattgccctcgggcaatggcttagctgcatagcttgaaaggccaggctttccattcaaaaagggaagtctattacacttgcggggacttggtgaaaggaccgaggtcttattaaccatgttcctccgtaatacaaaactattttctttgcgaggcagcggctacggcgctggcggcaccgcgccctgcgtcgacagtggtgtgtgatcaacgccagcaagggcagcggcggcaggaacaagaaccacccggctacatgtcctcagtaaattctcacaggaaagccacaacctcacggaacactgcatcctcattcagcgataacacaaatttgagtgggcagactccacccccaccccctctttttttcggctcggggatgtccacaggttcccccgccgccagcgtgtgcgcacgaagcatgacgagccatccccggcgacgccatgctctgtccttgggagcgttcaccaggaggtggcggacgcgctcagccacagctggatcgagattccggatgcggccgaggtaatcggcgggagttttgcccctctcatccttcatggtctcgtccgccccccagcggagaagaagatccacgacagaaggtacgcagctcccacggttcattatgtggtggagaggcgtttgtccgccatacgaacaaaagttgaccggtgctccacgttgcaggagcatgagacgagcgtcgtacatgttctcgagcgtgcttgttttgcacacgccgacggagagcaaatatcccagctcttcttcgtctggctctgcgccgctgtcgagaatggcctccatcaccgccttagtcttcgtagcgctataatcgtactcgcgctcggcaccagcgtttaacagagcctttatgatgcgaacatgaccaaagcgcatggccgatgacagcggcgtttcgccatccatcctgacttcattcgggtccgcttcgttctcgagtagtagagtcacgattgcatcatgtccaccgcccgcagcacagatgagtggctggtcaaaatcgaattggctggttttgacgtcacaaccattgtctagaagagtcttcaccacggcaaagtgacctctgcggcacgccagtatgatggtgaattcgaggaaacagtctccgtcaatgtcgctcaaaagggcagtcatgatatcattgtctcctcgcagtgcagcaaagtcaatggggcgcaatgacatgtctccgaggtctctcatactacatccaacatcaagtgttgcatcggcgcctttggagagcagtgtttgcacaacgggaaagtgaccattctcgattgcttccaccagcggggttttcagattggccccaactgtccatgtcgaggacaatcctctgccggcatcctcttccgcccccgcctccaacaggatgttcaccaccgtgttgtgccccttgccggcagcaagatgtatggcatggcgaccgtcgttggggctacggaagttgacatcggcaccagcagccaccagttcctccacgacaagcacgtggccttcgcgggatgcaagctgtagaggggttctccctgcatcctgaacgctattcaaagcaagccttccgtcagccgacttcaccagcgttcgcaccttccacacgtccccgtattcagaagcactgtgtaggttacacccggataaatccgacatcttggtggtgtgctggacgctgttgtagtttatgattgtgacacggaagcgcgacggaaagaattacagagattcgtgttcagcataaacgagagctacttgtctcggttatggattcccccgtaatctgcgttttttatgttgacccgtgtgtgtcgatttgaataaccttaacacagacccgcctgcgtacagcacgctgaacgtcccggactgcaagacaaaacagaaaagtgattgtgaccaaacgccgggatgtcaactttatggtgacgagtgtgtaccaaaagttcaggaaacaatcgccagcttgtacggaggaagagcgggcgaggtccagaggactttctccgccgtgcccggaagagactgtgctccgcagtttcgggagatgtacgaggacaaccttgactcgatcgacgcgcgagcaaaccgagacaaaacgatggcggcgaagctcgcacgcaatgtgtctggaggagacacggagtcattaccgtcaacttaagaaaatggtaggtagaaaattcgttaactgtgtcttaacacatgtaactctccgcgagggagtttgcttcgttctcgtccgtctgactttctcagcgagacacacgagaacattcacaactatcatcgagaaggctgtgtttttgtctcaagccattgactgaggtgacgctcagagagcaggttttttttcacaatgataaacacataccgggattcgaacccgtgacctttgacacaagagtccaggtgtgtacagcttgtttcatgctttaaaaatcaggatcttcgctggtggtctgcagtgcatccgaccaaacggcactttcgccttcagatctgctacgcctggacatttgtatctcgagggaccggagactcttttcacgttacggaggatgtatgtgacatgcgtgtcaagggtatagagatatgacgattctttcgtactgccttgcattctcagagtgatcgtgtctaacaacaccctggcctccacctcctggatgtaaagatccggtgttcttgcgtgagctttttcgagcctgaggtttgatttcaatcgtttaaacgactcttctacccgccacctcgaagcgtacatagtcttgatatcccttcgagatagcgacgggtcgttcgtgaggcaaacgtacgttttaccgtcgataaaatatttcaaaagacgcgcctcgataccgagaatcaagcacgcggcctccgtgcgacacgagttaaagaaagacctggtgcctttgaaagcgtctatcttgagccgccaaacgccaaatgcatgagagtcatgaacgctcctcagcaagttcttggagtagtagcctctgtcaaacaccagagtatcccctttgcgtacacctcggagcatctcagtggctgcctttctttcgttgaagtgtttcgtgagctcaaagtccacacacgcttttgtttttacgtccaccatcgaagaaagcatgacaagaggtcttttcgcgggacgcgggaccggtttattgttcgtccgggtcatatatccagccccgatgaacgaagggtgcacgtgcactttcgaaccatctacagcgaatacacgtggttcgtgtggtcctcgttgcaagaaccggtttacttccttgaaagctcctggtggaagcttctttctggccgaatgtatcgcctgagacgagtactgttcgttttccatcctcagtatgtgagcgacacctctctcttgaatacaacacttagtgagcgtatagaaaagggaagatgtatctagctttcgtcgtctctgcatccactgtccgtcgcactttttaaaagcatcgtatatttcaggagacatcggtttagtcatttttttggtttataatgaaaaacattttaagtttccaacatgcttaagttgacgacactgcaacagatgggttgccttctgtgtatataggcactgctgtgcctgctgtatttcgtcaagaatatgaagattgcctgccgagggcgtggcccccaaagcttttagatactgctgtacacagacacaaaatacttcaagacacgcgccctgacaccaagaataaggcatgttgcttccgtgcgacacgagttgaagaaaggcctagtgcctttgaacgcatttatcttgagtcgccaaaccccgaacgcatgcgagtcatgaacgcttctcagcaagttcttggagttgtagcctctgtcaaacaccagagtattacacacacaaccacgcgacacccttcggtcagaacgctacagcagcagcaatcgaacgtagggcggcatttcgctcagctcagaaaagcgaaccaaacaacacccttcggtcagaactctacagcagcagcaatcgaacgtagggcggcatttcgctcagctcagaaaagcgaaccaaacaacacccttcggtcagaactctacagcagcagcaatcgaacgtagggcggcatttcgctgcatttcgctcagctcagaaaagcaaaccaaacaacacccttcggtcagaacgctacagcagcagcaatcgaacgtagggcggcatttcgctcagctcagaaaagcgaaccaaacaacacccttcggtcagaactctacagcagcagcaatcgaacgtagggcggcatttcgctcagctcagaaaagcgaatcaaacaacacccttcggtcagaactctacagcagcagcaatcgaacgtagggcggcatttcgctcagctcagaaaagcgaatcaaacaacacccttcggtcagaactctacagcagcagcaatcgaacgtagggcggcatttcgctcagctcagaaaagcgaaccaaacaacaccctccggtcagaacgctacagcagcagcaatcgaacgtagggcggcatttcgctcagctcagaaaagcgaaccaaacaacactcttcggtcagaacgctacagcagcagcaatcgaacgtagggcggcatttcgctcagctcagaaaagcgaaccaaacaacacccttcggtcagaactctacagcagcagcaatcgaacgtagggcggcatttcgctcagctcagaaaagcgaaccaaacaacactcttcggtcagaacgctacagcagcagcaatcgaacgtagggcggcatttcgctcagctcgtaaaggcgaagcaaacaacatacttttgatactggcacgcgtttgaaattcatccacgctacctgccacatcgctctcacctagcacacacactaaacacgtttcccacaatgtcgcttccacacaacacacgccctgcgcacgtcgttccgttgtgtggctcttgattgagtcacgccttgcgggcggaaaggttgggccatataattcgatttcatttctgatttcttgtgcacatgcgcatgagtgaggggcacaattgtgaaaattttcaaggccgaacactgcagcttgcttcgagctttaaaaatcaggatcctgccggatcaacgtaaaattagagtatgttgttccgctaggtcaggcacactgctgtataattttttcatggtcaacggatattttggggctgagatacgggcctagacgtggaacgcgcggcaggggggtctctaatttcaagtaacttacttcaggcgggccgggagaccacccccgtacccaccattttgttttatttgaccagtgggtacgtgcaaaactcacataatttgtttttttggcaagggaggggtgtggggtgtagttttacaccccgtgttatttaacgtacaatacgccacgtgcgcacacatgggggagaaaacggcacacacgatagccgcgtctaaaataaaacttttcgcacagggaagcaccagcacacacacaggaacgatttgccggcgttcacgcagcgcgcgggcgagttttgtgacctatacgagcgtgaccaaaagtctagaattcgcgccacaggttcttggtggacagcacacacatcaggcgcgcacacgtctacctgtgcacacgttttcacacacagacgcccgcaataacaccttcttttcgaacagagtcccccgagcaccctggtaaccgatcccggtgctccaccgctcgctcctgttgtcgtgtgaggcaggacgagcgtgtgctagcggaatgcggtgttgtggaaaagcgtgacgacagggaggggttacgtgcatggaatattattacatacatgctccaatgccaaatgcgagattccgcggagcatcctttgcgtcaaggggtgttggggtgttgtcctgcttgtctgctactgccaccgtgctcccgcagacttacccaccacgactaccacgaccgcgtttctgcgagatggatcgaaagcggtggaaaaccgatcctcatcgtcccaccgaggtgtggctacgtcgatactacacaatagtttacagggcacgcagcggttccaaggctggtcaaggagacagcatcacttaggaaggctctgttcaccaatcaatcacggccaacacacagcacaacagtaaaccatgaccactctcgtcaccccctgtcgtgccttgtatacaggcgaaacggaacaaatccgccaaaaggtcctgggaaaggcgccaggcgaaacaggcgaaaaaacggttacaagaggaagcgggcgaggccggtgagttttgcgcacagagaattgccaaaatagaccacgtgcacacatacaccgttgcagtcttttcaatcgaaactctgtacaacacaaacaaaactaatatcagctacattgctgctgctaccgcggatgctgctaccgcggatgctgctatcttggccactaaccctgccactactcctgctaccacaaccacagcttctactgctactgctgctgccgctgctgccaccgctaccaccaccgctgccgctgctacaacagcttctactactgctacctctcctgctacacatgccgctacccctgctacaacagcttctactgctgctacaacggttgctcctacacccgtagctgccgctgctgctaccgctaccgctgccgctaccgctaccgctgccgctgctgctgctgctgctgctgctgctgctgctactgctgctgcatctgaccgcccgatcggcaaatccacgggagttgtgccgacccccgcgcaggacgccagggatgcggtgcagaatctcatggcttcactcgatgcagcagcagcagagaatcaaagcggcgccatcgaggttgcgtgccaagatttccgggagacggcgttcggcaaagaggtcatgcacgatctccacgtcgacggtatcgtgaacatcccgtacgggacgtcggaagcggacgctctcagcatggcgggcgttgtgcgtggtgcggcgcaagacttggtgctgggtgagaaaccccatagggagagggtaaagatcaagggacagacgcggtacgcgctagaggcgatatacatggggggtggggcagttgccgcgttcgaggagatcgcctctctgctggccgcggtcctgtgtgctgtcgtggacggcgcgtccggcggggtggtaacccacaagcacgtggcactggccaacgcgatggggacgggggtgcaaatgtggcaccgggacgggcgagccaaggaggttttggccaagacgaacccgtctcacaaggacaacaggaagaggccggaaccacaccccttctcggccgtgattgctttcgaggagaacaccgtgcttcacgtggtcagaggttcgcacaacagggggaaggaaaacgacttcagccaagatgcaccccacgcccaccacatcaccatcggatatgcagcggtgttttactccattctcgtgcaccgcggaatgggtaccgacggcgattgcccgagcgagaacgtccgcgggcacatgtacctcacggtagcgggctgtacgttgccgtcgttcggaaagattgaagccaacatcaaggggcccgaggccgatgctaccgctcctgctgcatccacccccgtcgccgcaaccacttcgccttcggatgacaccgctgctgctgctgctgctgctgctgctgctgctgccggtacttctggtgccggtgttgccggtgctgctggtgctggtgctgccggtgctgccggtgctgctggtgccggtgctgctggtgccggtgctgccggtacttctggtgctggtgctgccggtgctgctggtgctggtgctgctggtgctgctgatgctactggtgcttctgttgccggtgttgccggtacttttggtgccggtgctgctgctgctgctcctgatgctcctgctgcttctgctgctcctgccgcttctgctgctggtgctgcatctgctgctggtgctgcatccactgctcctgctgctgctgcatccactgctcctgctggtgctggtgttgccggtgctcctgctgctgctgctgctgctgctgcatccgctcctcctgctgctgctgctgctgctgctgcacacgagtacaccgacgcctggacagggatagtcgatgatgtcgggacgggaacgaagggagggttcgatggcacatcgggtgccatgttggttgcggggacggatgttgatgctactaccgctgctactaccgctgctactactactgctgctgctacacctgcttctactgctaccactaccactaccactgctgctgcaacgacggtgacgcatggtacgagaaaggacttggcggctcgattcgagtcgttcatattccatcttgacaaggggacacgcagagtactgatgtgtttactggagacaaacagcgttttggacggcattgagtcgttcggagaagacggcaaggacgagggcttgggtaacggactgttttcctgtctccttcgcaaagacactgcccccaaggaggatacatctagacgaccctgtcctttctggagcaacggttccaggaaagaactctcagagaatgtcgctatcgcatgcacgaaagcacagatccccctcgtactggagggcgacgcacctgcacaatcaccaatgggtgagatgatgcagtacgccgctggtaaaggcgtggcccgcattggctacataggcaaaacgtctggacgggggcctctcaaactggctccgggcttgacggatgcctggcgcactggtgctgtgacggataagcaactgcgggacacgctcaacggaggaacgttcaccatcgacaatacagaggtgcggtataatattatttatttattatatttagtattggcgaagatgttgtcgtcttcacatccttgcacaatatccggactggtcatactgacgccgacgccttccgtggtctcctgttgtgcgacaggaaaataagcgcacggacaagacgtgctacgccactctggaaaacgacaccgtgactgcgatgattcgagaagggactcggatgggagagctttgttttccacgcaggggaaaccacctccaatatgggacattgaccggaaaggaagctgacggcgttgcgtggtcgggcagcgagtgcatgctatttgccaaagacggcggaatgacaaacccacacgtggacgtgcaatctgtcccgggaggaacagggagaataatccacatgcccgcagcgggagtcattcgcagagtcaactatgttgaagaaaataggccggcaaaacaggccatcgtggtgcatgcggacgatatgtcgagggtgattgaaactctgaaaatcaataccaagaaggagtccgccagtcagtacggcggtccgccgcgaacgcttccggagttcgcgagggtgttgaaatccaagggaattcggtttgttgtgatgaactttccttcgcgctgctcgtacgcccttccagcgaggtgtgcgcacgtgtttgtcacgatagggttggttgagagctcggcttggcaccctgtttacaagcaggatatgtgatatccaggattttttttcggcaccatgcacttgattgtggtcgggtagcgagtgcatgcttttcgccaaagacgggggggggatgaccaacccgcacgtagacatgcagtggtggagagcgcggcatggcaccccgtgtttaagcaggacatgccgtacccgaagttgattgcgtaacacttgaagtattttaagggcgttttttctcgtcactgaggtcacaccattcctgccggttttactccaacccgtggtctcacaagagagctcctaacgatacttttgcctacgagagctaggccctctttcatgcgtgcacacgaactggcgctacgggggctcctgcactccaacgatgcttggtggtacaaggacgtcctccgacctttttcaaaagaggcaaatatcaagtgtctcgtgaataaggagaacgccaggtacgcgtcaagcgagcatggctacctctcgagtctgcagggaagtggtccggacaagtgcccctggatgattggcgagagtttcttgacggacggtgtacagatcaagcttttacttgtgacacttgaacatggaaggaaagctttttccggttccagcgagctgaacgaagcggggtacaacaaactgccccgggctgacgctcagctagaaagccttttgaaagagggaagaggggtgtacaacatatccagccttttggagtcgacaagcatcagggaagacgtcatcgtcatgtccgctgacccgggccaggccaaggtgatcaacgtttcttcggctacggctagcacttgggcaaagcaagaccctggcgtcatcctcaaaacttcgacgtgtgttttcggggacgattatcgtcgtgacactcttgcatcacgttcagacgagtacgagacgttcaggcgcaaggaccagccgtacggagtagccatcgatcgtcttggtaacgagaagaaaagaacttcatgcctcgcaacgttcatcaagtactgcagacggtggtgtgcaaatggtccggtgttattcctagagactttgcagacaggaaggaagttcatgaggtttgaccgtttcagagctacgcagaagacactcgccaagattgcggacaagtacatgggacacgtcgaagacacttgcagggtcatgttgttcggaaaagcgtcttttcgtgcgcagaaaggaagggcatctgcaccaaggaaagctttgatcagagagatggccagtagaggcgtggtgttgatggtgaaggagtacaacacttccaagaaatgcccagggtgtggagaggacacggtcgaggacaaagaacggagaatccggagttgcaaaaactttaagatcggatcaccggaagagtcctgtagacttcaccgcctgacaccagagtttgaaatggatcgcgacgacgtagggtcgactaatatcggtatgcgtggtttcggccaattgctcggtcaggagtggttttagggattttttccggattttcacttgcggataatactttatagttggttttcctaaagttgacaatggtgatcttgacaaggagacacgtaaagtactgatgcgtttactggagataaacagcatgttggacggcactgagtcgttcggagaagatggcaaggacgagggcttgggcaacggactgttttcctatttccttcgcacagacgttgcccccaaggaggatgcatctagacgaccctgttcttactggagcaatagtcccgagaggaaagaattctcggagaaggtcgctatcgcatgtgcgaaggcgcagatcccgctcgtactggagggcgacgcacccgtacgatcaccaatcactaatatcaacttaagaaaaccggaactattaagttgtagtgaacaaaaacagatagaaacaactaagttgtctcctcaagggtccagcttttagggttttttaaacctcggaatatcccactgtttccaggcaagtcgtttgttgaaacttcggttgcgaaagcttgtcgtcgtttcttcgtagcgtgttgatgttgtagacctcgtgtagccgtgttgtgatgtcggccttcttctttctcttttttttcttcttcgtcttcgaatttgtagtggtggttgccatggtgaaggtgaattgtgagcagcgtgggctaccaatacactcaaatgtttacgtataaaattgaaaaatgtggtctttcttctagatcgtttcgagttggtaagattcgccaaattgttctagaaagcttaagttgataacaatgtcaccaatgggcgagatgatgaagtacgccgctggtaaaggtgtggcccgcattggccacatcggcaaaacgtctggacgagggcctctcacactgacaccgggcttgacggatgcctggcgccttggtgatgtgacgggcaagcaactgcgagacacgctcaacggaggaacgttcaccatcgacaatacagaggtgcgtagatgttgtcgtctgcctacaattaaaaattgaaaagtagaaagcacaatatacgaactggtcatactgacgcccacccccttccatgatcgcctgttgtgcgacaggaggataagcgcacggacaagacgtgctacgccacgctgaggaacgacaccgtgactgcgatgattcgagaagggactcggatgggagagctttgttttccacggaggggaaaccaccaccaatgtgggacattgaccggaagtgaggctgacggcgttgcgtggtcgggtagcgagtgcatgctatttgccaaagacggcggaatgacaaacccacatgtggcattgttatcaacttaagctttctagaacaattttgcgaatcttacctactcgaaacgatctagaagaaagaccacatttttcaattttatatgtaaatatttgagtgtattggtagcccacgctgctcacaattcaccttcaccatggcaaccaccactacaaaatcgaagacgaagaagaagaaaaagagaaagaagatggccgacatcacaacacggctacacgaggtctacaacatcaacacgctacgaagaaacgacgacgagctttcgcaaccgaagtttcaacaaacgacttgcctggaaacagtgggatattccgaggtttaaaaaaccctaaaagctggacccttgaggagacaacttagttgtttctatctgtttttgttcactacaacttaatagttccggttttcttaagttgatattagtgacatgtggacgtgcaatctgtcccgggaggaacagggagaataatcgctatgcccgcagcgggagtcattcgcagagtcaaccatgctgacgcacacgggccggcgaaacaggccatcgtggtgcatgcggatgatatgttgagggtgattgaaactctgcaaataaataccgacaaggagtccaccagtcagtacggaggtccgccgcgaacgctgccggagtttgcgagagtgttgaaatccaatacggtttgttgtgatgaattttccttcgcgctgctcgtacgcccttcccgcgaggtgtgcgcacgtgtttgtcacgatagggttggttgagagctcggcttggcaccctgtgtacaagcaggctatgtgatttccattcgggtcataacgtttgacgagagatgtattttgtgggggtgtccaacccgcgcgtggacgtgcgtagacgcgcgtgtacatgcccgcagcgggcgtcattcggagagtcgtacagcggtaggctcaccacgctccccgagtttgcacgagagctcagcggggtggtagagagcgcggcattggcaccccgtgttcaatcaggacatgccgtacccaaagtaaccattgttatcaacttaagctttctagaacaatttggcgaatcttaccaactcgaaacgatctagaagaaagaccacatttttcaattttatacgtaaacatttgagtgtattggtagcccacgctgctcacaattcaccttcaccatggcaaccaccactacaaattcgaagacgaagaagaaaaaaaagagaaagaagaaggccgacatcacaacacggctacacgaggtctacaacatcaacacgctacgaagaaacgacgacaagctttcgcaaccgaagtttcaacaaacgacttgcctggaaacagtgggatattccgaggtttaaaaaaccctaaaagctggacccttgaggagacaacttagttgtttctatctgtttttgttcactacaacttaatagttccggttttcttaagttgatattagtgaaagtaacattttgcggttaggcgatctttttttatcggcttttaaaatgttgtactgaatgtaacatcccttcgagtcgtgacgagaagcttcagcaaagtcactctatcgactatgagcacaggcggggtcctcaacttttccgagctggagctgtacgataacgatgacaataacatcgctctcctcggaaccgcctccgcgacctccatgatatatggctctgcgggtttaggcaacgatggtatcacagatcatgtattcggaggccctgacaatccagttttacataccgagggttcggcgatatggacgcttgacctggacagaagttatctcttgacggaactccaaaaggcggatagctttgttttcgataacaaaaagtgtgtagtgcaaagtgcttaatcaaggccttcgtgtcgcgcgtcgtatgacgatggagcatattctcttgaaaataatgccttcagtatatcaacagtaaacaatgctcaccaaaaacatctggtctcagatcggggtaaaccccgcggatgcccttttaccaccagtgcacaatctgggcatgatcatccttcgggaagagttgacggaagccgaaagcgatttgcacgccgcgcgcgtagcactgaaaacactcgaagaagccggtgccagcggtgacacgagcgacctctatacagcgatgtggaagctacaaaaaaaagaacaagcatactttgcgagacgctacttgcagacaaacaaggccgtgcttcggggatggcacaaccaagtttccaagtacgaactctcgggggaaaaggtggggcatggagtccagggagttgtctacggcgtgatcaaccacccggacaaagttgtcaaactgtatcctacacgtttccagcttgcacacaactctatcaccacgaagcaattcgtctacgacaagaccgcctccgacaacgggttcggtcccaaaatatacgagatttcttccgatggtcgagtcgttgacctgtcggacaaaagcacagtgcccaaatatcgttataaaagaaattttatggtagtcatggaaaggttagcaggtatagacatggataaacagtatgttggaattgttaacgtgtggaagaaaatgagacaacacgggctctttagtggagacggattctatggatactcgcttcaacacaaggcaatcgttcatgcagattttggtgcagtatggaaaataaaagacgatgatgagttcaaagatgcagtgtatgaacacttggaagaacgcaaggacagcaagggccttgagccggacattgcgaaaagatacagagacgagttcccgggagacccgttcactcaaggcatcttggtaccagtgttggcaaagttaggcatctaatctattaacacgaaggtcgccggacggagtgcagttttgctttgtttaaatattgacgtgcgttaagataccacgaaatggatactctgacaacaagactcatggcccgcagcggtctcagcaacgccactcgtcctcccgcgcgcagcacacccatggtcaaggccggtatcgggctcaatccgtccaacccactgcttcctcccgtgcacaacttgcgcatgatttatctgaaggaaccttttggggatgctgaaaaggatttgcacgcggcgcgtgtagcacttaaagcattggaaacgactaacgacgacaccaccaggaaagcgctgtacaaagcaatggcgaaactacagggaaaagaatcacattactttgcgaccagatacatcggcagagacaagccgcttgtcctaagtggctggaagtcacacttcttttcgcacaaagcccacgacttgtttaaaaaatcaagtattcgtttttatttccccccttccggtatgcatcaagacgccatcgatgccgcagaaataagcttttatgctgcggaagacctttgggaaatggaccaagaattcctagagcctaatccggagccgaaagcgtggttcgatttgaggaaaggcgatattaaaatggatattgccagtattgaacaagttattcaaaatacaaacaccacatccaatgatgacattacatctatgaatgaatctcttgccaacgcgaaaatcatacaaaggcttgctctcctagtggataacgtacgagaagttccgcacgatttgctgtagttgtgaacatcggacgaaacgtagttttgtattttttaaatgttgacgtgtgttaagataccacgaaatggatactctgacagcaagactcatggcccgcagcggtctcagcaacgccgctcgtcctcccgcgcgcagcacacccatggtcaaggccggtatcgggctcaatccgtccaacccactacttcctcccgtgcacaacgtgcgcatgatttatctgaaggaaccttttggggatgccgaaatacatttgcacgaggcgcgcgttgcgctggaaagtgtccaagctggtggtccatcggcacccttgtacgcagcaatggctaagctggaggtggccgaacgagactacttcgccagacggtacttcggtggagaaaaagctatactgaaaggatggaattgttctaaattcaaacaaaaaattaaagaactaatcagtaccgcctcagcaagatccagtttcttaaatactaacagtacacggtacgacacccgagcaacaacagctgcaggacaagcttcagcagcgtctctccagcttaaattgatgaacaataaatggtataccaccgccggcaaccgacaacaaacaaaaccaacaacatttggcaacaattttaccgcaattgaactcgcgattgggcgcattaacaagtatctgggcgaagtgttggccttaccggactctgacacaaaaaagcaaccttccgttacatccatcaaagattcccttaaacacgcaaaaatatgtcagcgcctcgctcgactggtcgaggccaaccagtgtgatcttccggatgacgtgtaaacatcggacgaagtgtagttttgcttctttaaaatattgacgtgggttaagataccacgaaatggatactctgacagcaagactcatggcccgcagcggtctcagcaacaccgctcgtcctcccgcgcacagcacacccgtggtcaaggccggtatcgggctcaatccatccaacccactgcttcctcccgtgcacaacttgcgcatgatttatctgaaggaaccactcacagatgctgaaaaggatttgcacgcggcgcgtgtagcacttaaaacgttggaaacgacggacaacccagcaaacagggaagcgctgtacaaagcaatggcgaaactacaaggaaaagaatcacattactttgcgaccagatacatcggcagagacaagccacttgtcctacgtggctggatttcgcacaactttacggacaaggtccgcgagttggtgcggtcggctgcagtacgtcagatagctaaccgaggtgacccgaaagtgacaccttccacacgtcaaggtgtcgctattacggcactactttccgggatgaacgacgatcgcctcgacccaacgaaaacgaacctcccgcgtgcacgatacgagaccggtcttgctgtgatcaagctaagagtggctactattgacgctgaccgtcaatccatgacagtcggttctcatagtacagctcaagcttatgtcataaagaagtcattagccgaatctcagcagtgcatgaggcttgcggaattgctagtggacaacaaacgcgaagttccgtacgacatgctgtagttttcagtggaactggttggtgccggggagcaagtagttacacaagagagactggtaatttttccaccaagacgttaccgaggtgctgcgcttgagtcacacaaatcccacaatattctgaaacaccccgaattccaccagaaaggcaacttccaacaccaggcgatcaccgtcatcaccgtcgtcggcatcaacaccgcgcttgcgcaacaaaatgaagccccggcgcttggcccagttctcttcgcaaacacgcgctgcgatcaatccgcggaacggctgcctctgaccccaaaaagtaccagacacccgtctaccaccgttgtcgaacgggagacacgacgcccccctctccaccaaccagtcgaaacgtagccgaaggtagtctacgctctcagtcctctcgctcaggagagtcatcatgggagtgaagccgaattcgtcctgcacactccattcctctggcgacagattttgagccaaggcctgaaatacgatggaagagtgagtctccgccactcgatggagtgcggtgttccgcaaccctctctcccaatcccaaacaaacctggtcctatccgcaccaagactgatcaaagcagataccacgaaagggttgcgatgcacgcagttcgccagagtgccacatcggttcacgctcgccccgtacacatctaccagtatccgtatgcccgacatgtcctgttcatgcccgtcgttcgacagccgcagagctgccgcgttgagactcctgtctacaaactcttgatccggagcatcccgcgcgacaatcgcccgcatcgtaccacggaagccccttgcagcagcgattgataatcccctcttccacacgcccttgtgggaataatacgcggaagcacccgcccaaaccaacgccatcccgagattatcactcgcattccgcatcaacaaagaattcccatcgcgatccttgtgatccaggtcgccaccgatagcttcatacagttgcaacaccgtcaaaaagtcacccgcacaggcgtcgaaggactccaggttgaagagaacggttcgctggtgcacatcctgcgaatgcacatttagcatgccgtgggaaagaaggtaccagaagtgctccatgtctgagagggagggattgaccgggggcggcgagggaaagggaaagggggcaaacaatgtttaccaataactttgtaggcgtggtgctcaccatttttgcgacactgttaatagcatcatcatcaccatgccatctaccaccagcacactctacaacgccgcgtggactgggtcggtcgaacgcacgcttgatctgttgtcggatggattcaccgaaatcgaccggcggtgcgaagaaaatggggtgacggctctcatgtgtgccgccaacaaggggtatctgcgtattgtcagggtgctcctccgattcggggccgacgtgtcggtcagtactgacgatggacacaccgctctgtacttcgccatcggtggtcgaaacctcgccgtcaccaaagcactcatcggggccggtgccgacgtcgaagcaaaggcagacttcctccacccggaccaagaggtagttcaaggtcagacacccttgcacttggccacgggagaagggttctgtgacgggatggtggcactgatcgacgccggtgcgaatgtcgacagtcgcatgagcaacggatcgacggcaatgtacatcgccgcatgcaccgggaacttggacgcggtcaagattctcctacaggaaagggcaaaccccatgctatgcgtcggtccaacacatcctctcgacatcgccacacacgggggacacctgggggttgtacaggagcttgtgcagagattcggagtggatggctgttccgacgaaggagccataggcgccctggagacagccgcatacgaaaatcaccaaactattctgacgttcctactcgacgccggtgtcaaagacacggacggcacggccctgtgtgatgccatcgagggtcgcagcgaggcgtgtttgaagctgttggtgggccgacgaggggggaatgctcacatggcggagagccattacacgaacacggacagcgcctgtgacaatgccctcgtctgtgcattcggtgcgggacgcgggtatgctccgaggatgactcggttcttgcttgaccacggggccgataccaagaagaaagtgcgtttcgaaataaaagggttgggtgagatagcaggcggacccctggtcgccgccaagatcattctacggcacgagcagacccacttcgaggacgcagatgaggagggggtggacgggctaaaggaagtcgttcgtctccttcggcaggaggatgcagttcacgccaactcctgggcgtggccgatcgacaccgaccgcgccacgaaaatcgtacgcaagacgccggccttcaaaatacaccccggtccgaggccatgtgtgctgttggcggcgatgggaaggtgcgtggagtggtgtcgatatccttaggtagtaacatcaatagggaaagtgtgaatagaagacgacctgaccccgatgatcctcgtgtatcgccggcaggtacatcaacaaacaggacggcgcgttcgaagggtaacgcttcctcggatgctcatctctaacgattggtacatcacggaaaataaaatattgcctttgaattataaatacaatttgcagccatgtctgtcacatggaccaagagcgccgacaacaagtttgaggtggcgacaaaggagcacttgctacagatcatgaaccaaggcgccttgtacacagacagtggtgtaatacccaccaactactgggggtctgactatgtgcagacgagcgacatcgacttggtggacgatcacgcgagcatccttccgatcggggactctacgaccgcttttacaggggagtacgacggaggtcttttcgaaatcaagaactggtcgtattccagcagcaccgagttgtaccagggcttgttcgggagagcgagttctgctaccctgcaacgcatccgcctgtcgggtgtctggacactgagtggttcaccgagtggttccgcgtcaggaaccgctttcatgtgcgggaacgtcactaatggaagcgttgatgatgtagagggagactttgccgaagggtcggtcatgacttcaaccgcagataatcgcggcgctttgttcggctcgatcaccaattgttctctcgaccgtgtgacgttgcgtgggtctgtgaactttgattccagttccaccggagactgtgggggtatgatggggatgatctcctacaacgccacggccactaattggcgcaatcttgcaacattttccaacggcctcagtggcgaaaatgttggtggaatctgcggaaattttgacggttatggggtgacggcatcaaa

SEQ ID NO: 274 - DNA, 21257 bp, unidentified
  misc_feature 1..21257: note = Fanzor polypeptide
  source 1..21257: mol_type = other DNA
gcgaataaaaagtgctcccggagttttcgactctgaccactgcaacacattcatttctattataaaaagaacccgactggtgtcgggcgtgtgcaacagttaccactgataattgcgggcgtccagattccatgtactctcttggtacaaaaacaattgccctcgggcaatggcttagctgcatagcttgaaaggccaggctttccattcaaaaagggaagtctattacacttgcggggacttggtgaaaggaccgaggtcttattaaccatgttcctccgtaatacaaaactattttctttgcgaggcagcggctacggcgctggcggcaccgcgccctgcgtcgacagtggtgtgtgatcaacgccagcaagggcagcggcggcaggaacaagaaccacccggctacatgtcctcagtaaattctcacaggaaagccacaacctcacggaacactgcatcctcattcagcgataacacaaatttgagtgggcagactccacccccaccccctctttttttcggctcggggatgtccacaggttcccccgccgccagcgtgtgcgcacgaagcatgacgagccatccccggcgacgccatgctctgtccttgggagcgttcaccaggaggtggcggacgcgctcagccacagctggatcgagattccggatgcggccgaggtaatcggcgggagttttgcccctctcatccttcatggtctcgtccgccccccagcggagaagaagatccacgacagaaggtacgcagctcccacggttcattatgtggtggagaggcgtttgtccgccatacgaacaaaagttgaccggtgctccacgttgcaggagcatgagacgagcgtcgtacatgttctcgagcgtgcttgttttgcacacgccgacggagagcaaatatcccagctcttcttcgtctggctctgcgccgctgtcgagaatggcctccatcaccgccttagtcttcgtagcgctataatcgtactcgcgctcggcaccagcgtttaacagagcctttatgatgcgaacatgaccaaagcgcatggccgatgacagcggcgtttcgccatccatcctgacttcattcgggtccgcttcgttctcgagtagtagagtcacgattgcatcatgtccaccgcccgcagcacagatgagtggctggtcaaaatcgaattggctggttttgacgtcacaaccattgtctagaagagtcttcaccacggcaaagtgacctctgcggcacgccagtatgatggtgaattcgaggaaacagtctccgtcaatgtcgctcaaaagggcagtcatgatatcattgtctcctcgcagtgcagcaaagtcaatggggcgcaatgacatgtctccgaggtctctcatactacatccaacatcaagtgttgcatcggcgcctttggagagcagtgtttgcacaacgggaaagtgaccattctcgattgcttccaccagcggggttttcagattggccccaactgtccatgtcgaggacaatcctctgccggcatcctcttccgcccccgcctccaacaggatgttcaccaccgtgttgtgccccttgccggcagcaagatgtatggcatggcgaccgtcgttggggctacggaagttgacatcggcaccagcagccaccagttcctccacgacaagcacgtggccttcgcgggatgcaagctgtagaggggttctccctgcatcctgaacgctattcaaagcaagccttccgtcagccgacttcaccagcgttcgcaccttccacacgtccccgtattcagaagcactgtgtaggttacacccggataaatccgacatcttggtggtgtgctggacgctgttgtagtttatgattgtgacacggaagcgcgacggaaagaattacagagattcgtgttcagcataaacgagagctacttgtctcggttatggattcccccgtaatctgcgttttttatgttgacccgtgtgtgtcgatttgaataaccttaacacagacccgcctgcgtacagcacgctgaacgtcccggactgcaagacaaaacagaaaagtgattgtgaccaaacgccgggatgtcaactttatggtgacgagtgtgtaccaaaagttcaggaaacaatcgccagcttgtacggaggaagagcgggcgaggtccagaggactttctccgccgtgcccggaagagactgtgctccgcagtttcgggagatgtacgaggacaaccttgactcgatcgacgcgcgagcaaaccgagacaaaacgatggcggcgaagctcgcacgcaatgtgtctggaggagacacggagtcattaccgtcaacttaagaaaatggtaggtagaaaattcgttaactgtgtcttaacacatgtaactctccgcgagggagtttgcttcgttctcgtccgtctgactttctcagcgagacacacgagaacattcacaactatcatcgagaaggctgtgtttttgtctcaagccattgactgaggtgacgctcagagagcaggttttttttcacaatgataaacacataccgggattcgaacccgtgacctttgacacaagagtccaggtgtgtacagcttgtttcatgctttaaaaatcaggatcttcgctggtggtctgcagtgcatccgaccaaacggcactttcgccttcagatctgctacgcctggacatttgtatctcgagggaccggagactcttttcacgttacggaggatgtatgtgacatgcgtgtcaagggtatagagatatgacgattctttcgtactgccttgcattctcagagtgatcgtgtctaacaacaccctggcctccacctcctggatgtaaagatccggtgttcttgcgtgagctttttcgagcctgaggtttgatttcaatcgtttaaacgactcttctacccgccacctcgaagcgtacatagtcttgatatcccttcgagatagcgacgggtcgttcgtgaggcaaacgtacgttttaccgtcgataaaatatttcaaaagacgcgcctcgataccgagaatcaagcacgcggcctccgtgcgacacgagttaaagaaagacctggtgcctttgaaagcgtctatcttgagccgccaaacgccaaatgcatgagagtcatgaacgctcctcagcaagttcttggagtagtagcctctgtcaaacaccagagtatcccctttgcgtacacctcggagcatctcagtggctgcctttctttcgttgaagtgtttcgtgagctcaaagtccacacacgcttttgtttttacgtccaccatcgaagaaagcatgacaagaggtcttttcgcgggacgcgggaccggtttattgttcgtccgggtcatatatccagccccgatgaacgaagggtgcacgtgcactttcgaaccatctacagcgaatacacgtggttcgtgtggtcctcgttgcaagaaccggtttacttccttgaaagctcctggtggaagcttctttctggccgaatgtatcgcctgagacgagtactgttcgttttccatcctcagtatgtgagcgacacctctctcttgaatacaacacttagtgagcgtatagaaaagggaagatgtatctagctttcgtcgtctctgcatccactgtccgtcgcactttttaaaagcatcgtatatttcaggagacatcggtttagtcatttttttggtttataatgaaaaacattttaagtttccaacatgcttaagttgacgacactgcaacagatgggttgccttctgtgtatataggcactgctgtgcctgctgtatttcgtcaagaatatgaagattgcctgccgagggcgtggcccccaaagcttttagatactgctgtacacagacacaaaatacttcaagacacgcgccctgacaccaagaataaggcatgttgcttccgtgcgacacgagttgaagaaaggcctagtgcctttgaacgcatttatcttgagtcgccaaaccccgaacgcatgcgagtcatgaacgcttctcagcaagttcttggagttgtagcctctgtcaaacaccagagtattacacacacaaccacgcgacacccttcggtcagaacgctacagcagcagcaatcgaacgtagggcggcatttcgctcagctcagaaaagcgaaccaaacaacacccttcggtcagaactctacagcagcagcaatcgaacgtagggcggcatttcgctcagctcagaaaagcgaaccaaacaacacccttcggtcagaactctacagcagcagcaatcgaacgtagggcggcatttcgctgcatttcgctcagctcagaaaagcaaaccaaacaacacccttcggtcagaacgctacagcagcagcaatcgaacgtagggcggcatttcgctcagctcagaaaagcgaaccaaacaacacccttcggtcagaactctacagcagcagcaatcgaacgtagggcggcatttcgctcagctcagaaaagcgaatcaaacaacacccttcggtcagaactctacagcagcagcaatcgaacgtagggcggcatttcgctcagctcagaaaagcgaatcaaacaacacccttcggtcagaactctacagcagcagcaatcgaacgtagggcggcatttcgctcagctcagaaaagcgaaccaaacaacaccctccggtcagaacgctacagcagcagcaatcgaacgtagggcggcatttcgctcagctcagaaaagcgaaccaaacaacactcttcggtcagaacgctacagcagcagcaatcgaacgtagggcggcatttcgctcagctcagaaaagcgaaccaaacaacacccttcggtcagaactctacagcagcagcaatcgaacgtagggcggcatttcgctcagctcagaaaagcgaaccaaacaacactcttcggtcagaacgctacagcagcagcaatcgaacgtagggcggcatttcgctcagctcgtaaaggcgaagcaaacaacatacttttgatactggcacgcgtttgaaattcatccacgctacctgccacatcgctctcacctagcacacacactaaacacgtttcccacaatgtcgcttccacacaacacacgccctgcgcacgtcgttccgttgtgtggctcttgattgagtcacgccttgcgggcggaaaggttgggccatataattcgatttcatttctgatttcttgtgcacatgcgcatgagtgaggggcacaattgtgaaaattttcaaggccgaacactgcagcttgcttcgagctttaaaaatcaggatcctgccggatcaacgtaaaattagagtatgttgttccgctaggtcaggcacactgctgtataattttttcatggtcaacggatattttggggctgagatacgggcctagacgtggaacgcgcggcaggggggtctctaatttcaagtaacttacttcaggcgggccgggagaccacccccgtacccaccattttgttttatttgaccagtgggtacgtgcaaaactcacataatttgtttttttggcaagggaggggtgtggggtgtagttttacaccccgtgttatttaacgtacaatacgccacgtgcgcacacatgggggagaaaacggcacacacgatagccgcgtctaaaataaaacttttcgcacagggaagcaccagcacacacacaggaacgatttgccggcgttcacgcagcgcgcgggcgagttttgtgacctatacgagcgtgaccaaaagtctagaattcgcgccacaggttcttggtggacagcacacacatcaggcgcgcacacgtctacctgtgcacacgttttcacacacagacgcccgcaataacaccttcttttcgaacagagtcccccgagcaccctggtaaccgatcccggtgctccaccgctcgctcctgttgtcgtgtgaggcaggacgagcgtgtgctagcggaatgcggtgttgtggaaaagcgtgacgacagggaggggttacgtgcatggaatattattacatacatgctccaatgccaaatgcgagattccgcggagcatcctttgcgtcaaggggtgttggggtgttgtcctgcttgtctgctactgccaccgtgctcccgcagacttacccaccacgactaccacgaccgcgtttctgcgagatggatcgaaagcggtggaaaaccgatcctcatcgtcccaccgaggtgtggctacgtcgatactacacaatagtttacagggcacgcagcggttccaaggctggtcaaggagacagcatcacttaggaaggctctgttcaccaatcaatcacggccaacacacagcacaacagtaaaccatgaccactctcgtcaccccctgtcgtgccttgtatacaggcgaaacggaacaaatccgccaaaaggtcctgggaaaggcgccaggcgaaacaggcgaaaaaacggttacaagaggaagcgggcgaggccggtgagttttgcgcacagagaattgccaaaatagaccacgtgcacacatacaccgttgcagtcttttcaatcgaaactctgtacaacacaaacaaaactaatatcagctacattgctgctgctaccgcggatgctgctaccgcggatgctgctatcttggccactaaccctgccactactcctgctaccacaaccacagcttctactgctactgctgctgccgctgctgccaccgctaccaccaccgctgccgctgctacaacagcttctactactgctacctctcctgctacacatgccgctacccctgctacaacagcttctactgctgctacaacggttgctcctacacccgtagctgccgctgctgctaccgctaccgctgccgctaccgctaccgctgccgctgctgctgctgctgctgctgctgctgctgctactgctgctgcatctgaccgcccgatcggcaaatccacgggagttgtgccgacccccgcgcaggacgccagggatgcggtgcagaatctcatggcttcactcgatgcagcagcagcagagaatcaaagcggcgccatcgaggttgcgtgccaagatttccgggagacggcgttcggcaaagaggtcatgcacgatctccacgtcgacggtatcgtgaacatcccgtacgggacgtcggaagcggacgctctcagcatggcgggcgttgtgcgtggtgcggcgcaagacttggtgctgggtgagaaaccccatagggagagggtaaagatcaagggacagacgcggtacgcgctagaggcgatatacatggggggtggggcagttgccgcgttcgaggagatcgcctctctgctggccgcggtcctgtgtgctgtcgtggacggcgcgtccggcggggtggtaacccacaagcacgtggcactggccaacgcgatggggacgggggtgcaaatgtggcaccgggacgggcgagccaaggaggttttggccaagacgaacccgtctcacaaggacaacaggaagaggccggaaccacaccccttctcggccgtgattgctttcgaggagaacaccgtgcttcacgtggtcagaggttcgcacaacagggggaaggaaaacgacttcagccaagatgcaccccacgcccaccacatcaccatcggatatgcagcggtgttttactccattctcgtgcaccgcggaatgggtaccgacggcgattgcccgagcgagaacgtccgcgggcacatgtacctcacggtagcgggctgtacgttgccgtcgttcggaaagattgaagccaacatcaaggggcccgaggccgatgctaccgctcctgctgcatccacccccgtcgccgcaaccacttcgccttcggatgacaccgctgctgctgctgctgctgctgctgctgctgctgccggtacttctggtgccggtgttgccggtgctgctggtgctggtgctgccggtgctgccggtgctgctggtgccggtgctgctggtgccggtgctgccggtacttctggtgctggtgctgccggtgctgctggtgctggtgctgctggtgctgctgatgctactggtgcttctgttgccggtgttgccggtacttttggtgccggtgctgctgctgctgctcctgatgctcctgctgcttctgctgctcctgccgcttctgctgctggtgctgcatctgctgctggtgctgcatccactgctcctgctgctgctgcatccactgctcctgctggtgctggtgttgccggtgctcctgctgctgctgctgctgctgctgcatccgctcctcctgctgctgctgctgctgctgctgcacacgagtacaccgacgcctggacagggatagtcgatgatgtcgggacgggaacgaagggagggttcgatggcacatcgggtgccatgttggttgcggggacggatgttgatgctactaccgctgctactaccgctgctactactactgctgctgctacacctgcttctactgctaccactaccactaccactgctgctgcaacgacggtgacgcatggtacgagaaaggacttggcggctcgattcgagtcgttcatattccatcttgacaaggggacacgcagagtactgatgtgtttactggagacaaacagcgttttggacggcattgagtcgttcggagaagacggcaaggacgagggcttgggtaacggactgttttcctgtctccttcgcaaagacactgcccccaaggaggatacatctagacgaccctgtcctttctggagcaacggttccaggaaagaactctcagagaatgtcgctatcgcatgcacgaaagcacagatccccctcgtactggagggcgacgcacctgcacaatcaccaatgggtgagatgatgcagtacgccgctggtaaaggcgtggcccgcattggctacataggcaaaacgtctggacgggggcctctcaaactggctccgggcttgacggatgcctggcgcactggtgctgtgacggataagcaactgcgggacacgctcaacggaggaacgttcaccatcgacaatacagaggtgcggtataatattatttatttattatatttagtattggcgaagatgttgtcgtcttcacatccttgcacaatatccggactggtcatactgacgccgacgccttccgtggtctcctgttgtgcgacaggaaaataagcgcacggacaagacgtgctacgccactctggaaaacgacaccgtgactgcgatgattcgagaagggactcggatgggagagctttgttttccacgcaggggaaaccacctccaatatgggacattgaccggaaaggaagctgacggcgttgcgtggtcgggcagcgagtgcatgctatttgccaaagacggcggaatgacaaacccacacgtggacgtgcaatctgtcccgggaggaacagggagaataatccacatgcccgcagcgggagtcattcgcagagtcaactatgttgaagaaaataggccggcaaaacaggccatcgtggtgcatgcggacgatatgtcgagggtgattgaaactctgaaaatcaataccaagaaggagtccgccagtcagtacggcggtccgccgcgaacgcttccggagttcgcgagggtgttgaaatccaagggaattcggtttgttgtgatgaactttccttcgcgctgctcgtacgcccttccagcgaggtgtgcgcacgtgtttgtcacgatagggttggttgagagctcggcttggcaccctgtttacaagcaggatatgtgatatccaggattttttttcggcaccatgcacttgattgtggtcgggtagcgagtgcatgcttttcgccaaagacgggggggggatgaccaacccgcacgtagacatgcagtggtggagagcgcggcatggcaccccgtgtttaagcaggacatgccgtacccgaagttgattgcgtaacacttgaagtattttaagggcgttttttctcgtcactgaggtcacaccattcctgccggttttactccaacccgtggtctcacaagagagctcctaacgatacttttgcctacgagagctaggccctctttcatgcgtgcacacgaactggcgctacgggggctcctgcactccaacgatgcttggtggtacaaggacgtcctccgacctttttcaaaagaggcaaatatcaagtgtctcgtgaataaggagaacgccaggtacgcgtcaagcgagcatggctacctctcgagtctgcagggaagtggtccggacaagtgcccctggatgattggcgagagtttcttgacggacggtgtacagatcaagcttttacttgtgacacttgaacatggaaggaaagctttttccggttccagcgagctgaacgaagcggggtacaacaaactgccccgggctgacgctcagctagaaagccttttgaaagagggaagaggggtgtacaacatatccagccttttggagtcgacaagcatcagggaagacgtcatcgtcatgtccgctgacccgggccaggccaaggtgatcaacgtttcttcggctacggctagcacttgggcaaagcaagaccctggcgtcatcctcaaaacttcgacgtgtgttttcggggacgattatcgtcgtgacactcttgcatcacgttcagacgagtacgagacgttcaggcgcaaggaccagccgtacggagtagccatcgatcgtcttggtaacgagaagaaaagaacttcatgcctcgcaacgttcatcaagtactgcagacggtggtgtgcaaatggtccggtgttattcctagagactttgcagacaggaaggaagttcatgaggtttgaccgtttcagagctacgcagaagacactcgccaagattgcggacaagtacatgggacacgtcgaagacacttgcagggtcatgttgttcggaaaagcgtcttttcgtgcgcagaaaggaagggcatctgcaccaaggaaagctttgatcagagagatggccagtagaggcgtggtgttgatggtgaaggagtacaacacttccaagaaatgcccagggtgtggagaggacacggtcgaggacaaagaacggagaatccggagttgcaaaaactttaagatcggatcaccggaagagtcctgtagacttcaccgcctgacaccagagtttgaaatggatcgcgacgacgtagggtcgactaatatcggtatgcgtggtttcggccaattgctcggtcaggagtggttttagggattttttccggattttcacttgcggataatactttatagttggttttcctaaagttgacaatggtgatcttgacaaggagacacgtaaagtactgatgcgtttactggagataaacagcatgttggacggcactgagtcgttcggagaagatggcaaggacgagggcttgggcaacggactgttttcctatttccttcgcacagacgttgcccccaaggaggatgcatctagacgaccctgttcttactggagcaatagtcccgagaggaaagaattctcggagaaggtcgctatcgcatgtgcgaaggcgcagatcccgctcgtactggagggcgacgcacccgtacgatcaccaatcactaatatcaacttaagaaaaccggaactattaagttgtagtgaacaaaaacagatagaaacaactaagttgtctcctcaagggtccagcttttagggttttttaaacctcggaatatcccactgtttccaggcaagtcgtttgttgaaacttcggttgcgaaagcttgtcgtcgtttcttcgtagcgtgttgatgttgtagacctcgtgtagccgtgttgtgatgtcggccttcttctttctcttttttttcttcttcgtcttcgaatttgtagtggtggttgccatggtgaaggtgaattgtgagcagcgtgggctaccaatacactcaaatgtttacgtataaaattgaaaaatgtggtctttcttctagatcgtttcgagttggtaagattcgccaaattgttctagaaagcttaagttgataacaatgtcaccaatgggcgagatgatgaagtacgccgctggtaaaggtgtggcccgcattggccacatcggcaaaacgtctggacgagggcctctcacactgacaccgggcttgacggatgcctggcgccttggtgatgtgacgggcaagcaactgcgagacacgctcaacggaggaacgttcaccatcgacaatacagaggtgcgtagatgttgtcgtctgcctacaattaaaaattgaaaagtagaaagcacaatatacgaactggtcatactgacgcccacccccttccatgatcgcctgttgtgcgacaggaggataagcgcacggacaagacgtgctacgccacgctgaggaacgacaccgtgactgcgatgattcgagaagggactcggatgggagagctttgttttccacggaggggaaaccaccaccaatgtgggacattgaccggaagtgaggctgacggcgttgcgtggtcgggtagcgagtgcatgctatttgccaaagacggcggaatgacaaacccacatgtggcattgttatcaacttaagctttctagaacaattttgcgaatcttacctactcgaaacgatctagaagaaagaccacatttttcaattttatatgtaaatatttgagtgtattggtagcccacgctgctcacaattcaccttcaccatggcaaccaccactacaaaatcgaagacgaagaagaagaaaaagagaaagaagatggccgacatcacaacacggctacacgaggtctacaacatcaacacgctacgaagaaacgacgacgagctttcgcaaccgaagtttcaacaaacgacttgcctggaaacagtgggatattccgaggtttaaaaaaccctaaaagctggacccttgaggagacaacttagttgtttctatctgtttttgttcactacaacttaatagttccggttttcttaagttgatattagtgacatgtggacgtgcaatctgtcccgggaggaacagggagaataatcgctatgcccgcagcgggagtcattcgcagagtcaaccatgctgacgcacacgggccggcgaaacaggccatcgtggtgcatgcggatgatatgttgagggtgattgaaactctgcaaataaataccgacaaggagtccaccagtcagtacggaggtccgccgcgaacgctgccggagtttgcgagagtgttgaaatccaatacggtttgttgtgatgaattttccttcgcgctgctcgtacgcccttcccgcgaggtgtgcgcacgtgtttgtcacgatagggttggttgagagctcggcttggcaccctgtgtacaagcaggctatgtgatttccattcgggtcataacgtttgacgagagatgtattttgtgggggtgtccaacccgcgcgtggacgtgcgtagacgcgcgtgtacatgcccgcagcgggcgtcattcggagagtcgtacagcggtaggctcaccacgctccccgagtttgcacgagagctcagcggggtggtagagagcgcggcattggcaccccgtgttcaatcaggacatgccgtacccaaagtaaccattgttatcaacttaagctttctagaacaatttggcgaatcttaccaactcgaaacgatctagaagaaagaccacatttttcaattttatacgtaaacatttgagtgtattggtagcccacgctgctcacaattcaccttcaccatggcaaccaccactacaaattcgaagacgaagaagaaaaaaaagagaaagaagaaggccgacatcacaacacggctacacgaggtctacaacatcaacacgctacgaagaaacgacgacaagctttcgcaaccgaagtttcaacaaacgacttgcctggaaacagtgggatattccgaggtttaaaaaaccctaaaagctggacccttgaggagacaacttagttgtttctatctgtttttgttcactacaacttaatagttccggttttcttaagttgatattagtgaaagtaacattttgcggttaggcgatctttttttatcggcttttaaaatgttgtactgaatgtaacatcccttcgagtcgtgacgagaagcttcagcaaagtcactctatcgactatgagcacaggcggggtcctcaacttttccgagctggagctgtacgataacgatgacaataacatcgctctcctcggaaccgcctccgcgacctccatgatatatggctctgcgggtttaggcaacgatggtatcacagatcatgtattcggaggccctgacaatccagttttacataccgagggttcggcgatatggacgcttgacctggacagaagttatctcttgacggaactccaaaaggcggatagctttgttttcgataacaaaaagtgtgtagtgcaaagtgcttaatcaaggccttcgtgtcgcgcgtcgtatgacgatggagcatattctcttgaaaataatgccttcagtatatcaacagtaaacaatgctcaccaaaaacatctggtctcagatcggggtaaaccccgcggatgcccttttaccaccagtgcacaatctgggcatgatcatccttcgggaagagttgacggaagccgaaagcgatttgcacgccgcgcgcgtagcactgaaaacactcgaagaagccggtgccagcggtgacacgagcgacctctatacagcgatgtggaagctacaaaaaaaagaacaagcatactttgcgagacgctacttgcagacaaacaaggccgtgcttcggggatggcacaaccaagtttccaagtacgaactctcgggggaaaaggtggggcatggagtccagggagttgtctacggcgtgatcaaccacccggacaaagttgtcaaactgtatcctacacgtttccagcttgcacacaactctatcaccacgaagcaattcgtctacgacaagaccgcctccgacaacgggttcggtcccaaaatatacgagatttcttccgatggtcgagtcgttgacctgtcggacaaaagcacagtgcccaaatatcgttataaaagaaattttatggtagtcatggaaaggttagcaggtatagacatggataaacagtatgttggaattgttaacgtgtggaagaaaatgagacaacacgggctctttagtggagacggattctatggatactcgcttcaacacaaggcaatcgttcatgcagattttggtgcagtatggaaaataaaagacgatgatgagttcaaagatgcagtgtatgaacacttggaagaacgcaaggacagcaagggccttgagccggacattgcgaaaagatacagagacgagttcccgggagacccgttcactcaaggcatcttggtaccagtgttggcaaagttaggcatctaatctattaacacgaaggtcgccggacggagtgcagttttgctttgtttaaatattgacgtgcgttaagataccacgaaatggatactctgacaacaagactcatggcccgcagcggtctcagcaacgccactcgtcctcccgcgcgcagcacacccatggtcaaggccggtatcgggctcaatccgtccaacccactgcttcctcccgtgcacaacttgcgcatgatttatctgaaggaaccttttggggatgctgaaaaggatttgcacgcggcgcgtgtagcacttaaagcattggaaacgactaacgacgacaccaccaggaaagcgctgtacaaagcaatggcgaaactacagggaaaagaatcacattactttgcgaccagatacatcggcagagacaagccgcttgtcctaagtggctggaagtcacacttcttttcgcacaaagcccacgacttgtttaaaaaatcaagtattcgtttttatttccccccttccggtatgcatcaagacgccatcgatgccgcagaaataagcttttatgctgcggaagacctttgggaaatggaccaagaattcctagagcctaatccggagccgaaagcgtggttcgatttgaggaaaggcgatattaaaatggatattgccagtattgaacaagttattcaaaatacaaacaccacatccaatgatgacattacatctatgaatgaatctcttgccaacgcgaaaatcatacaaaggcttgctctcctagtggataacgtacgagaagttccgcacgatttgctgtagttgtgaacatcggacgaaacgtagttttgtattttttaaatgttgacgtgtgttaagataccacgaaatggatactctgacagcaagactcatggcccgcagcggtctcagcaacgccgctcgtcctcccgcgcgcagcacacccatggtcaaggccggtatcgggctcaatccgtccaacccactacttcctcccgtgcacaacgtgcgcatgatttatctgaaggaaccttttggggatgccgaaatacatttgcacgaggcgcgcgttgcgctggaaagtgtccaagctggtggtccatcggcacccttgtacgcagcaatggctaagctggaggtggccgaacgagactacttcgccagacggtacttcggtggagaaaaagctatactgaaaggatggaattgttctaaattcaaacaaaaaattaaagaactaatcagtaccgcctcagcaagatccagtttcttaaatactaacagtacacggtacgacacccgagcaacaacagctgcaggacaagcttcagcagcgtctctccagcttaaattgatgaacaataaatggtataccaccgccggcaaccgacaacaaacaaaaccaacaacatttggcaacaattttaccgcaattgaactcgcgattgggcgcattaacaagtatctgggcgaagtgttggccttaccggactctgacacaaaaaagcaaccttccgttacatccatcaaagattcccttaaacacgcaaaaatatgtcagcgcctcgctcgactggtcgaggccaaccagtgtgatcttccggatgacgtgtaaacatcggacgaagtgtagttttgcttctttaaaatattgacgtgggttaagataccacgaaatggatactctgacagcaagactcatggcccgcagcggtctcagcaacaccgctcgtcctcccgcgcacagcacacccgtggtcaaggccggtatcgggctcaatccatccaacccactgcttcctcccgtgcacaacttgcgcatgatttatctgaaggaaccactcacagatgctgaaaaggatttgcacgcggcgcgtgtagcacttaaaacgttggaaacgacggacaacccagcaaacagggaagcgctgtacaaagcaatggcgaaactacaaggaaaagaatcacattactttgcgaccagatacatcggcagagacaagccacttgtcctacgtggctggatttcgcacaactttacggacaaggtccgcgagttggtgcggtcggctgcagtacgtcagatagctaaccgaggtgacccgaaagtgacaccttccacacgtcaaggtgtcgctattacggcactactttccgggatgaacgacgatcgcctcgacccaacgaaaacgaacctcccgcgtgcacgatacgagaccggtcttgctgtgatcaagctaagagtggctactattgacgctgaccgtcaatccatgacagtcggttctcatagtacagctcaagcttatgtcataaagaagtcattagccgaatctcagcagtgcatgaggcttgcggaattgctagtggacaacaaacgcgaagttccgtacgacatgctgtagttttcagtggaactggttggtgccggggagcaagtagttacacaagagagactggtaatttttccaccaagacgttaccgaggtgctgcgcttgagtcacacaaatcccacaatattctgaaacaccccgaattccaccagaaaggcaacttccaacaccaggcgatcaccgtcatcaccgtcgtcggcatcaacaccgcgcttgcgcaacaaaatgaagccccggcgcttggcccagttctcttcgcaaacacgcgctgcgatcaatccgcggaacggctgcctctgaccccaaaaagtaccagacacccgtctaccaccgttgtcgaacgggagacacgacgcccccctctccaccaaccagtcgaaacgtagccgaaggtagtctacgctctcagtcctctcgctcaggagagtcatcatgggagtgaagccgaattcgtcctgcacactccattcctctggcgacagattttgagccaaggcctgaaatacgatggaagagtgagtctccgccactcgatggagtgcggtgttccgcaaccctctctcccaatcccaaacaaacctggtcctatccgcaccaagactgatcaaagcagataccacgaaagggttgcgatgcacgcagttcgccagagtgccacatcggttcacgctcgccccgtacacatctaccagtatccgtatgcccgacatgtcctgttcatgcccgtcgttcgacagccgcagagctgccgcgttgagactcctgtctacaaactcttgatccggagcatcccgcgcgacaatcgcccgcatcgtaccacggaagccccttgcagcagcgattgataatcccctcttccacacgcccttgtgggaataatacgcggaagcacccgcccaaaccaacgccatcccgagattatcactcgcattccgcatcaacaaagaattcccatcgcgatccttgtgatccaggtcgccaccgatagcttcatacagttgcaacaccgtcaaaaagtcacccgcacaggcgtcgaaggactccaggttgaagagaacggttcgctggtgcacatcctgcgaatgcacatttagcatgccgtgggaaagaaggtaccagaagtgctccatgtctgagagggagggattgaccgggggcggcgagggaaagggaaagggggcaaacaatgtttaccaataactttgtaggcgtggtgctcaccatttttgcgacactgttaatagcatcatcatcaccatgccatctaccaccagcacactctacaacgccgcgtggactgggtcggtcgaacgcacgcttgatctgttgtcggatggattcaccgaaatcgaccggcggtgcgaagaaaatggggtgacggctctcatgtgtgccgccaacaaggggtatctgcgtattgtcagggtgctcctccgattcggggccgacgtgtcggtcagtactgacgatggacacaccgctctgtacttcgccatcggtggtcgaaacctcgccgtcaccaaagcactcatcggggccggtgccgacgtcgaagcaaaggcagacttcctccacccggaccaagaggtagttcaaggtcagacacccttgcacttggccacgggagaagggttctgtgacgggatggtggcactgatcgacgccggtgcgaatgtcgacagtcgcatgagcaacggatcgacggcaatgtacatcgccgcatgcaccgggaacttggacgcggtcaagattctcctacaggaaagggcaaaccccatgctatgcgtcggtccaacacatcctctcgacatcgccacacacgggggacacctgggggttgtacaggagcttgtgcagagattcggagtggatggctgttccgacgaaggagccataggcgccctggagacagccgcatacgaaaatcaccaaactattctgacgttcctactcgacgccggtgtcaaagacacggacggcacggccctgtgtgatgccatcgagggtcgcagcgaggcgtgtttgaagctgttggtgggccgacgaggggggaatgctcacatggcggagagccattacacgaacacggacagcgcctgtgacaatgccctcgtctgtgcattcggtgcgggacgcgggtatgctccgaggatgactcggttcttgcttgaccacggggccgataccaagaagaaagtgcgtttcgaaataaaagggttgggtgagatagcaggcggacccctggtcgccgccaagatcattctacggcacgagcagacccacttcgaggacgcagatgaggagggggtggacgggctaaaggaagtcgttcgtctccttcggcaggaggatgcagttcacgccaactcctgggcgtggccgatcgacaccgaccgcgccacgaaaatcgtacgcaagacgccggccttcaaaatacaccccggtccgaggccatgtgtgctgttggcggcgatgggaaggtgcgtggagtggtgtcgatatccttaggtagtaacatcaatagggaaagtgtgaatagaagacgacctgaccccgatgatcctcgtgtatcgccggcaggtacatcaacaaacaggacggcgcgttcgaagggtaacgcttcctcggatgctcatctctaacgattggtacatcacggaaaataaaatattgcctttgaattataaatacaatttgcagccatgtctgtcacatggaccaagagcgccgacaacaagtttgaggtggcgacaaaggagcacttgctacagatcatgaaccaaggcgccttgtacacagacagtggtgtaatacccaccaactactgggggtctgactatgtgcagacgagcgacatcgacttggtggacgatcacgcgagcatccttccgatcggggactctacgaccgcttttacaggggagtacgacggaggtcttttcgaaatcaagaactggtcgtattccagcagcaccgagttgtaccagggcttgttcgggagagcgagttctgctaccctgcaacgcatccgcctgtcgggtgtctggacactgagtggttcaccgagtggttccgcgtcaggaaccgctttcatgtgcgggaacgtcactaatggaagcgttgatgatgtagagggagactttgccgaagggtcggtcatgacttcaaccgcagataatcgcggcgctttgttcggctcgatcaccaattgttctctcgaccgtgtgacgttgcgtgggtctgtgaactttgattccagttccaccggagactgtgggggtatgatggggatgatctcctacaacgccacggccactaattggcgcaatcttgcaacattttccaacggcctcagtggcgaaaatgttggtggaatctgcggaaattttgacggttatggggtgacggcatcaaactg

SEQ ID NO: 275 - DNA, 21125 bp, unidentified
  misc_feature 1..21125: note = Fanzor polypeptide
  variation 1..1866: note = n is any nucleotide
  variation 3589: note = n is any nucleotide
  variation 6255: note = n is any nucleotide
  variation 6269..7613: note = n is any nucleotide
  variation 16715..18672: note = n is any nucleotide
  variation 20887: note = n is any nucleotide
  source 1..21125: mol_type = other DNA
nnnnnnnnnnnnnnnnnnnnnnnnnnnnnnnnnnnnnnnnnnnnnnnnnnnnnnnnnnnnnnnnnnnnnnnnnnnnnnnnnnnnnnnnnnnnnnnnnnnnnnnnnnnnnnnnnnnnnnnnnnnnnnnnnnnnnnnnnnnnnnnnnnnnnnnnnnnnnnnnnnnnnnnnnnnnnnnnnnnnnnnnnnnnnnnnnnnnnnnnnnnnnnnnnnnnnnnnnnnnnnnnnnnnnnnnnnnnnnnnnnnnnnnnnnnnnnnnnnnnnnnnnnnnnnnnnnnnnnnnnnnnnnnnnnnnnnnnnnnnnnnnnnnnnnnnnnnnnnnnnnnnnnnnnnnnnnnnnnnnnnnnnnnnnnnnnnnnnnnnnnnnnnnnnnnnnnnnnnnnnnnnnnnnnnnnnnnnnnnnnnnnnnnnnnnnnnnnnnnnnnnnnnnnnnnnnnnnnnnnnnnnnnnnnnnnnnnnnnnnnnnnnnnnnnnnnnnnnnnnnnnnnnnnnnnnnnnnnnnnnnnnnnnnnnnnnnnnnnnnnnnnnnnnnnnnnnnnnnnnnnnnnnnnnnnnnnnnnnnnnnnnnnnnnnnnnnnnnnnnnnnnnnnnnnnnnnnnnnnnnnnnnnnnnnnnnnnnnnnnnnnnnnnnnnnnnnnnnnnnnnnnnnnnnnnnnnnnnnnnnnnnnnnnnnnnnnnnnnnnnnnnnnnnnnnnnnnnnnnnnnnnnnnnnnnnnnnnnnnnnnnnnnnnnnnnnnnnnnnnnnnnnnnnnnnnnnnnnnnnnnnnnnnnnnnnnnnnnnnnnnnnnnnnnnnnnnnnnnnnnnnnnnnnnnnnnnnnnnnnnnnnnnnnnnnnnnnnnnnnnnnnnnnnnnnnnnnnnnnnnnnnnnnnnnnnnnnnnnnnnnnnnnnnnnnnnnnnnnnnnnnnnnnnnnnnnnnnnnnnnnnnnnnnnnnnnnnnnnnnnnnnnnnnnnnnnnnnnnnnnnnnnnnnnnnnnnnnnnnnnnnnnnnnnnnnnnnnnnnnnnnnnnnnnnnnnnnnnnnnnnnnnnnnnnnnnnnnnnnnnnnnnnnnnnnnnnnnnnnnnnnnnnnnnnnnnnnnnnnnnnnnnnnnnnnnnnnnnnnnnnnnnnnnnnnnnnnnnnnnnnnnnnnnnnnnnnnnnnnnnnnnnnnnnnnnnnnnnnnnnnnnnnnnnnnnnnnnnnnnnnnnnnnnnnnnnnnnnnnnnnnnnnnnnnnnnnnnnnnnnnnnnnnnnnnnnnnnnnnnnnnnnnnnnnnnnnnnnnnnnnnnnnnnnnnnnnnnnnnnnnnnnnnnnnnnnnnnnnnnnnnnnnnnnnnnnnnnnnnnnnnnnnnnnnnnnnnnnnnnnnnnnnnnnnnnnnnnnnnnnnnnnnnnnnnnnnnnnnnnnnnnnnnnnnnnnnnnnnnnnnnnnnnnnnnnnnnnnnnnnnnnnnnnnnnnnnnnnnnnnnnnnnnnnnnnnnnnnnnnnnnnnnnnnnnnnnnnnnnnnnnnnnnnnnnnnnnnnnnnnnnnnnnnnnnnnnnnnnnnnnnnnnnnnnnnnnnnnnnnnnnnnnnnnnnnnnnnnnnnnnnnnnnnnnnnnnnnnnnnnnnnnnnnnnnnnnnnnnnnnnnnnnnnnnnnnnnnnnnnnnnnnnnnnnnnnnnnnnnnnnnnnnnnnnnnnnnnnnnnnnnnnnnnnnnnnnnnnnnnnnnnnnnnnnnnnnnnnnnnnnnnnnnnnnnnnnnnnnnnnnnnnnnnnnnnnnnnnnnnnnnnnnnnnnnnnnnnnnnnnnnnnnnnnnnnnnnnnnnnnnnnnnnnnnnnnnnnnnnnnnnnnnnnnnnnnnnnnnnnnnnnnnnnnnnnnnnnnnnnnnnnnnnnnnnnnnnnnnnnnnnnnncgatgcagactactaccgcctcctgggggtgctcgtcgactgcgaccagacggagatcaagagggcctgccgacgttttgatgttggtgcatcagacgacgataggccctcttgatctccgtctggtcgcagtcgacgagcacccccaggaggcggtagtagtctgcatcgagggtgagggtacgttcgataatttgcataagtaaaaacaagaattgcaaaactgttgggtagactgaaaagatgaacaaacatgaacaaacacatttgcttgcgctcgcgttcttaccataacgcgtccgcttggcctcgtccatggtcatctctcgaaggggttttgcatcaagcacaggagcagcagaagcagctttgatggaggcagaagcggaaagatcacgagctgtgcgagctaatctaccggcacaaacggcgcgccgttttttcagatgggcatatctggctcttgcggcgcggcgatcggaagtagcgacacgaacagcatgatcggcacgatgttcggcacgagcagcacgagaggacccattgtatccaacgaagccagcatctactgcttctgcagctcgttgagctttttctgcagagatttttgcctccgcgatggcatcagcagcccgttgttcagctctatcggcagcagcagcatcacggtcagctacccgagcagcagcgccagcggtagcacgggcgatggaaacagcaacacgccgggcttgttcgacagcagcagcacgctcagcttcctttgcaacacgcgaggcttgttcgatagcagcagcacgctcagcttccttcgcaacacaccgggctctcctcatagccgcaacaccgcttgcctccttggcgacagaaatacgacgagcttcgtcttcggcttctttggctgcagcacgcaaagcggcttcttcggcctcctcgatagcagcaacgcgtctagcctcgttggcagcggccacacgctgagcttcctctgcgtcagcacgcaaagcttttcccgcttgttcggtagtggcagcctccgcgatagcgtctgtcgatgaaggatgtgcacgccgaaggtcagggatcgaaaaactatgttgcacttctggctaattcgcctaccagagccttatttttaaccttgaaaaacgatgatggtgtcgcacttctggctaattcgcctaccagagcagagcttatttttaaggacgcgttgagggggaaatggcttatgagtctcaatgatggggggaggcagtgcacgcctcaagaaaaatccgtacatgtcacttagaaacagaaagagtgcacaagaaaatcgcgggtcaactctgataggattaagacgccaaatcatgaacaataacatctgctgctcacttcggcgggttgtccctccagcagcagcggtgggggaacggtttgcggcggaccccactgcagaactttcagcagctgccgcggcagcaccaggagcggcagcaccaggagcagagatgagttgaaaaacgggattgggcggccatgtgtgtgttatgagggtggttgttgtaatagcacaagatgtcggcagaacgaacagcagaacacagagagaaagaaagagggaaagagagagaagagagagacagagagacagagagacagagagacagacagggataacaagagagggaaaaagccacaagagggcaggagggagaagttgtctaattttattgtnaaaaggactcttctcaacctgataccccgaaatacaggaacaataacgcctctggcaaattcgaccgtttcaataaacagtagtctacatcggctatatctgcctcaccaaacttgctatttattgtgggaggggggggaggtcaaatctgcgcggtcaaatactcgaacgaaccgtgtttctttcacgacacaaccagatctcaaagcgcacccaaaacagagagggtgcacgtggtaatctccgacgagtaatcccagcgatgctaggtgtcctgctttttccagctcgacctattgaaagcagattttcgtgtgttgtgtcttctttttctagcccgcgtgggcggacgacttcctaatcaacaacagagtacttctgtgctgatgtcagccgaaccttacgctgccgcaaaatctagggaacaaggattttacgtcccctgactggccacggcgaaacacgtcggcgctcttgctttattgtgacaaaagtaaacttcttgacgatcaactggaccactgttcgggcatgttcacacaaatgccgaggtggatacatgcactgtgccagggattccctaattccccttaacaagtaccgaatccggcgctgcaggggcaaaagttttctggctaccggagtcacgaaggggctagcgacactatgcacatgtcgcgggtgcaaaaaagcgtggtaaagcactggggctgtaccagctgatttttgtctcacgtagccatattatcggatttgaccgaacagtcgttgacttgatcaagtagctaagatgtcacgaattacaaagacacatgaggagttcgcaatggtcaccaatctgattttaaagaacacatacaaaaattcttttttcggggatgctggcttacacgcagctagagacctgcttgctttcccgcccctgtcgaaaagtttgcgcaagtgtcggtagtgaggcatgacaattaccaatccttacgtgtagcctgcgcgattgtcggttacaaggctctgggcgtgtgaaatgctacggtcttcgtagctccgaagtaatcccagaggtgctaggtgtcctgctctccccagctcgacctattgaaagcagattttcgtgagttgtgtcttctctttctagcccgcgtgggcggacgacttcctaatcaacaacagagtacttgtgtgctaacgtcagccgaaccttacgctgccgcattaaatatttacaagtcttgcttcattaaatatttacaagtcttgcttcattgtgacaaaagtaaacttcttgacgatcaactggaccactgttcgggcatgttcacacaaatgccgaggtggatacatgcactgtgccagggattccctaattccccttaacaagtaccgaatccggcgctgcaggggcaaaagttttctggctaccggagtcacgagggggctcgcgacactatgcacatgtgcacgggtgccaaacagcgtggtgaagcactggggctgtaccagctgatttttgtcttacatagccatattatcggatttgaccgaacagtcgttgatttgatcaagtagctaagatgtcacgaattacaaagacacatgaggagttcgcaatggtcaccaatctgattttaaagaacacatacaaaaattcttttttcggagatgctggcttgcacgcaacgaatgtcggtagcatcgatacaagagcctagaaacgacaccggcagccacaaggcgctgttattgggtcttttgaatgcaaataataggttcggggagaacacacgaaaaaacaaactcatcaagaaggaacgaaaacaagtgatcattctgctaatacattttatggttactttccaacacaaacagatttcaaaaagtaccttggttgaaggttcctctagcagaggaagcggtggtggttgctggggcggtggcggcaggagacgcaaaggcgggcgttgcctcagaagtcttgcgtttctttttagtcgtcaacaaaggtgtttcagactcgcgctttgtaggaacaggcgcagttttgcattcgtcaccgtgtggaggggcacctccgggttcgggctgagactctgccgtttgggtgaaggtggccgccttgttgacattggttccctgggcaaggtcggtgtgatgcaacaacattgtcaatggataacacgtggtcacggaaataggtgtatcgttgagacagggcctaaccagatatgaacgatgttgttttgaagatttatgtttacggcgtaccgaatagaactcacaacactcacgttctttacccatgtgcagtactcgagaaacttcggggcatcctctttcaagacattttcgaaatcaggatgttttccgttgtttcgtaggaactcctcaacagtccttgtcacgagctgcttcccatccaatccggggcggtcttgaatgtagcagcagagggtcgagagcgtcggcacaccaccgtagtcgaatgaagccatcctgattttctctttttcgtcaaaaccgtccgccatccggtatgggttaatgcgaagggtgtgtgcaacgatctctgttgcgtccatcgcacgctgctgaccgaacaagaaaaagtcttctttcacctgttacgtgacagaagtaattggcatttcggaacgttttcggatgttccngaatgtagcagcagagggtcgagagcgtcggcacaccaccgtagtcgaatgaagccatcctgattttctctttttcgtcaaaaccgtccgccatccggtatgggttaatgcgaagggtgtgtgcaacgatctctgttgcgtccatcgcacgctgctgaccgaacaagaaaaagccttctttcacctgttgttacgtgacagaagtaattggcatttcggaacgttttcggatgttcccaagtgttcgtacgtaaacaactaaccacatgcagacgactcgccaaaacattcaacaaacaaaatcaaattgactgcacctcaccatttggtcgtcacatccgcgctccttccatatcttctttcgttgtagaagtccattccttcttcgctgtcgagctctcctgttgtctgaaattggttttggttggcacatgcatgccaccttttgcgccaaaaataaaaagaggtgtgtcatgccttttgtccaagagcaagaggggttgtctcctgctttctgcccaagggcaaaacggtgtgtgtctcttgctctttgctcaggagcaaaacggtgtgtgtcttcctgtctgagcaagacgggttgtgtctcgctttttgccttagagcaaacggtgtgtgtctagctgtctgtctacgagcaagacgggttgtgtcttgctctctgtctatgagcaatacggcttgtgtcttgctctnnnnnnnnnnnnnnnnnnnnnnnnnnnnnnnnnnnnnnnnnnnnnnnnnnnnnnnnnnnnnnnnnnnnnnnnnnnnnnnnnnnnnnnnnnnnnnnnnnnnnnnnnnnnnnnnnnnnnnnnnnnnnnnnnnnnnnnnnnnnnnnnnnnnnnnnnnnnnnnnnnnnnnnnnnnnnnnnnnnnnnnnnnnnnnnnnnnnnnnnnnnnnnnnnnnnnnnnnnnnnnnnnnnnnnnnnnnnnnnnnnnnnnnnnnnnnnnnnnnnnnnnnnnnnnnnnnnnnnnnnnnnnnnnnnnnnnnnnnnnnnnnnnnnnnnnnnnnnnnnnnnnnnnnnnnnnnnnnnnnnnnnnnnnnnnnnnnnnnnnnnnnnnnnnnnnnnnnnnnnnnnnnnnnnnnnnnnnnnnnnnnnnnnnnnnnnnnnnnnnnnnnnnnnnnnnnnnnnnnnnnnnnnnnnnnnnnnnnnnnnnnnnnnnnnnnnnnnnnnnnnnnnnnnnnnnnnnnnnnnnnnnnnnnnnnnnnnnnnnnnnnnnnnnnnnnnnnnnnnnnnnnnnnnnnnnnnnnnnnnnnnnnnnnnnnnnnnnnnnnnnnnnnnnnnnnnnnnnnnnnnnnnnnnnnnnnnnnnnnnnnnnnnnnnnnnnnnnnnnnnnnnncgggttgtgtcttgctctctgccttcgagcaagacgagtcgtgtcttgctctctgtctacgaaagacggtgtgtgtcttcctgtatgcctaagagcaaggcggtgtgtgccttgctctctgtctacgagcaagccggtgtgtgtcttgctctctgtctacgagcaagacgggttgtgtcttgctctctgccttcaagcaaaacgggttgtgtcttgctttctgtctacgaacgagacggtgtgtgtctttccctacgagcaaggcgctgtgtttctgcttcctgccttgaagcaaaacgggttgtgtctcgctttctgcctaagggcaaaaaggtgtgtgtcttgcgctacgagcgaggcgctgtgttcctgcttcctgcctttgagcaagacgggttgtgtcttgctttctgcctacgagcacatccaggcggtcatagcttcatgctcgtgtgtgtgtgtgtgacacaacctcgcgggaccacagagagagaggtattcccacggataacatacgcgtgaggccatgttgcatcgtctatgccaagtctgtgtgtgtcaccgcacgttgcatggtccgtgaccgcatcctctcaagaaccagaggtactcccgtggacaggcgtacatgcgaggcgggattcaagaacacgaaacatgtggcagcacatccaggcggtcatagcttcatgctcgtgtgtgtgtgtgtgtacgagcaagatggtgtttgccttgctctctgccagagcaagacgggttgtctcttgctctctgcccacgagcaagacggtgtgtgtcttcccctacaagcaaggcgctgtgttcctgctttccgcctttgagcaagacgggttgtgccttgctctctgcctacgcgcaagacggattgtgtctcgctttctgcttaagagcaagacggtgtgtgtcttgctccaattatgaacctcttaccggtgttgcccatttggctgaatcggctgttcgatgcttcatcacgacgtgaagtagcttttccccgggcttgatttccatttttggtgttcctagcgattacgaagcgcgttattttagcaaatttcgtttcagatacgaaaatggagtgatgagtcgggaaaacgatgacacgatgaacattgctattttttcggagagagcgactggctcaaaaacatagctcccccagcagcgcaacccgccacgagagagtacgtagagtgagacgggctacaagcgagcatggctacctctcgagtctgctaggaagtggtccggacaagtgcccctggatgattggcttgtgtcttgctctctgtctacgaaagacggtgtgtgtcttcctgtatgcctaagagcaaggcggtgtgtgccttgctctctgtctacgagcaagccggtgtgtgtcttgctctctgtctacgagcaagacgggttgtgtcttgctctctgccttcaagcaaaacgggttgtgtcttgctttctgtctacgaacgagacggtgtgtgtctttccctacgagcaaggcgctgtgtttctgcttcctgccttgaagcaaaacgggttgtgtctcgctttctgcctaagggcaaaaaggtgtgtgtcttgcgctacgagcgaggcgctgtgttcctgcttcctgcctttgagcaagacgggttgtgtcttgctttctgcctacgagcacatccaggcggtcatagcttcatgctcgtgtgtgtgtgtgtgacacaacctcgcgggaccacagagagagaggtattcccacggataacatacgcgtgaggccatgttgcatcgtctatgccaagtctgtgtgtgtcaccgcacgttgcatggtccgtgaccgcatcctctcaagaaccagaggtactcccgtggacaggcgtacatgcgaggcgggattcaagaacacgaaacatgtggcagcacatccaggcggtcatagcttcatgctcgtgtgtgtgtgtgtgtacgagcaagatggtgtttgccttgctctctgccagagcaagacgggttgtctcttgctctctgcccacgagcaagacggtgtgtgtcttcccctacaagcaaggcgctgtgttcctgctttccgcctttgagcaagacgggttgtgccttgctctctgcctacgcgcaagacggattgtgtctcgctttctgcttaagagcaagacggtgtgtgtcttgctccaattatgaacctcttaccggtgttgcccatttggctgaatcggctgttcgatgcttcatcacgacgtgaagtagcttttccccgggcttgatttccatttttggtgttcctagcgattacgaagcgcgttattttagcaaatttcgtttcagatacgaaaatggagtgatgagtcgggaaaacgatgacacgatgaacattgctattttttcggagagagcgactggctcaaaaacatagctcccccagcagcgcaacccgccacgagagagtacgtagagtgagacgggctacaagcgagcatggctacctctcgagtctgctaggaagtggtccggacaagtgcccctggatgattggccagagtttcttgacggacggtgtacagatcaagcttctgcttgtgacactagaacacggaaggaaagctttttccgggtccagcgagctgaacgaggaggggtacaacaaactgccccgggctaacgctcagctagaaagcctcttgaaagagggaagaggggtgtacaacatatccagccttttggagtcgacaagcatcagggaagacgtcgtcgtgatgtccgcggacccgggccaggccaaggtgataaacgtttcttcggctacggctagcacttgggcgaagcaagaccctgacgtcatcctcaaaacttccacgtgtgtgttcggggacaattatcgtcgtgatactcttgcatcacgttcagacaagtacgagactttcaggcgcaaggaccagccgtacggagtagccatcgatcgtcttagcaacgagaagaaaagaacttcctgcctcgcaacgttcatccagtactgcaaaagttggtgtgcaaatggtccggcgttattcctagagactttgcagacaggaaggaagttcatgaggtttgatcgtttcagagctacgcagaagacactcgccaagatagcggacaggtacatgggacacgtagaagacacttgcaggatcatgttgttcggtaaagcgtcttttcgtgcgcagaaaggaagggcatctgccccaaggaaagctttgattagagagatggccagcagaggcgtggtgttgatggtgaacgagtacaatacttccaaaaagtgcccggggtgtggagaggacacagtcgaggacaaagaacggagaatccggagttgcaaaaactttaagatcggatcaccggaagagtcctgtagacttcaccgcctgacaccagagtttgaaatggatcgcgacaacgtagggtcgactaacatcggtatgcgtggtttcggccaattgctcggtcaggtgtggttttaaggatttttccggattttcacttgcggatgatactttatagtcgatttttctaaagttgccaatagtgactgctgcaccatccttgccgccgtgatttatgggtgtacacgcatgcttggaagatctttgaccgcagagagccagttgagggggaaaaaacaaaaaaagtcaaattaacccagtcacgtaagggttaagtacaaagcagctgcctcgctccgaaacagagagaatgtggggaaggcaacccgaggcccacccgagacaccctacaagacaattacacagcaggctcctggtgtcaacgcgtgtgcgtgagtccgggtgcccttggccgccaggcatcgcgtgaggtggacaccacacgctcatttggagagagctgtgtgccactcaaatgcaaaatctctaaaaacaacacacactcacacgtccgccgcttaccttgcgcggtgcccggcggccgtggggccgtcgtagctgctgctgctgctgctgctgctgttgctgctgctgcggtcgctgcttgcctctggcgctcttctctctctctctctctctatctctcctccctcgcgaacacgagcgggacagaagagattgcgcagagtgtgggcggcgcgtgccagcttcactctcgactatttccgacgcgagctcaagaaaccagacattggactagggtccacggtttttccagaacccaacgaaagcgataaggatgtattcaatgcgcagattttgtttaataaattggctgtcaaagtttttctttcccataattggaagtcgtttgcaacaatttctccggatataataccacccgattttattgaaggcttacccacaagatatcactgttatcaagttaagagtttctagaacaatttgacgaatcttaccaactcgaaacgttctcgaagaaagaccacatgcttcaattttatatgtaaacattggagtgtattgatcgcccacgctgctcacaattcaccttcaccatggcaaccaccattacaaaatcgaagacgacgaagaaaaagaagaggaagaagaaggccgacatcacaaccctgctacatgaggtctacaaagtcgacacgctacgaagaatcgacgacaagctttcgcaactgaagtttcaacaaacaacttgcctggaaacagtgggatattccgaggtttaaaaaaccctaaaagctggacccttgaggagacaacttagttgtttctatctgtttttgttcactacaacttaatagttccggttttcttaagttgatattagtgacaagatatagcgcccggaaggagtagaaggcctttggggcctacccctggatgtccatatttagaaggatccagcaacggaatcatagatgatgtaggacaggacgatggcggtcggatctttggattctgtaatgtagagaaccatcagttgtattggaattggtataatagttttttgtaaggcgtggccctctcgcccggtacgttaagaaattagcgtcgtcggaactgaattatttcgttggttcgttcccggcagtggctgaaaaattcagcactcacatgcgaacttacttgaacaggtatatcaagtgacgttgaatgatgtggcgcttgtaacacgttgtcagatttgcaaaaaagcgtttttattatatttagatgttgtaaagaacgctatggatgaattgaatgagagtctggggcgaaacgcgaaggagcgtatgaccgacgtcactctcgactatttccgacgcgagctcaagaaaccagacattggactagggtccacggtttttccagaacccaacgaaagcgataaggatgtattcaatgcgcagattttgtttaataaattggctgtcaaagtttttctttcccataattggaagtcgtttgcaacaatttctccggatataataccacccgattttattgaagtcatcgccgacgcccatgtcatgcacacaatcaagtacccgatatacaaagatcaatcggaaagggttcaccttgtcgaaacgacacaggaatttatcgatctcacatggcaactcattgtgaaagtgtgtttgcctcggtttgaaactagtgtacatgtgtctcccgatgatctctcctctgccagcgtaagaaaatggctttcatcggcaccctttctgcaacaattggctgcaccaggaaccaacgatattgagtatttcttggatccgggcagtcgcacaaatcaagagttgttcgaggtagggaaaaatctagaggctcggtacccacgcatgtcgatcaaaatgcacactggtaagccagaggtaagagagtttgacgacggtagacgtgatttagctatgctcgccacacttggcaaggatgtttcgtgggcgacgacatgggatatagtatccagcatactgaaggctaacggtattttcatatacgcggagatataccatgattcgtccaccccgtttcggtttcagtacgcattgaaggacggcgtggaattggaatataccccggaagacattgagaagataaatgaatttatgagtgtggttcttgaagacgtgagatcaaacaaaaacctggactcattggttgggctagtgcgttcgtatattctttagcgttttcccatggacattgtctagagggttctgtcaaaggtgatgctacctttagcactaccgcagtgatttacactgtaaaagactacacctcaagagtagaaatcgacaacatagaatttattcttgggcgggagtcgggaaataaagttgccatggtactcagcccggatttgctcattgaaaaagccagtagaggacacctccattttgtcggtgatgactcgattgatgtctcgtacctgggtgatgcaccggcctctgttgtggagacgcatgaaaacgtgcagcgggaaacggaagaccttgcgaacctcggcaaagttgtcgatttcaaggaatcacccgaatcggttattcagaagaatggcgtcgatttgtgtcacgttgtattcgggaactctgataatttattccaccgtaaaaatgtcacaatagcggtttttgaatccctagccacgacgaagggtagtggtttgttcggtcgaataagcgatctgttcgccgacctgatcaatcacagggaacgcctcgccagcgagaagggtcagagcgcgctggacactttgttgaaacaattggatacactccatggcatacgacgggaatacactgtatgttccagtgaagaaggcacttgtctggcaacagacaccatccataccactactctactcgcaaacacagctctcgcacatctacacgatctggcgacacccaaactagcatcttcaatcgatgaagttgcaggggacaacgtagatgggtggaaagcgttcgaacaggctcgagattcgaacgatagaaatcggaataaaatggcgagggctgctgtcacgtgtgctgcattgatagtggagaacggaacctatcctgacatttttcatgcttatcatgcgagaaaggcgcagcatggtagctccgatcggtttcctcttgggattgggagctttatttggaagttctttatggatgttggtgactcgattaaaagcttcgcggatcggaaaagttactttgagaacttttcaagggtaattttaaaggatcacgttgaagacgtgcatggtatgcgagtcgcagacaccataaggttcgcccacgatgtctcgctttgtatggaagttcaaggtgggagaagcatcatgggcgctgtacggggagagcgtttcttttacagacacgagcatgttgttagttggcacctcctcatgtacgctgtgatctgtctgatctgtagaattatattcaacttcataccaggacattacaacggtacacagaaaaaatccgtggcgaacatgttacatctccttgtgggtatttcgggactcactatggttctgccgttggaagccgtccacttggtcgtatgggttggtgtcacatatgctacagaatccttttatggggctcttttagcaagttctgaatttcccaaaaaggtcgcgagttggatcatgcgcccatttagtggaaaagagagcaatgaatatgtgccattgccggatgacatacgatccgcgagaaatgctgcacgtaccacggggcaccctgtcgaaaataattggaaaagtcgacctgcgagaagaagaaatcctatttctagattgggttcaacttagtccacaaattaatcatgctatgaaagtatcggaggatatctatgggtagcagttcggtaggaactcggtcagtcacctgctgtatcttgctttccatctctttggtaagagcttctcctctttctttcgccactgtctgcggtggtgtttttttacttctctaaatgagaccaatgccagtgatttgttcctcttgtgatcgtttagcctctggctgcttctcccacctttccaccagcaaatctactcgtttaagcaccagttctcggatagttttgatctctatgacttcgttgtcgagacgagtggcacgtcttctatactcagagaacgatttaacagttcggtatacagtcaaatcatttagagtctcgatatccaactgcgaatcctctgtttcaaacagtcctttgacattctcaatccccaatgagtataacgacggatcataccctttcggtgctggttccggtactggttccggtactgaaatcatctctagtccatgagtgtcactgggggtgagcagttgccgcaactcatgaaatccattcgatgttgtttgcgacaaggtagctagttccagtttgacatcattgatagcagtatcgtttccagaagcgggtcgcacaccttctatctcttttctcaccacgtcgcgtagcacttgcttggcagcttcgtcaaactcaattgtttgagaagtgcagacgacaggacccgactcacatcctctatttgaagcaacctcaccgagcttcagaacgattctgcttttgagatcctccatgtcatccttggatagcttcaagtctctattttgtatcaaagagtcgatgttgttgttgatattctctattacacgttcgtgcttaccgtcgagtttccgtagctgttcgccgagttcacattgttcatcatgagaagtattctttttcccgatattagaatacaacataagcatcggtaaccattctagaccaagtgggtagctatggttgtgcatgggcacagtgttgtttaccaataatacattcattatatatccagaaaacaacgaatcatgcgcgtggtggtgtagttgggtcggcactgatggggtcaggcgaaaaaatgtagatgcgcgggcctctggccgtcggcgtaggcagcgatgcccatctcattttttgtgcgcggaggcagacaccgtcagaaggtggacgggaactatgtacacggccctaggttggctagagggcgctgcattgcctcagtaacctggcttcgccatcaaaggaggagggagcaggtggcgacgagctgaactgggctggttgacccctnnnnnnnnnnnnnnnnnnnnnnnnnnnnnnnnnnnnnnnnnnnnnnnnnnnnnnnnnnnnnnnnnnnnnnnnnnnnnnnnnnnnnnnnnnnnnnnnnnnnnnnnnnnnnnnnnnnnnnnnnnnnnnnnnnnnnnnnnnnnnnnnnnnnnnnnnnnnnnnnnnnnnnnnnnnnnnnnnnnnnnnnnnnnnnnnnnnnnnnnnnnnnnnnnnnnnnnnnnnnnnnnnnnnnnnnnnnnnnnnnnnnnnnnnnnnnnnnnnnnnnnnnnnnnnnnnnnnnnnnnnnnnnnnnnnnnnnnnnnnnnnnnnnnnnnnnnnnnnnnnnnnnnnnnnnnnnnnnnnnnnnnnnnnnnnnnnnnnnnnnnnnnnnnnnnnnnnnnnnnnnnnnnnnnnnnnnnnnnnnnnnnnnnnnnnnnnnnnnnnnnnnnnnnnnnnnnnnnnnnnnnnnnnnnnnnnnnnnnnnnnnnnnnnnnnnnnnnnnnnnnnnnnnnnnnnnnnnnnnnnnnnnnnnnnnnnnnnnnnnnnnnnnnnnnnnnnnnnnnnnnnnnnnnnnnnnnnnnnnnnnnnnnnnnnnnnnnnnnnnnnnnnnnnnnnnnnnnnnnnnnnnnnnnnnnnnnnnnnnnnnnnnnnnnnnnnnnnnnnnnnnnnnnnnnnnnnnnnnnnnnnnnnnnnnnnnnnnnnnnnnnnnnnnnnnnnnnnnnnnnnnnnnnnnnnnnnnnnnnnnnnnnnnnnnnnnnnnnnnnnnnnnnnnnnnnnnnnnnnnnnnnnnnnnnnnnnnnnnnnnnnnnnnnnnnnnnnnnnnnnnnnnnnnnnnnnnnnnnnnnnnnnnnnnnnnnnnnnnnnnnnnnnnnnnnnnnnnnnnnnnnnnnnnnnnnnnnnnnnnnnnnnnnnnnnnnnnnnnnnnnnnnnnnnnnnnnnnnnnnnnnnnnnnnnnnnnnnnnnnnnnnnnnnnnnnnnnnnnnnnnnnnnnnnnnnnnnnnnnnnnnnnnnnnnnnnnnnnnnnnnnnnnnnnnnnnnnnnnnnnnnnnnnnnnnnnnnnnnnnnnnnnnnnnnnnnnnnnnnnnnnnnnnnnnnnnnnnnnnnnnnnnnnnnnnnnnnnnnnnnnnnnnnnnnnnnnnnnnnnnnnnnnnnnnnnnnnnnnnnnnnnnnnnnnnnnnnnnnnnnnnnnnnnnnnnnnnnnnnnnnnnnnnnnnnnnnnnnnnnnnnnnnnnnnnnnnnnnnnnnnnnnnnnnnnnnnnnnnnnnnnnnnnnnnnnnnnnnnnnnnnnnnnnnnnnnnnnnnnnnnnnnnnnnnnnnnnnnnnnnnnnnnnnnnnnnnnnnnnnnnnnnnnnnnnnnnnnnnnnnnnnnnnnnnnnnnnnnnnnnnnnnnnnnnnnnnnnnnnnnnnnnnnnnnnnnnnnnnnnnnnnnnnnnnnnnnnnnnnnnnnnnnnnnnnnnnnnnnnnnnnnnnnnnnnnnnnnnnnnnnnnnnnnnnnnnnnnnnnnnnnnnnnnnnnnnnnnnnnnnnnnnnnnnnnnnnnnnnnnnnnnnnnnnnnnnnnnnnnnnnnnnnnnnnnnnnnnnnnnnnnnnnnnnnnnnnnnnnnnnnnnnnnnnnnnnnnnnnnnnnnnnnnnnnnnnnnnnnnnnnnnnnnnnnnnnnnnnnnnnnnnnnnnnnnnnnnnnnnnnnnnnnnnnnnnnnnnnnnnnnnnnnnnnnnnnnnnnnnnnnnnnnnnnnnnnnnnnnnnnnnnnnnnnnnnnnnnnnnnnnnnnnnnnnnnnnnnnnnnnnnnnnnnnnnnnnnnnnnnnnnnnnnnnnnnnnnnnnnnnnnnnnnnnnnnnnnnnnnnnnnnnnnnnnnnnnnnnnnnnnnnnnnnnnnnnnnnnnnnnnnnnnnnnnnnnnnnnnnnnnnnnnnnnnnnnnnnnnnnnnnnnnnnnnnnnnnnnnnnnnnnnnnnnnnnnnnnnnnnnnnnnnnnnnnnnnnnnngcaaatggcgcgaaaactcggggaatgcgttcaaaaaggcgctgcgcgagcgtgtcgagagggttcggtcctctagccaaacagaacaactccaactccagacaacgccacagccaccgcagcaagtcgggataaagacggccgcccttcagaaggctctccggtccgtcaagatacacggctctgtgcgcatcgacgatggattagggaaagcgtccatcatcgacaccgtacgcctgatatccccaacggcctctcccgaatatgcttcacagatgttcacacgcgtcatacaaaaggatgatcgtgttatatccatcaggtcccgtacaacaagcatcagaatcaatgggcgcgaaaaaaaaacccgtgtactgacgtagctactcttcttgtggaaatcatctggatgctaccagatggcgcctcgagagcgttccgtcgtgactctgctgagacaatctgtcgtattatgggtggagatctcgatctgtgccaccagatagcgcagaataaccggacatgggggtctatagaggggggtgaagtcatccgacaggctttgcttaagccgatcgcgtacaaagaggtagaaaagtcaaccagagtgatggagcgtttggtgagagacgcgattgcttctctggtcggaggagaagccgaggcaaaaacacccgcaggtaacatcgatgtactcagtggtaaggaagtgatcgaggtgaagtactacaagaagtggaagcacgggctcggccaggtccagatataccatcaatttcacccccgtctggccatgcgcctccacctctttgcacatacgggggaagtcggtacggagaagtattttgcaatggcgaagtcgatgtgtgacaagttcggcgtaagggtcacgttcgaaggggcacccgctctggctctggaagacggtccgcgtcgtgtaaaaagggcccgtgaagaaaacttgtcttcccaacaagtgcgcaagcgccttgctgatctgaaagcagaagaagccaggcttaacgcagtgcttgccgatcaagtttagacgaatgccataattaatcatattcaattttgctgaaacagcttcgcagcaccctctttcttgaggaacttgaccattttcgctatcgtttcaatatcagctacgggttcgaccggcccctctccgttgattctcatgtaggagactttgcctttcaaatcttcgcgtagctgcgaagcgatgcacccgttccaaatgtcggcctcgggcgaactccgagcctttctggctatgattctggccctgtgttctgcagagtgttttttcttggcaggcatgatgtcttttgtttgcggggttcctttcgacacaagccttctaatcttacgcataaactttcttttttggtcgttggggttttccggcggaaagcctgcagtgtaccatccgtttttttttaaacacaaagtttactcaaaacttaacacttgaaagcctacaaacatagttccgacgccgagaagcgcgctttgtggaagaaggtagttgtggagctgcagcgcaaactaaagaggggcgaaacggtgtatgtgagcacgcatggaacaggggtgagctggctgcacgtgcggctggcttcaaggccgatgtactacgtcacctcggttgcttaaaaacagagcttgaccttgccggcaacagaacttcccccaccaccgacacaacatgcttcacaaacacgctcccaggttgcttgaatggctctccgttattagcgtaccagtctttcatgacgggccaagtcagttccaccgcctgcgccccgaggcgcaccctcgtagcgccattttaattgactggtccatggtgttgccgttctcgagcaacgcctccctgtacgcggactcgcacgcgtggtgatactcgctccagaaacgcgggccaccggtatcaaacagctcgcgggtgatgtactgtattcccacgagctcctcgaggtcgacgtctatcagaccacagatgtagtcatggcagtacacgctatcgggccgaatgtctagccctctcaaatccatggcgtcctgcagcatacggcgccggtgcgtgcggtcgtctttcgtgcgccaaaactccgccatcttggccgctaccgtctcggggtcgtgggcgtactcgatgcatcgccgcaccctcgttctcatcgcgggatacttcatcattcgctcntcgacaacatgattaccgccgcgcctgctgccgatacttcaacggtttctgtgtgtgtggctatgccggtagacgacaccatcgacccggagacgggtctgctcattgcaaccccgaagtgtagcccgagtgttcggggcccagagacgtcaatttgcgtcgaagctgggaaaatgggcattggtgttggcgaaaaggccggtcaggtcggcaaggttgttaagcggctgtactccga

SEQ ID NO: 276 - DNA, 12806 bp, unidentified
  misc_feature 1..12806: note = Fanzor polypeptide
  source 1..12806: mol_type = other DNA
tttattttaattatgatcttgtattaagacttatatttattaatgtcaactacaatcagttactgttctacaacagttatttctctgtatcttaggtgcatgaaaagaaatggttttagtgtggcccatttgccctagtggtgtacttcaggagcggcaccctggtaacctcactaatgccatccccctcaaagtatttcgtgttaactattacatcaaccaaatatatattcactaattgtatttctctttcctcatcttatttttctcgttttatagccaactactacgttctcgtgttaccaaatattcgtaccactcccacagtcttcctgttcgctcgctatgacagcttgagggctataaataaaactctgttcatttattttttaaatgcctatcaaagcctttgtttgataacagttatagtcaagtaaaatttgagattttcgagagtttataactgctgttaaaaaaaactataagatgtattaatagccagttgaacagtagaatgattatgtctcaaaaaaaccttctcgaaataaaaagtaattttgccataggaaaacctaatgttgctataatcctgtatgtatatcagaaacgatattttcacatcctgtggagacactattgatgaatgtccttaaacaaatacaccagaatgcgttttttgatgaaaggatgggttctccacatacttgtacatattataaaaaaccttccttggatccctgtttgattcacacttcattaaaaaaaagctatctttttatgagttagctttattggtcaattgtcaaatatatgttatgggagtattacaataaaaataatagtacctactatgtatacaatttcctactaagcttaacagtcacctacttaaaaccataaaatctattattttaacaacaattttgtaatatcttcatttctttccatataatatgtcccttacgcgtatcccaatttacccaaatgctgaagccttcataaagctaaaaaagcaatatatatacgaaaagcaacaacagcaagaagaagaagaagcggcagcagcacgcagtaattttagaggtcaagttaaagaaaaaaaggtaatgtgaactatgtgccaataatgaaacagaagaactcaagttttagaaggcgtaaaatggaaggatacagcggaagaaaagattaacaaaagatcagccaaactggcgcgtaattcccgtgttgtaacaacagacgtattgtgtaaatcttgtggtgaaagcgggcattcatctgcgagaagcaagcaatgcaaaaaccataattacacaatacaagaagtaattgaaaaaaagatcggcctcaattatcaaagatacactatatccgtaccacttcgatcttttctccctataccagatgatgcgtttaataataccctgaaaaaaatcaagagtttgtcgatgttccttagaaatgtgatgtatagggcacagctctttatcaaccactatatccttaaatacccagatggcttgccgaatgaattttttcaacaaaacttttggtattctttatgtcgattaataaatgaaaatatttcaattgatgtcttcaagcaaaagtattcttcccatattccttatcttgaagaagtatggaatgaactcagcggccttgaaggtgtcagtatggtagtaaataaagaaggtcttaccaactatggccaagatttatcgaccgcatgcgaaagtgttgcaacatgttacaacaatttttacatagaaaactttggaaatgttgttaatagctactgcatatacatgattcgtaaagaatttccggtaaatgaaaatttgaaatagacctttttttttctacaacgattgatactatcaattcataggacttgaagatgcctttgatcaaatacattgtatacaatcatgtattagagatcttgtttagcaccccatcatcaactttacctgaaaacattggaagttctgtagataaacagacccaagacaaaattcgaaactttctaaacccgttgattttagaaatcaaagaccgcttaccaccagctcctatcacaaaagagacattaaataacgcccctttcaacataatgcctgtttttagacatatattatcaaaatacgaatcaataattgacgcgaaccaacaaataacacccgtagttcaactaacagtggcttcacaacaacagcctaacttattacagcaagcagagggttcaaaccagccacgacagaggcccaaaaaaaagaaaaaagtattaaaaaatgaaaacccaagggagcgtaataataaagatagacagttccaaccaccgagactgttcagtttatttccgaatccaagcttaaaatggcggttcatcaaaattgatagtcaaaacctacaaggtatttttggaagaagaacccatcaacaacaggaagagactccttttgatttaacccaaaggtctttctttgaatgttttgacttcaaaaagttgaaaattaaaaggtaagctatgtaaaacgttctatgaatagtatgcatacttattttcaacatgaatagtctggtagaactacaatcaatgcatgaaaaaggcaggatgttcttaaacagcttctataccgatggttatacctgtagagtctccttttgtagaaaaagatatatcaactcacatttggataaagtcacactcacgctaaatgacttcaatagcgagagggttgagcagctatttcgaacttgcacagtagatcctaaccggaaggacgttttcacatcttaccatggagcaaatgatataaggcgtctctctagctctgaataccataatatgaacggagttgtcaatcgtcaaaaactagagcaagaacgaaagaagagagacaatattgaacatattgaaacaagaatcccttcacccaaaacaactaatgctgaaaactataaaaaacacataatgtatatgctccagcactttggaactttagtaaacttttacgattttcaaactgctagaatacggtggtcaaactatatagggaatcgaaaagctacagatcatgccatcaatattctgctaaacggttctacaaaatacaacaaaagcaggagaaaaaaaaccagacgaaacaaacgtaaaagaagaaaaacgaatagcaaatacgaacgagacctatcaaatactaagcactcaaaaaaaagggaaacaagtgatgaggtacaacttacatttttatttttattttttatctagaagcattgatctttttattttttatagggctcacaaagaaaggtttgaagaaggagacagaaaaaagatgccaatgattgtatttggaaatggattgcaaaacaaatctcatgtcaaatacaaaggattgaggcgcggggtgactgataagttgtacaaacagctgaaattgcgtgaaaaatcgggtgaattgctactgcttgacatcgacgagtttaatacgtcaaaggtgaaataaatatatgctcattttgcacaagtattaataacgcatcacttcttttgtagatatgcaatgaatgtttcacgaaaaacttggagaatttgaagtgtgatggtcgtaaaatccatcaggtattcaactgcaaaaattgcaatatcttttggaaccgagacgtcctggcatcaaaaaatatgttcaccattgctacctctatttggagcggcaatggatgtcccaatgtctttcaaagacaaagcgccacctccaatgtggttgcctcgactcactccggtgagtcgacggcttaaagatgactgcaggtaagaagtcttcataaagaaaaaaaaaaaagacaattctgatttccatataaaataggtaaacaaacttttaagctacagttgtgattcgtccaaaaaaaaactaacattttctaaacccataatattttttgtctcaactctatttttatttcatccaaaaagggtaagcaaagcgtctaacttaagtttttgatccgtctgaaaaaaaactgacatcatctgattttagactaaaatcctgtatgcatagatgtgatttatcataagacaatgaaggccatccaattgaatcaagtatcaattttgacccattcattcagcaactgagctatgaagacatccctatcactgcaatgaagaatcgacaattaaagatcatgttcagctttagcacaaattcacaaatcacaaatataaacaatagcaactggaaagcttttattaggagtcccatgcatcatatttccagaaatgtatggtacagacttcttcatagcaaattatccacccgatccaacttgcatagtcttatcccaacacttgtagaagatgaatcttgtcaactgtgtaaacttccagaaacagaacagcatatgctctttacttgcatacagaaacaagacatatggcaagcagttttcaagaaatacttatctaaccctaaagatcctcactgcagctcaatattccaggatttatctacacttaggctttccaagtattacatcctgcactaccatgacaagtttacaatatatgatttttttgccacagttattcgattcatttggaaagctcactggcaacaattctttgaacagacgcctattttggaagagattgtcatcaatcaaacccaaaaagaactattgaaactatctgcttacaattccttatgctaatatcttctgtattttcgtgacaagtcactgttttatacacttgcttcacatttaatcatctactctgatgagttttaataaacattaaaattttcatccataaaaaaaaaaaaatgtgatttatcataaaaaaagaaaaaaaagaaaatacatgtgatttattactatcttttgtattttcgcgacaagtcactgtttaatacacttgtatcgctcttaatctttatcttctgatgagttttaataaatattgaaattctcatccataaaaaaaaaaatacatgattttattggactatgtacagaataaggtatttaatgcggataataactggaaggtggatgggaaaatctcttgttgacttcatcttcagtaagttttcttgttacaaatgaaatgtcactcattgttctctgagagtattgatttggatattgtcttcccattgttttaaatttgcgaacatgaatacacattacgagtaataagatcagtggcaaatagacgaataaactttcaagtagaatccatatagatatatgataatcatctcctgctccatagcgtatccagcccaataaacacatacccatcattgacattgagaacagtaaaggcacaatacgtaaaaagaatagatcatccctattttgacgaacgttaccaaaccttgagctcttccatattacaaagcaattaataatcgtaagaatccataaaattgtaatacagataggcattgccacgctttgtacggttgaagtagatatttgaataacaatacagcatacaataattatagcatagaccaacaaaacgattacgcttgtccaatagttccagggacgaagggaatgcctttcttgtgctcttgggaatccctccgacttttcagaatctcttaaatagatactacgccaacgttctcggttataaagcgcagcagctacgtgtcgaatgaataatatctgagcttccataattccaaggagcaccaagatggatatcacaggtaatacattcaacacaagacttttactggaccaatctgatgttaatgtgaatccataatgtgcgctaagcataacgattaatgctatacttgtcaagaggccaaaaaggacaaaaggaagtaataaaagattatgacaacagcgtgctgccaatatgatagaaagtacagcaaaaaatacagtataaattatccaagctacttcttgtgctgacaacatggataagaacagaaagaaaagaagaaactaaggaaaggatcatttgtttatgtaaaaaaaaaaaaaaagcaatgctaaaaaacagctttctaaaaacaatagttttggccaagcctatcttttttccttttctagtaaagttttttgctcttccgtttctaataataagctataactctatttttatttttgacatctgatttttaattggttaaaataaaaataattaaaattcgggccaagactaagaaaagttgatgtcatgtccatttaacgaactctggtttatactctaattcatcaacaaattaaatttgaccatcttaaatctttaagcagagaggaagaagtcgatgattttaaaagctttatacaccattttcagaaagtaaattcgcatttttacaaactttataatgcaatatatacaaaaagcgttaagtaaacgcaatatttattcctgaaaatagtgtatgttttaagaaaaataaatagatgaaatggctatttcggacagtgattgattgagattattttctgtggttttatttattataatgcacacatcaaagagtagaaatcttctaccaaacttattgtcaccttctacaatgagttacacggaaacaaatagaaaaataaaaggtataatttacttatgttgtaggtgaatatagttagatttcaggtcgattatactaaacctgctaaagttttttatttttaaaaaaaaaattaaggtaaatcaatttgaaatgccccaggagaatattatctagtaaaaaaaaataatgtctaaaatggacatattctagttactcgcgttttgtttttgcagtacatttagataaacttgtacaagttaagcagctgtaattctataaaagaagcatgtacactatttattgagataaaaaataaatgcgctaaggcaattttttttctttaaatttttcttatgaaataaacaggctttaacattgggaaatcaaagaatttgaaggttttggagcaatattcttttaatttcaagtctagaaagaactattctatagaccataatcaataacaataacaaaagcaatggtttgtgctacttttcacaaaggctttgaattgtttcagccacactgaatttgcatgactacagtatgctgaaagtgaaatcagcaacatgttcaactcttgatatcaaattattctaattatttgaacataatgtttagtaaataagcaacaaggtattataggtatagccgcttctaatttgtttgtagtattaaactcgaataaaattcacaaactataaaaaaaaatgactgcattattgtaaataaagctgttaatgttaatccattgacaatggagagaaaggcatatatagcaaatataaatgcttatttctagtgacatcagctttcttttggcagctaaatgtttttaataatagtaattgaaaagtgtataaaatacaaataaaaaaagctgtaacttgttagctataaagttttaataataatttactaatgcaaggatgataatttactgaagggaaagtcaaagcttcatacaatatatagatttgtacaaattggccataaattaatgcagggttttgaattatacaaaatgctctaagcgtcagggcatgcaacacaatcacaatcgtcttcttctaccatttgattttttaattctctttccataatttctacataatcgccaactttgccttgatatggttgtaatctaagttcgtcatgaacaatggccaagcatgtagacaaatatttgtgaatacggggaatatattctgtgatctctggtggcatcattatttgcactttagaaatattcaataacaactgccaagcgttaatcaaaactcgcatgtcaaaataacagtcagtcgaccttgaccgaagatatttaattaagcgaacagtattgaaggcggcatgaactcctgttataacaatatgcttctgaatgtgggattcatgtggtcctagaaatgattctaccattgcaaagtattcttcatcagtaccttcaaaatcaatcttagcacgaagttctaatatcttttgtattcttctcctccattttctgctgatatttgcattttttggaatatttccgccattccaatgcatttttaataatttccattcattttcaggttgcggaattgctttagggaggtaagactgtgccatgataagccattcttcataaataactagtgtagtcaaaacaggtataacgctgtgggagcattctctttctaatgtactataaaattcttgacagctaatcgttgaatcaaacaaaggaagggacagtctaaactcaagtggtaaaactttagtgtaccaatgtctcattgccatctccacctgatgtccaattagacccacaaggtgatacaaatcacttgaataagcacacttgctagctttatgttcagttctttgtagaagtaatatgtacgaatgcatttgggcaaaccacttttcctgaattgagtcatcttcagcaatttcccattttccttcttcagagtgagttagtgtacagtaaggtagatttgtttcatcttttttcatatctggaagttgggcccttgtaatttcttcaaatgtctgtacacgacgcaaatgattcaacaagcgactaaaatgaacagcttctcctttctcttgtaaaaaagttgcgccttttcttttcatcttgaatatagccacatatttcggctgtaagaccactgaaattcgttcggccatatcagtatacagtttgcccttttcaaactcagaaatagtgagtgtgtagactgccatgaaaacgtaagcagtaaagctttccaagttgaattgatcaaatgaggcttctaaagcatcacgagcccttttaaagtaaaattttccatattcaaccaaagaagcagaaggtagacatcctgcaatatgtttacatcgcagtgtacagatagtagcacaaagagccattgcagcagcggattctcttgtgtcgagaaagcatctaataaacgtggggacatggatagctaactgttgaaaatgttgacaacgcaaataagcttgtatcaacttattggtcgtaacttgtatattttcaggtgaacatgcagtgactattgtatttacacttgacattctcggtgcagtaaaaatacgtattgattttgcgacgtttttacattgagttttaccatactttttgcgaatcaacataacaagttggtcgactatattatcctgtttaatgcaattttttattactggaggaatgcttgatccgtactccacagactgcagcacacaataaagattattaaacagatccgaataattgttgatatgcgtatcaatgcaaaagtctccttttttcacattaagcacccacggttgtgtttctctctctcctttttttaaaattgcctgtgtgccattatctaaaacagcaatcagctttgaatgctgggcaggttggcttgaaaagctgagagcggttgaaggtgatgaagggaactcatcagtcatacttccatcactgtcattagttaaagaaggtgtactacttccttgattcttcatgcgtttcattgttttttccatgtttgctatttcaatttctaacgactccgcttgctttaagagttctgtttgtattgcaatctgaatgaactcttcatcaacaggagaatgcgagcttgagtatacacaatcgatatcaaacttgtagcatctggatcgtatacctttgataagtaaagattatttgaatgcctaaattttaactaacctttcacagggttttaaaccattgcatttccgtttctgatttcgacactctaaattatattttaagcattttaattttttgattaatgtcctaaggcttatctaccttcgcatggaactttcttcattgtcatgcttaaagaaaaaaattcccaaaaagtaaaataattaatccgttactgcgtgtttataaactgtttagcctttaagccaatttctcttacagaatatgggaaaactattttgccgggcttattttaagtagaatgaactgtgattttttatattttattcgttgttgttgttatgctcctaccttgatagttataaagagacttatcattcaatggaataacaaatttcgtcttgtgatgaaaggattatctgcttatggaaacccatcgtgtattcaatttgttacagtgcaaacatgttctataccaaaagttaaaaacactaattgaaaataatcaacaatattgactatatatagcttcaaaatatatctaccggtttttatcgtctatttgcaaggagaattgatgctttaaaatatcgaaaaataaagctggaaactcatacctttaagaatttaacaacttatattccaagataaaaatatgcatgaagtatgtttttttctttacttactagcaattaactccaaagctgaaatttgcttaatcttaatagcattctttattgatgacataaataatgttcaggttggtgatagaagagcaggagttatggtagtaactcttcaatttgcgcttttatttattcaaaattacagaaaaataataaatgcacaaacatgcataccttatccttttcaaaccaagaaacgaaactttttttcatcacttttttaatttataataataaaaaaaattattcataaaatgaaaaagagtaataaagatacggtaggaccaaatatacattatcattttttttagttataaatatccagagttcatgtacttttcactatgtagatattattgtatacatttcgaagctgactatgtactatatatattatgcagtaagctgtatattaagtattatgaagacctattcataatttaatacaagaacgtgctcctgtatcgactgtttgctataacgttaaataagtccaaatttgtacacagttatacagttcaataaaaaaaataattatttgttattctgcaatgagctgctttatcaagtcagagaggatagagaaagaagagaaccggacagaaactaagaagcttgaatagtcaactaaaagaggacagtagagggtggcgttaaggatttgaagttatgaactgcaaataggacttaaaatagctgataagcaagaacgaaacaaagataagtaaagataggaatagacgtacagtctaatagagagaatgatacttgataattgactgatactttattaataactacaggtgtgtatttatacaaaagtcagaaacgcaatttgacaaaagaatgaactcagattattgagttttcagttaaaggatgttaagagactttaatgttattttcgagtttatatttaattctgatcaatgagtgatcttgccaaagtagtgaaaaccaaacaagtcagaagttatagaactttttagatagaagaaagaaagatgtcctttattaagtgtgttttttgtgtctatttatacactacctcaaaaaattgatcattttgaaccgccttttgctcattttgtaaattaactgcttcatattatttaggctagggggttttaggtaaaaggtagtataacaacaaagataaagaaatactgtgagggtatttctgggaagtcacagtctgactcagtctccagatttatcgtttttgggcgggattgagaatagtaaggaatttttttttttttttatggatgaacattttaatgtttattaaaactcatcaaagagtataaggattaagagcgatacaagtgtattaaacagtgacttgtcgcgaaaatactgtggtatttacacatgtaataaagtaataatgtaagttactacgaacaatggtcctccaaattaggaatatcggacattgtattacgccacttccaataaaatcccgatccactccagaatattctaataagttcctgatcaggattaataattacttcttgataagaagatgttaaactatgccaatcacataaataactcatcgtctaatatcgattaataatcaatacgcatacactgtaagtattattatttagccgtgattagaaaagtataaatacactcatatttttaacttgaataaaggacaatctactttgagtctcacttatttttatatttgttgattgacttagtactttttatattataaaacctcaaatatcacaaatacaaaagaaattagcatagagaagtgtgagcagatagtttcaatagctccttctggatttgattgatgacaatctcatccacgacaggagtctgttcaaataattgttgccagtgggctttccaaatgaagcgaatgactgtagcaaaaaaatcatagattgtaaacttgtcatgatagtgtaagatgtaatacttggataatctaagtgtggataaatcctcgaatattgagctacagttgggatctttaggatttgacaagtatttcttgaaggctgcgttccacaagtcttgtttttgaatacaagtcaagagcatatgctgctctgtttctggtagcttgcacaattggcagtagtcgtcatctacctttgctgggatgattctatgtaaattggcgcgagtggataatttcttatgaagaagtctgtaccatagattcctaggaatatggtgcatagggctactgataaaagctttccaattgttatgacttatatttgtgatttgtgagtttgagttgaagctaaacattgtctttagttgacgattcttcaatgctgttatattgatatcttcatagctcatctgttgaatgaatgggtcaaagttgatatt

SEQ ID NO: 277 - DNA, 6741 bp, unidentified
  misc_feature 1..6741: note = Fanzor polypeptide
  source 1..6741: mol_type = other DNA
attttattttaattatgatcttgtattaagacttatatttattaatgtcaactacaatcagttactgttctacaacagttatttctctgtatcttaggtgcatgaaaagaaatggttttagtgtggcccatttgccctagtggtgtacttcaggagcggcaccctggtaacctcactaatgccatccccctcaaagtatttcgtgttaactattacatcaaccaaatatatattcactaattgtatttctctttcctcatcttatttttctcgttttatagccaactactacgttctcgtgttaccaaatattcgtaccactcccacagtcttcctgttcgctcgctatgacagcttgagggctataaataaaactctgttcatttattttttaaatgcctatcaaagcctttgtttgataacagttatagtcaagtaaaatttgagattttcgagagtttataactgctgttaaaaaaaactataagatgtattaatagccagttgaacagtagaatgattatgtctcaaaaaaaccttctcgaaataaaaagtaattttgccataggaaaacctaatgttgctataatcctgtatgtatatcagaaacgatattttcacatcctgtggagacactattgatgaatgtccttaaacaaatacaccagaatgcgttttttgatgaaaggatgggttctccacatacttgtacatattataaaaaaccttccttggatccctgtttgattcacacttcattaaaaaaaagctatctttttatgagttagctttattggtcaattgtcaaatatatgttatgggagtattacaataaaaataatagtacctactatgtatacaatttcctactaagcttaacagtcacctacttaaaaccataaaatctattattttaacaacaattttgtaatatcttcatttctttccatataatatgtcccttacgcgtatcccaatttacccaaatgctgaagccttcataaagctaaaaaagcaatatatatacgaaaagcaacaacagcaagaagaagaagaagcggcagcagcacgcagtaattttagaggtcaagttaaagaaaaaaaggtaatgtgaactatgtgccaataatgaaacagaagaactcaagttttagaaggcgtaaaatggaaggatacagcggaagaaaagattaacaaaagatcagccaaactggcgcgtaattcccgtgttgtaacaacagacgtattgtgtaaatcttgtggtgaaagcgggcattcatctgcgagaagcaagcaatgcaaaaaccataattacacaatacaagaagtaattgaaaaaaagatcggcctcaattatcaaagatacactatatccgtaccacttcgatcttttctccctataccagatgatgcgtttaataataccctgaaaaaaatcaagagtttgtcgatgttccttagaaatgtgatgtatagggcacagctctttatcaaccactatatccttaaatacccagatggcttgccgaatgaattttttcaacaaaacttttggtattctttatgtcgattaataaatgaaaatatttcaattgatgtcttcaagcaaaagtattcttcccatattccttatcttgaagaagtatggaatgaactcagcggccttgaaggtgtcagtatggtagtaaataaagaaggtcttaccaactatggccaagatttatcgaccgcatgcgaaagtgttgcaacatgttacaacaatttttacatagaaaactttggaaatgttgttaatagctactgcatatacatgattcgtaaagaatttccggtaaatgaaaatttgaaatagacctttttttttctacaacgattgatactatcaattcataggacttgaagatgcctttgatcaaatacattgtatacaatcatgtattagagatcttgtttagcaccccatcatcaactttacctgaaaacattggaagttctgtagataaacagacccaagacaaaattcgaaactttctaaacccgttgattttagaaatcaaagaccgcttaccaccagctcctatcacaaaagagacattaaataacgcccctttcaacataatgcctgtttttagacatatattatcaaaatacgaatcaataattgacgcgaaccaacaaataacacccgtagttcaactaacagtggcttcacaacaacagcctaacttattacagcaagcagagggttcaaaccagccacgacagaggcccaaaaaaaagaaaaaagtattaaaaaatgaaaacccaagggagcgtaataataaagatagacagttccaaccaccgagactgttcagtttatttccgaatccaagcttaaaatggcggttcatcaaaattgatagtcaaaacctacaaggtatttttggaagaagaacccatcaacaacaggaagagactccttttgatttaacccaaaggtctttctttgaatgttttgacttcaaaaagttgaaaattaaaaggtaagctatgtaaaacgttctatgaatagtatgcatacttattttcaacatgaatagtctggtagaactacaatcaatgcatgaaaaaggcaggatgttcttaaacagcttctataccgatggttatacctgtagagtctccttttgtagaaaaagatatatcaactcacatttggataaagtcacactcacgctaaatgacttcaatagcgagagggttgagcagctatttcgaacttgcacagtagatcctaaccggaaggacgttttcacatcttaccatggagcaaatgatataaggcgtctctctagctctgaataccataatatgaacggagttgtcaatcgtcaaaaactagagcaagaacgaaagaagagagacaatattgaacatattgaaacaagaatcccttcacccaaaacaactaatgctgaaaactataaaaaacacataatgtatatgctccagcactttggaactttagtaaacttttacgattttcaaactgctagaatacggtggtcaaactatatagggaatcgaaaagctacagatcatgccatcaatattctgctaaacggttctacaaaatacaacaaaagcaggagaaaaaaaaccagacgaaacaaacgtaaaagaagaaaaacgaatagcaaatacgaacgagacctatcaaatactaagcactcaaaaaaagggaaacaagtgatgaggtacaacttacatttttatttttattttttatctagaagcattgatctttttattttttataggactcacaaagaaaggtttgaagaaggagacagaaaaaagatgccaatgattgtatttggaaatggattgcaaaacaaatctcatgtcaaatacaaaggattgaggcgcgggatgactgataagttgtacaaacagctgaaattgcgtgaaaaatcgggtgaattgctactgcttgacatcgacgagtttaatacgtcaaaggtgaaataaatatatgctcattttgcacaagtattaataacgcatcacttcttttgtagatatgcaatgaatgtttcacgaaaaacttggagaatttgaagtgtgatggtcgtaaaatccatcaggtattcaactgcaaaaattgcaatatcttttggaaccgagacgtcctggcatcaaaaaatatgttcaccattgctacctctatttggagcggcaatggatgtcccaatgtctttcaaagacaaagcgccacctccaatgtggttgcctcgactcactccggtgagtcgacggcttaaagatgactgcaggtaagaagtcttcataaataaaaaaaaaaaagacaattctgatttccatataaaataggtaaacaaacttttaagctacagttgtgattcgtccaaaaaaaaactaacattttctaaacccataatattttttgtctcaactctatttttatttcatccaaaaagggtaagcaaagcgtctaacttaagtttttgatccgtctgaaaaaaaactgacatcatctgattttagactaaaatcctgtatgcatagatgtgatttatcataagacaatgaaggccatccaattgaatcaagtatcaattttgacccattcattcagcaactgagctatgaagacatccctatcactgcaatgaagaatcgacaattaaagatcatgttcagctttagcacaaattcacaaatcacaaatataaacaatagcaactggaaagcttttattaggagtcccatgcatcatatttccagaaatgtatggtacagacttcttcatagcaaattatccacccgatccaacttgcatagtcttatcccaacacttgtagaagatgaatcttgtcaactgtgtaaacttccagaaacagaacagcatatgctctttacttgcatacagaaacaagacatatggcaagcagttttcaagaaatacttatctaaccctaaagatcctcactgcagctcaatattccaggatttatctacacttaggctttccaagtattacatcctgcactaccatgacaagtttacaatatatgatttttttgccacagttattcgattcatttggaaagctcactggcaacaattctttgaacagacgcctattttggaagagattgtcatcaatcaaacccaaaaagaactattgaaactatctgcttacaattccttatgctaatatcttctgtattttcgtgacaagtcactgttttatacacttgcttcacatttaatcatctactctgatgagttttaataaacattaaaattttcatccataaaaaaaaaaaattttttttcaaccggtcaagtttgttttcattttgttaggtcatcttcaaccatccttggttgctaaacccatggtcaaaaatataacaagagagcaggcaatatgcatcttcttctgccaagattatactgaatttaatgtagaaaaacttttgaagaaactggaaaattttgaagatgtcgacatttgttacgacgaagatccatttaaacccatattactttgtaacaaaagaatagattccaaccctcagaaatataagaaatacaatagcagctcactttcggcgaaaactatttagattaataaacataggctttagcaatatataaactttattgacattgacaaaagaaataaaactttcagttcaagatgtagtaatgctggcaagatcttttatttgcttttttgtctgtaagcaggtcgacaatcaaattgtttcagatcttccacacaattcagcagttggtttctatcaaagaccttgatatgatttttgtaaaaaaacaagtcaatcataattttttgtatgttgctatgttccctataaaattattgtctatttacatcttagaacacatattgtcactacttacttgagtaggttctttagatcactcatgttggtagtgaaaccggcgtaatcaattgctactacacatatcttcgtcttcttctccttaacataagtcaaaaaatctataaaaaacgtgttaatttttcaagatttgactagaagttatattattgtttcattcttttttttttcaccttgtgtatttccgtggatttgatctaggctggatagaatatcttgatcagataaatcacgtttgctcaaagcttgcttagcgctgctacagggagagacgaagactttttgaactagcgatctttcatacagtatatttatcattctttgtagtagtaaagcccgattgtcactttcttttttcgacttcctgcaatacccaatgacttcgtaaccatcatctttgagttgtttaatgtatgcatggtgtctggggattgtactgacaatattatctgcaacctcatctataaaactggagttagcacgttatcttgtcctataataccgttttcaagcttaccatgaaattgactgtctaacacgctcaaaatcctgattcttaatttttttgtttcagatccttgaatctttaatacttttcgctcaggctcctgtattaagaagtcgatgttttgtttcttcaaccattggttgaaccccaaagccgtagtcttgttaaaacgctctgtgtatttccaaagtacgcccaaaacagttttatcagaaacatttgttagcttgaaaggagagtctgtaacgtgttccgactttggacgatagacatagtttataaactccacaatttgtgcttcgttttctattttattgttaataagaatttcggctaccaagttactctctgactcaccaaagctgatgttcttatccatatcgtcttcttcacatttttcttctaaatcttctcttgacttgtaattcttatataaatttggagctccaaacacacgagcgttacaaacaaggattggctcatttggactttcaagataacaaatctgaatgtcctccatgttctttactctatcagtatacatcttagcattcagatcattatactctgcgcaatagaaaatacaacaagcttgttcgaagcaggtggggttcatttagtcaataaaaagaaaaaaccaagcgtgggtttggaccggttcaaaaaaatgagaaaaataagcgtgggtttggaccggttcaaaaaaaaaaaaaaaaaaaaagaaaaaaaaaaatatgtaaaaaaaaaaaaaaacaaaataaaaaaaaaaaaaaagaggaaaagtgtggatcatgg

SEQ ID NO: 278 - DNA, 12624 bp, unidentified
  misc_feature 1..12624: note = Fanzor polypeptide
  source 1..12624: mol_type = other DNA
ttattttaattatgatcttgtattaagacttatatttattaatgtcaactacaatcagttactgttctacaacagttatttctctgtatcttaggtgcatgaaaagaaatggttttagtgtggcccatttgccctagtggtgtacttcaggagcggcaccctggtaacctcactaatgccatccccctcaaagtatttcgtgttaactattacatcaaccaaatatatattcactaattgtatttctctttcctcatcttatttttctcgttttatagccaactactacgttctcgtgttaccaaatattcgtaccactcccacagtcttcctgttcgctcgctatgacagcttgagggctataaataaaactctgttcatttattttttaaatgcctatcaaagcctttgtttgataacagttatagtcaagtaaaatttgagattttcgagagtttataactgctgttaaaaaaaactataagatgtattaatagccagttgaacagtagaatgattatgtctcaaaaaaaccttctcgaaataaaaagtaattttgccataggaaaacctaatgttgctataatcctgtatgtatatcagaaacgatattttcacatcctgtggagacactattgatgaatgtccttaaacaaatacaccagaatgcgttttttgatgaaaggatgggttctccacatacttgtacatattataaaaaaccttccttggatccctgtttgattcacacttcattaaaaaaaagctatctttttatgagttagctttattggtcaattgtcaaatatatgttatgggagtattacaataaaaataatagtacctactatgtatacaatttcctactaagcttaacagtcacctacttaaaaccataaaatctattattttaacaacaattttgtaatatcttcatttctttccatataatatgtcccttacgcgtatcccaatttacccaaatgctgaagccttcataaagctaaaaaagcaatatatatacgaaaagcaacaacagcaagaagaagaagaagcggcagcagcacgcagtaattttagaggtcaagttaaagaaaaaaaggtaatgtgaactatgtgccaataatgaaacagaagaactcaagttttagaaggcgtaaaatggaaggatacagcggaagaaaagattaacaaaagatcagccaaactggcgcgtaattcccgtgttgtaacaacagacgtattgtgtaaatcttgtggtgaaagcgggcattcatctgcgagaagcaagcaatgcaaaaaccataattacacaatacaagaagtaattgaaaaaaagatcggcctcaattatcaaagatacactatatccgtaccacttcgatcttttctccctataccagatgatgcgtttaataataccctgagaaaaatcaagagtttgtcgatgttccttagaaatgtgatgtatagggcacagctctttatcaaccactatatccttaaatacccagatggcttgccgaatgaattttttcaacaaaacttttggtattctttatgtcgattaataaatgaaaatatttcaattgatgtcttcaagcaaaagtattcttcccatattccttatcttgaagaagtatggaatgaactcagcggccttgaaggtgtcagtatggtagtaaataaagaaggtcttaccaactatggccaagatttatcgaccgcatgcgaaagtgttgcaacatgttacaacaatttttacatagaaaactttggaaatgttgttaatagctactgcatatacatgattcgtaaagaatttccggtaaatgaaaatttgaaatagacctttttttttctacaacgattgatactatcaattcataggacttgaagatgcctttgatcaaatacattgtatacaatcatgtattagagatcttgtttagcaccccatcatcaactttacctgaaaacattggaagttctgtagataaacagacccaagacaaaattcgaaactttctaaacccgttgattttagaaatcaaagaccgcttaccaccagctcctatcacaaaagagacattaaataacgcccctttcaacataatgcctgtttttagacatatattatcaaaatacgaatcaataattgacgcgaaccaacaaataacacccgtagttcaactaacagtggcttcacaacaacagcctaacttattacagcaagcagagggttcaaaccagccacgacagaggcccaaaaaaaagaaaaaagtattaaaaaatgaaaacccaagggagcgtaataataaagatagacagttccaaccaccgagactgttcagtttatttccgaatccaagcttaaaatggcggttcatcaaaattgatagtcaaaacctacaaggtatttttggaagaagaacccatcaacaacaggaagagactccttttgatttaacccaaaggtctttctttgaatgttttgacttcaaaaagttgaaaattaaaaggtaagctatgtaaaacgttctatgaatagtatgcatacttattttcaacatgaatagtctggtagaactacaatcaatgcatgaaaaaggcaggatgttcttaaacagcttctataccgatggttatacctgtagagtctccttttgtagaaaaagatatatcaactcacatttggataaagtcacactcacgctaaatgacttcaatagcgagagggttgagcagctatttcgaacttgcacagtagatcctaaccggaaggacgttttcacatcttaccatggagcaaatgatataaggcgtctctctagctctgaataccataatatgaacggagttgtcaatcgtcaaaaactagagcaagaacgaaagaagagagacaatattgaacatattgaaacaagaatcccttcacccaaaacaactaatgctgaaaactataaaaaacacataatgtatatgctccagcactttggaactttagtaaacttttacgattttcaaactgctagaatacggtggtcaaactatatagggaatcgaaaagctacagatcatgccatcaatattctgctaaacggttctacaaaatacaacaaaagcaggagaaaaaaaaccagacgaaacaaacgtaaaagaagaaaaacgaatagcaaatacgaacgagacctatcaaatactaagcactcaaaaaaagggaaacaagtgatgaggtacaacttacatttttatttttattttttatctagaagcattgatctttttattttttatagggctcacaaagaaaggtttgaagaaggagacagaaaaaagatgccaatgattgtatttggaaatggattgcaaaacaaatctcatgtcaaatacaaaggattgaggcgcggggtgactgataagttgtacaaacagctgaaattgcgtgaaaaatcgggtgaattgctactgcttgacatcgacgagtttaatacgtcaaaggtgaaataaatatatgctcattttgcacaagtattaataacgcatcacttcttttgtagatatgcaatgaatgtttcacgaaaaacttggagaatttgaagtgtgatggtcgtaaaatccatcaggtattcaactgcaaaaattgcaatatcttttggaaccgagacgtcctggcatcaaaaaatatgttcaccattgctacctctatttggagcggcaatggatgtcccaatgtctttcaaagacaaagcgccacctccaatgtggttgcctcgactcactccggtgagtcgacggcttaaagatgactgcaggtaagaagtcttcataaataaaaaaaaaaaagacaattctgatttccatataaaataggtaaacaaacttttaagctacagttgtgattcgtccaaaaaaaaactaacattttctaaacccataatattttttgtctcaactctatttttatttcatccaaaaagggtaagcaaagcgtctaacttaagtttttgatccgtctgaaaaaaaactgacatcatctgattttagactaaaatcctgtatgcatagatgtgatttatcataagacaatgaaggccatccaattgaatcaagtatcaattttgacccattcattcagcaactgagctatgaagacatccctatcactgcaatgaagaatcgacaattaaagatcatgttcagctttagcacaaattcacaaatcacaaatataaacaatagcaactggaaagcttttattaggagtcccatgcatcatatttccagaaatgtatggtacagacttcttcatagcaaattatccacccgatccaacttgcatagtcttatcccaacacttgtagaagatgaatcttgtcaactgtgtaaacttccagaaacagaacagcatatgctctttacttgcatacagaaacaagacatatggcaagcagttttcaagaaatacttatctaaccctaaagatcctcactgcagctcaatattccaggatttatctacacttaggctttccaagtattacatcctgcactaccatgacaagtttacaatatatgatttttttgccacagttattcgattcatttggaaagctcactggcaacaattctttgaacagacgcctattttggaagagattgtcatcaatcaaacccaaaaagaactattgaaactatctgcttacaattccttatgctaatatcttctgtattttcgtgacaagtcactgttttatacacttgcttcacatttaatcatctactctgatgagttttaataaacattaaaattttcatccataaaaaaaaaaaaatgtgatttataataaaaaaagaaaaaaaagaaaatacatgtgatttattactatcttttgtattttcgcgacaagtcactgtttaatacacttgtatcgctcttaatctttatcttctgatgagttttaataaatattgaaattctcatccataaaaaaaaaaatacatgattttattggactatgtacagaataaggtatttaatgcggataataactggaaggtggatgggaaaatctcttgttgacttcatcttcagtaagttttcttgttacaaatgaaatgtcactcattgttctctgagagtattgatttggatattgtcttcccattgttttaaatttgcgaacatgaatacacattacgagtaataagatcagtggcaaatagacgaataaactttcaagtagaatccatatagatatatgataatcatctcctgctccatagcgtatccagcccaataaacacatacccatcattgacattgagaacagtaaaggcacaatacgtaaaaagaatagatcatccctattttgacgaacgttaccaaaccttgagctcttccatattacaaagcaattaataatcgtaagaatccataaaattgtaatacagataggcattgccacgctttgtacggttgaagtagatatttgaataacaatacagcatacaataattatagcatagaccaacaaaacgattacgcttgtccaatagttccagggacgaagggaatgcctttcttgtgctcttgggaatccctccgacttttcagaatctcttaaatagatactacgccaacgttctcggttataaagcgcagcagctacgtgtcgaatgaataatatctgagcttccataattccaaggagcaccaagatggatatcacaggtaatacattcaacacaagacttttactggaccaatctgatgttaatgtgaatccataatgtgcgctaagcataacgattaatgctatacttgtcaagaggccaaaaaggacaaaaggaagtaataaaagattatgacaacagcgtgctgccaatatgatagaaagtacagcaaaaaatacagtataaattatccaagctacttcttgtgctgacaacatggataagaacagaaagaaaagaagaaactaaggaaaggatcatttgtttatgtaaaaaaaaaaaaaagcaatgctaaaaaacagctttctaaaaacaatagttttggccaagcctatcttttttccttttctagtaaagttttttgctcttccgtttctaataataagctataactctatttttatttttgacatctgatttttaattggttaaaataaaaataattaaaattcgggccaagactaagaaaagttgatgtcatgtccatttaacgaactctggtttatactctaattcatcaacaaattaaatttgaccatcttaaatctttaagcagagaggaagaagtcgatgattttaaaagctttatacaccattttcagaaagtaaattcgcatttttacaaactttataatgcaatatatacaaaaagcgttaagtaaacgcaatatttattcctgaaaatagtgtatgttttaagaaaaataaatagatgaaatggctatttcggacagtgattgattgagattattttctgtggttttatttattataatgcacacatcaaagagtagaaatcttctaccaaacttattgtcaccttctacaatgagttacacggaaacaaatagaaaaataaaaggtataatttacttatgttgtaggtgaatatagttagatttcaggtcgattatactaaacctgctaaagttttttatttttaaaaaaaaaattaaggtaaatcaatttgaaatgccccaggagaatattatctagtaaaaaaaaataatgtctaaaatggacatattctagttactcgcgttttgtttttgcagtacatttagataaacttgtacaagttaagcagctgtaattctataaaagaagcatgtacactatttattgagataaaaaataaatgcgctaaggcaattttttttctttaaatttttcttatgaaataaacaggctttaacattgggaaatcaaagaatttgaaggttttggagcaatattcttttaatttcaagtctagaaagaactattctatagaccataatcaataacaataacaaaagcaatggtttgtgctacttttcacaaaggctttgaattgtttcagccacactgaatttgcatgactacagtatgctgaaagtgaaatcagcaacatgttcaactcttgatatcaaattattctaattatttgaacataatgtttagtaaataagcaacaaggtattataggtatagccgcttctaatttgtttgtagtattaaactcgaataaaattcacaaactataaaaaaaaatgactgcattattgtaaataaagctgttaatgttaatccattgacaatggagagaaaggcatatatagcaaatataaatgcttatttctagtgacatcagctttcttttggcagctaaatgtttttaataatagtaattgaaaagtgtataaaatacaaataaaaaaagctgtaacttgttagctataaagttttaataataatttactaatgcaaggatgataatttactgaagggaaagtcaaagcttcatacaatatatagatttgtacaaattggccataaattaatgcagggttttgaattatacaaaatgctctaagcgtcagggcatgcaacacaatcacaatcgtcttcttctaccatttgattttttaattctctttccataatttctacataatcgccaactttgccttgatatggttgtaatctaagttcgtcatgaacaatggccaagcatgtagacaaatatttgtgaatacggggaatatattctgtgatctctggtggcatcattatttgcactttagaaatattcaataacaactgccaagcgttaatcaaaactcgcatgtcaaaataacagtcagtcgaccttgaccgaagatatttaattaagcgaacagtattgaaggcggcatgaactcctgttataacaatatgcttctgaatgtgggattcatgtggtcctagaaatgattctaccattgcaaagtattcttcatcagtaccttcaaaatcaatcttagcacgaagttctaatatcttttgtattcttctcctccattttctgctgatatttgcattttttggaatatttccgccattccaatgcatttttaataatttccattcattttcaggttgcggaattgctttagggaggtaagactgtgccatgataagccattcttcataaataactagtgtagtcaaaacaggtataacgctgtgggagcattctctttctaatgtactataaaattcttgacagctaatcgttgaatcaaacaaaggaagggacagtctaaactcaagtggtaaaactttagtgtaccaatgtctcattgccatctccacctgatgtccaattagacccacaaggtgatacaaatcacttgaataagcacacttgctagctttatgttcagttctttgtagaagtaatatgtacgaatgcatttgggcaaaccacttttcctgaattgagtcatcttcagcaatttcccattttccttcttcagagtgagttagtgtacagtaaggtagatttgtttcatcttttttcatatctggaagttgggcccttgtaatttcttcaaatgtctgtacacgacgcaaatgattcaacaagcgactaaaatgaacagcttctcctttctcttgtaaaaaagttgcgccttttcttttcatcttgaatatagccacatatttcggctgtaagaccactgaaattcgttcggccatatcagtatacagtttgcccttttcaaactcagaaatagtgagtgtgtagactgccatgaaaacgtaagcagtaaagctttccaagttgaattgatcaaatgaggcttctaaagcatcacgagcccttttaaagtaaaattttccatattcaaccaaagaagcagaaggtagacatcctgcaatatgtttacatcgcagtgtacagatagtagcacaaagagccattgcagcagcggattctcttgtgtcgagaaagcatctaataaacgtggggacatggatagctaactgttgaaaatgttgacaacgcaaataagcttgtatcaacttattggtcgtaacttgtatattttcaggtgaacatgcagtgactattgtatttacacttgacattctcggtgcagtaaaaatacgtattgattttgcgacgtttttacattgagttttaccatactttttgcgaatcaacataacaagttggtcgactatattatcctgtttaatgcaattttttattactggaggaatgcttgatccgtactccacagactgcagcacacaataaagattattaaacagatccgaataattgttgatatgcgtatcaatgcaaaagtctccttttttcacattaagcacccacggttgtgtttctctctctcctttttttaaaattgcctgtgtgccattatctaaaacagcaatcagctttgaatgctgggcaggttggcttgaaaagctgagagcggttgaaggtgatgaagggaactcatcagtcatacttccatcactgtcattagttaaagaaggtgtactacttccttgattcttcatgcgtttcattgttttttccatgtttgctatttcaatttctaacgactccgcttgctttaagagttctgtttgtattgcaatctgaatgaactcttcatcaacaggagaatgcgagcttgagtatacacaatcgatatcaaacttgtagcatctggatcgtatacctttgataagtaaagattatttgaatgcctaaattttaactaacctttcacagggttttaaaccattgcatttccgtttctgatttcgacactctaaattatattttaagcattttaattttttgattaatgtcctaaggcttatctaccttcgcatggaactttcttcattgtcatgcttaaagaaaaaaattcccaaaaagtaaaataattaatccgttactgcgtgtttataaactgtttagcctttaagccaatttctcttacagaatatgggaaaactattttgccgggcttattttaagtagaatgaactgtgattttttatattttattcgttgttgttgttatgctcctaccttgatagttataaagagacttatcattcaatggaataacaaatttcgtcttgtgatgaaaggattatctgcttatggaaacccatcgtgtattcaatttgttacagtgcaaacatgttctataccaaaagttaaaaacactaattgaaaataatcaacaatattgactatatatagcttcaaaatatatctaccggtttttatcgtctatttgcaaggagaattgatgctttaaaatatcgaaaaataaagctggaaactcatacctttaagaatttaacaacttatattccaagataaaaatatgcatgaagtatgtttttttctttacttactagcaattaactccaaagctgaaatttgcttaatcttaatagcattctttattgatgacataaataatgttcaggttggtgatagaagagcaggagttatggtagtaactcttcaatttgcgcttttatttattcaaaattacagaaaaataataaatgcacaaacatgcataccttatccttttcaaaccaagaaacgaaactttttttcatcacttttttaatttataataataaaaaaaattattcataaaatgaaaaagagtaataaagatacggtaggaccaaatatacattatcattttttttagttataaatatccagagttcatgtacttttcactatgtagatattattgtatacatttcgaagctgactatgtactatatatattatgcagtaagctgtatattaagtattatgaagacctattcataatttaatacaagaacgtgctcctgtatcgactgtttgctataacgttaaataagtccaaatttgtacacagttatacagttcaataaaaaaaataattatttgttattctgcaatgagctgctttatcaagtcagagaggatagagaaagaagagaaccggacagaaactaagaagcttgaatagtcaactaaaagaggacagtagagggtggcgttaaggatttgaagttatgaactgcaaataggacttaaaatagctgataagcaagaacgaaacaaagataagtaaagataggaatagacgtacagtctaatagagagaatgatacttgataattgactgatactttattaataactacaggtgtgtatttatacaaaagtcagaaacgcaatttgacaaaagaatgaactcagattattgagttttcagttaaaggatgttaagagactttaatgttattttcgagtttatatttaattctgatcaatgagtgatcttgccaaagtagtgaaaaccaaacaagtcagaagttatagaactttttagatagaagaaagaaagatgtcctttattaagtgtgttttttgtgtctatttatacactacctcaaaaaattgatcattttgaaccgccttttgctcattttgtaaattaactgcttcatattatttaggctagggggttttaggtaaaaggtagtataacaacaaagataaagaaatactgtgagggtatttctgggaagtcacagtctgactcagtctccagatttatcgtttttgggcgggattgagaatagtaaggaatttttttttttttttatggatgaacattttaatgtttattaaaactcatcaaagagtataaggattaagagcgatacaagtgtattaaacagtgacttgtcgcgaaaatactgtggtatttacacatgtaataaagtaataatgtaagttactacgaacaatggtcctccaaattaggaatatcggacattgtattacgccacttccaataaaatcccgatccactccagaatattctaataagttcctgatcaggattaataattacttcttgataagaagatgttaaactatgccaatcacataaataactcatcgtctaatatcgattaataatcaatacgcatacactgtaagtattattatttagccgtgattagaaaagtataaatacactcatatttttaacttgaataaaggacaatctactttgagtctcacttatttttatatttgttgattgacttagtactttttatattataaaacctcaaatatcacaaatacaaaagaaattagcatagagaagtgtgagcagatagtttcaatagctccttctggatttgattgatgacaatctcatccacgacaggagtctgttcaaataattgttgccagtgggctttccaaatgaagcgaatgactgtagcaaaaaaatcatagattgtaaacttgtcatgatagtgtaagatgtaatacttggataatctaagtgtggataaatcctcgaatattgagctacagttgggatctttaggatttgacaagtatttcttgaaggctgcgttccacaagtcttgtttttgaatacaagtcaagagcatatgctgctctgtttctggtagcttgcacaattggcagtagtcgtcatctacctttgctgggatgattctatgcaaattggcgcgagtggataatttcttatgaagaagtctgtaccataca

SEQ ID NO: 279 - DNA, 12680 bp, unidentified
  misc_feature 1..12680: note = Fanzor polypeptide
  source 1..12680: mol_type = other DNA
tatcttttattctgggaattcctcactgatttgaataacgttattttacgcgttatttcaattatgtgaaagattagaaatattcctgacattggattggatttggttattttagttgatacttcttcttatcaaagaactctcatgaatacgatacatattctaaaagaacatgtttaattggaattgattgtatgatcttatttaaataaacttatattttattttattttaattatgatcttgtattaagacttatatttattaatgtcaactacaatcagttactgttctacaacagttatttctctgtatcttaggtgcatgaaaagaaatggttttagtgtggcccatttgccctagtggtgtacttcaggagcggcaccctggtaacctcactaatgccatccccctcaaagtatttcgtgttaactattacatcaaccaaatatatattcactaattgtatttctctttcctcatcttatttttctcgttttatagccaactactacgttctcgtgttaccaaatattcgtaccactcccacagtcttcctgttcgctcgctatgacagcttgagggctataaataaaactctgttcatttattttttaaatgcctatcaaagcctttgtttgataacagttatagtcaagtaaaatttgagattttcgagagtttataactgctgttaaaaaaaactataagatgtattaatagccagttgaacagtagaatgattatgtctcaaaaaaaccttctcgaaataaaaagtaattttgccataggaaaacctaatgttgctataatcctgtatgtatatcagaaacgatattttcacatcctgtggagacactattgatgaatgtccttaaacaaatacaccagaatgcgttttttgatgaaaggatgggttctccacatacttgtacatattataaaaaaccttccttggatccctgtttgattcacacttcattaaaaaaaagctatctttttatgagttagctttattggtcaattgtcaaatatatgttatgggagtattacaataaaaataatagtacctactatgtatacaatttcctactaagcttaacagtcacctacttaaaaccataaaatctattattttaacaacaattttgtaatatcttcatttctttccatataatatgtcccttacgcgtatcccaatttacccaaatgctgaagccttcataaagctaaaaaagcaatatatatacgaaaagcaacaacagcaagaagaagaagaagcggcagcagcacgcagtaattttagaggtcaagttaaagaaaaaaaggtaatgtgaactatgtgccaataatgaaacagaagaactcaagttttagaaggcgtaaaatggaaggatacagcggaagaaaagattaacaaaagatcagccaaactggcgcgtaattcccgtgttgtaacaacagacgtattgtgtaaatcttgtggtgaaagcgggcattcatctgcgagaagcaagcaatgcaaaaaccataattacacaatacaagaagtaattgaaaaaaagatcggcctcaattatcaaagatacactatatccgtaccacttcgatcttttctccctataccagatgatgcgtttaataataccctgaaaaaaatcaagagtttgtcgatgttccttagaaatgtgatgtatagggcacagctctttatcaaccactatatccttaaatacccagatggcttgccgaatgaattttttcaacaaaacttttggtattctttatgtcgattaataaatgaaaatatttcaattgatgtcttcaagcaaaagtattcttcccatattccttatcttgaagaagtatggaatgaactcagcggccttgaaggtgtcagtatggtagtaaataaagaaggtcttaccaactatggccaagatttatcgaccgcatgcgaaagtgttgcaacatgttacaacaatttttacatagaaaactttggaaatgttgttaatagctactgcatatacatgattcgtaaagaatttccggtaaatgaaaatttgaaatagacctttttttttctacaacgattgatactatcaattcataggacttgaagatgcctttgatcaaatacattgtatacaatcatgtattagagatcttgtttagcaccccatcatcaactttacctgaaaacattggaagttctgtagataaacagacccaagacaaaattcgaaactttctaaacccgttgattttagaaatcaaagaccgcttaccaccagctcctatcacaaaagagacattaaataacgcccctttcaacataatgcctgtttttagacatatattatcaaaatacgaatcaataattgacgcgaaccaacaaataacacccgtagttcaactaacagtggcttcacaacaacagcctaacttattacagcaagcagagggttcaaaccagccacgacagaggcccaaaaaaaagaaaaaagtattaaaaaatgaaaacccaagggagcgtaataataaagatagacagttccaaccaccgagactgttcagtttatttccgaatccaagcttaaaatggcggttcatcaaaattgatagtcaaaacctacaaggtatttttggaagaagaacccatcaacaacaggaagagactccttttgatttaacccaaaggtctttctttgaatgttttgacttcaaaaagttgaaaattaaaaggtaagctatgtaaaacgttctatgaatagtatgcatacttattttcaacatgaatagtctggtagaactacaatcaatgcatgaaaaaggcaggatgttcttaaacagcttctataccgatggttatacctgtagagtctccttttgtagaaaaagatatatcaactcacatttggataaagtcacactcacgctaaatgacttcaatagcgagagggttgagcagctatttcgaacttgcacagtagatcctaaccggaaggacgttttcacatcttaccatggagcaaatgatataaggcgtctctctagctctgaataccataatatgaacggagttgtcaatcgtcaaaaactagagcaagaacgaaagaagagagacaatattgaacatattgaaacaagaatcccttcacccaaaacaactaatgctgaaaactataaaaaacacataatgtatatgctccagcactttggaactttagtaaacttttacgattttcaaactgctagaatacggtggtcaaactatatagggaatcgaaaagctacagatcatgccatcaatattctgctaaacggttctacaaaatacaacaaaagcaggagaaaaaaaaccagacgaaacaaacgtaaaagaagaaaaacgaatagcaaatacgaacgagacctatcaaatactaagcactcaaaaaaagggaaacaagtgatgaggtacaacttacatttttatttttattttttatctagaagcattgatctttttattttttatagggctcacaaagaaaggtttgaagaaggagacagaaaaaagatgccaatgattgtatttggaaatggattgcaaaacaaatctcatgtcaaatacaaaggattgaggcgcggggtgactgataagttgtacaaacagctgaaattgcgtgaaaaatcgggtgaattgctactgcttgacatcgacgagtttaatacgtcaaaggtgaaataaatatatgctcattttgcacaagtattaataacgcatcacttcttttgtagatatgcaatgaatgtttcacgaaaaacttggagaatttgaagtgtgatggtcgtaaaatccatcaggtattcaactgcaaaaattgcaatatcttttggaaccgagacgtcctggcatcaaaaaatatgttcaccattgctacctctatttggagcggcaatggatgtcccaatgtctttcaaagacaaagcgccacctccaatgtggttgcctcgactcactccggtgagtcgacggcttaaagatgactgcaggtaagaagtcttcataaagaaaaaaaaaaaagacaattctgatttccatataaaataggtaaacaaacttttaagctacagttgtgattcgtccaaaaaaaaactaacattttctaaacccataatattttttgtctcaactctatttttatttcatccaaaaagggtaagcaaagcgtctaacttaagtttttgatccgtctgaaaaaaaactgacatcatctgattttagactaaaatcctgtatgcatagatgtgatttatcataagacaatgaaggccatccaattgaatcaagtatcaattttgacccattcattcagcaactgagctatgaagacatccctatcactgcaatgaagaatcgacaattaaagatcatgttcagctttagcacaaattcacaaatcacaaatataaacaatagcaactggaaagcttttattaggagtcccatgcatcatatttccagaaatgtatggtacagacttcttcatagcaaattatccacccgatccaacttgcatagtcttatcccaacacttgtagaagatgaatcttgtcaactgtgtaaacttccagaaacagaacagcatatgctctttacttgcatacagaaacaagacatatggcaagcagttttcaagaaatacttatctaaccctaaagatcctcactgcagctcaatattccaggatttatctacacttaggctttccaagtattacatcctgcactaccatgacaagtttacaatatatgatttttttgccacagttattcgattcatttggaaagctcactggcaacaattctttgaacagacgcctattttggaagagattgtcatcaatcaaacccaaaaagaactattgaaactatctgcttacaattccttatgctaatatcttctgtattttcgtgacaagtcactgttttatacacttgcttcacatttaatcatctactctgatgagttttaataaacattaaaattttcatccataaaaaaaaaaaatgtgatttatcataaaaaaagaaaaaaaagaaaatacatgtgatttattactatcttttgtattttcgcgacaagtcactgtttaatacacttgtatcgctcttaatctttatcttctgatgagttttaataaatattgaaattctcatccataaaaaaaaaaatacatgattttattggactatgtacagaataaggtatttaatgcggataataactggaaggtggatgggaaaatctcttgttgacttcatcttcagtaagttttcttgttacaaatgaaatgtcactcattgttctctgagagtattgatttggatattgtcttcccattgttttaaatttgcgaacatgaatacacattacgagtaataagatcagtggcaaatagacgaataaactttcaagtagaatccatatagatatatgataatcatctcctgctccatagcgtatccagcccaataaacacatacccatcattgacattgagaacagtaaaggcacaatacgtaaaaagaatagatcatccctattttgacgaacgttaccaaaccttgagctcttccatattacaaagcaattaataatcgtaagaatccataaaattgtaatacagataggcattgccacgctttgtacggttgaagtagatatttgaataacaatacagcatacaataattatagcatagaccaacaaaacgattacgcttgtccaatagttccagggacgaagggaatgcctttcttgtgctcttgggaatccctccgacttttcagaatctcttaaatagatactacgccaacgttctcggttataaagcgcagcagctacgtgtcgaatgaataatatctgagcttccataattccaaggagcaccaagatggatatcacaggtaatacattcaacacaagacttttactggaccaatctgatgttaatgtgaatccataatgtgcgctaagcataacgattaatgctatacttgtcaagaggccaaaaaggacaaaaggaagtaataaaagattatgacaacagcgtgctgccaatatgatagaaagtacagcaaaaaatacagtataaattatccaagctacttcttgtgctgacaacatggataagaacagaaagaaaagaagaaactaaggaaaggatcatttgtttatgtaaaaaaaaaaaaaagcaatgctaaaaaacagctttctaaaaacaatagttttggccaagcctatcttttttccttttctagtaaagttttttgctcttccgtttctaataataagctataactctatttttatttttgacatctgatttttaattggttaaaataaaaataattaaaattcgggccaagactaagaaaagttgatgtcatgtccatttaacgaactctggtttatactctaattcatcaacaaattaaatttgaccatcttaaatctttaagcagagaggaagaagtcgatgattttaaaagctttatacaccattttcagaaagtaaattcgcatttttacaaactttataatgcaatatatacaaaaagcgttaagtaaacgcaatatttattcctgaaaatagtgtatgttttaagaaaaataaatagatgaaatggctatttcggacagtgattgattgagattattttctgtggttttatttattataatgcacacatcaaagagtagaaatcttctaccaaacttattgtcaccttctacaatgagttacacggaaacaaatagaaaaataaaaggtataatttacttatgttgtaggtgaatatagttagatttcaggtcgattatactaaacctgctaaagttttttatttttaaaaaaaaaattaaggtaaatcaatttgaaatgccccaggagaatattatctagtaaaaaaaaataatgtctaaaatggacatattctagttactcgcgttttgtttttgcagtacatttagataaacttgtacaagttaagcagctgtaattctataaaagaagcatgtacactatttattgagataaaaaataaatgcgctaaggcaattttttttctttaaatttttcttatgaaataaacaggctttaacattgggaaatcaaagaatttgaaggttttggagcaatattcttttaatttcaagtctagaaagaactattctatagaccataatcaataacaataacaaaagcaatggtttgtgctacttttcacaaaggctttgaattgtttcagccacactgaatttgcatgactacagtatgctgaaagtgaaatcagcaacatgttcaactcttgatatcaaattattctaattatttgaacataatgtttagtaaataagcaacaaggtattataggtatagccgcttctaatttgtttgtagtattaaactcgaataaaattcacaaactataaaaaaaaatgactgcattattgtaaataaagctgttaatgttaatccattgacaatggagagaaaggcatatatagcaaatataaatgcttatttctagtgacatcagctttcttttggcagctaaatgtttttaataatagtaattgaaaagtgtataaaatacaaataaaaaaagctgtaacttgttagctataaagttttaataataatttactaatgcaaggatgataatttactgaagggaaagtcaaagcttcatacaatatatagatttgtacaaattggccataaattaatgcagggttttgaattatacaaaatgctctaagcgtcagggcatgcaacacaatcacaatcgtcttcttctaccatttgattttttaattctctttccataatttctacataatcgccaactttgccttgatatggttgtaatctaagttcgtcatgaacaatggccaagcatgtagacaaatatttgtgaatacggggaatatattctgtgatctctggtggcatcattatttgcactttagaaatattcaataacaactgccaagcgttaatcaaaactcgcatgtcaaaataacagtcagtcgaccttgaccgaagatatttaattaagcgaacagtattgaaggcggcatgaactcctgttataacaatatgcttctgaatgtgggattcatgtggtcctagaaatgattctaccattgcaaagtattcttcatcagtaccttcaaaatcaatcttagcacgaagttctaatatcttttgtattcttctcctccattttctgctgatatttgcattttttggaatatttccgccattccaatgcatttttaataatttccattcattttcaggttgcggaattgctttagggaggtaagactgtgccatgataagccattcttcataaataactagtgtagtcaaaacaggtataacgctgtgggagcattctctttctaatgtactataaaattcttgacagctaatcgttgaatcaaacaaaggaagggacagtctaaactcaagtggtaaaactttagtgtaccaatgtctcattgccatctccacctgatgtccaattagacccacaaggtgatacaaatcacttgaataagcacacttgctagctttatgttcagttctttgtagaagtaatatgtacgaatgcatttgggcaaaccacttttcctgaattgagtcatcttcagcaatttcccattttccttcttcagagtgagttagtgtacagtaaggtagatttgtttcatcttttttcatatctggaagttgggcccttgtaatttcttcaaatgtctgtacacgacgcaaatgattcaacaagcgactaaaatgaacagcttctcctttctcttgtaaaaaagttgcgccttttcttttcatcttgaatatagccacatatttcggctgtaagaccactgaaattcgttcggccatatcagtatacagtttgcccttttcaaactcagaaatagtgagtgtgtagactgccatgaaaacgtaagcagtaaagctttccaagttgaattgatcaaatgaggcttctaaagcatcacgagcccttttaaagtaaaattttccatattcaaccaaagaagcagaaggtagacatcctgcaatatgtttacatcgcagtgtacagatagtagcacaaagagccattgcagcagcggattctcttgtgtcgagaaagcatctaataaacgtggggacatggatagctaactgttgaaaatgttgacaacgcaaataagcttgtatcaacttattggtcgtaacttgtatattttcaggtgaacatgcagtgactattgtatttacacttgacattctcggtgcagtaaaaatacgtattgattttgcgacgtttttacattgagttttaccatactttttgcgaatcaacataacaagttggtcgactatattatcctgtttaatgcaattttttattactggaggaatgcttgatccgtactccacagactgcagcacacaataaagattattaaacagatccgaataattgttgatatgcgtatcaatgcaaaagtctccttttttcacattaagcacccacggttgtgtttctctctctcctttttttaaaattgcctgtgtgccattatctaaaacagcaatcagctttgaatgctgggcaggttggcttgaaaagctgagagcggttgaaggtgatgaagggaactcatcagtcatacttccatcactgtcattagttaaagaaggtgtactacttccttgattcttcatgcgtttcattgttttttccatgtttgctatttcaatttctaacgactccgcttgctttaagagttctgtttgtattgcaatctgaatgaactcttcatcaacaggagaatgcgagcttgagtatacacaatcgatatcaaacttgtagcatctggatcgtatacctttgataagtaaagattatttgaatgcctaaattttaactaacctttcacagggttttaaaccattgcatttccgtttctgatttcgacactctaaattatattttaagcattttaattttttgattaatgtcctaaggcttatctaccttcgcatggaactttcttcattgtcatgcttaaagaaaaaaattcccaaaaagtaaaataattaatccgttactgcgtgtttataaactgtttagcctttaagccaatttctcttacagaatatgggaaaactattttgccgggcttattttaagtagaatgaactgtgattttttatattttattcgttgttgttgttatgctcctaccttgatagttataaagagacttatcattcaatggaataacaaatttcgtcttgtgatgaaaggattatctgcttatggaaacccatcgtgtattcaatttgttacagtgcaaacatgttctataccaaaagttaaaaacactaattgaaaataatcaacaatattgactatatatagcttcaaaatatatctaccggtttttatcgtctatttgcaaggagaattgatgctttaaaatatcgaaaaataaagctggaaactcatacctttaagaatttaacaacttatattccaagataaaaatatgcatgaagtatgtttttttctttacttactagcaattaactccaaagctgaaatttgcttaatcttaatagcattctttattgatgacataaataatgttcaggttggtgatagaagagcaggagttatggtagtaactcttcaatttgcgcttttatttattcaaaattacagaaaaataataaatgcacaaacatgcataccttatccttttcaaaccaagaaacgaaactttttttcatcacttttttaatttataataataaaaaaaattattcataaaatgaaaaagagtaataaagatacggtaggaccaaatatacattatcattttttttagttataaatatccagagttcatgtacttttcactatgtagatattattgtatacatttcgaagctgactatgtactatatatattatgcagtaagctgtatattaagtattatgaagacctattcataatttaatacaagaacgtgctcctgtatcgactgtttgctataacgttaaataagtccaaatttgtacacagttatacagttcaataaaaaaaataattatttgttattctgcaatgagctgctttatcaagtcagagaggatagagaaagaagagaaccggacagaaactaagaagcttgaatagtcaactaaaagaggacagtagagggtggcgttaaggatttgaagttatgaactgcaaataggacttaaaatagctgataagcaagaacgaaacaaagataagtaaagataggaatagacgtacagtctaatagagagaatgatacttgataattgactgatactttattaataactacaggtgtgtatttatacaaaagtcagaaacgcaatttgacaaaagaatgaactcagattattgagttttcagttaaaggatgttaagagactttaatgttattttcgagtttatatttaattctgatcaatgagtgatcttgccaaagtagtgaaaaccaaacaagtcagaagttatagaactttttagatagaagaaagaaagatgtcctttattaagtgtgttttttgtgtctatttatacactacctcaaaaaattgatcattttgaaccgccttttgctcattttgtaaattaactgcttcatattatttaggctagggggttttaggtaaaaggtagtataacaacaaagataaagaaatactgtgagggtatttctgggaagtcacagtctgactcagtctccagatttatcgtttttgggcgggattgagaatagtaaggaatttttttttttttttatggatgaacattttaatgtttattaaaactcatcaaagagtataaggattaagagcgatacaagtgtattaaacagtgacttgtcgcgaaaatactgtggtatttacacatgtaataaagtaataatgtaagttactacgaacaatggtcctccaaattaggaatatcggacattgtattacgccacttccaataaaatcccgatccactccagaatattctaataagttcctgatcaggattaataattacttcttgataagaagatgttaaactatgccaatcacataaataactcatcgtctaatatcgattaataatcaatactcatacactgtgaatattattatttagccgtgattagaaaagtataaatacactcatatttttaacttgaataaaggacaatctactttgagtctcacttatttttatatttgttgattgacttagtactttttatattataaaacctcaaatatcacaaatacaaaagaaattagcatagagaagtgtgagcagatagtttcaatagctccttctggatttgattgatgacaatctcatccacgacaggagtctgttcaaataattgttgccagtgggctttccaaatgaagcgaatgactgtagcaaaaaaatcatagattgtaaacttgtcatgatagtgtaagatgtaatacttggataatctaagtgtggataaatcctcgaatattgagctacagttgggatctttaggatttgacaagtatttctt

SEQ ID NO: 280 - DNA, 20819 bp, unidentified
  misc_feature 1..20819: note = Fanzor polypeptide
  source 1..20819: mol_type = other DNA
agccgtaacatagaagtctggtccaccaacaacgacttcgatgttcattggcacttggcgctccttggtccattcgtccatgacgccgcatcccaaatccttcccgtccgattggagtttaacttccactgtactgtcattgtagaccctgcggaagacaaataggttgataaagcaaatgattgagattcagattcagattcaaaatcagattcagatatagagaaaaaccaaactcagaatacccatagtcctcccgatcataatcgggagcagtgtcaaacccaacgagcaaatgattgagaaaaccaaattcggaatacacacagtcctcccgatcataatcgggagcattgacaaacccaacgagcgaatgattgataaaacaaaactcagaatacacacagtcctcccgatcataatcgggagcactgacaaacccatcgagcgaatgattcagaaaacatgtgctcggcatacccatagtcctcccgatcataatcgggagcattgtcaaacccaacgagcgaatgattgagaaaacctaattcggaatacacacagtcctcccgatcataatcgggagcactaacaaacccgacgagcgaatgattcagaaaacatgtactcggcattttttttttttttttttttttgtactcggcataccaatagtcctcccgatcataatcgggagcattgtcaaacccaacgaacgaatgatagagaaaaaccaaactcagaatacccatagtcctcccgatcataatcgggagcagtgtcaaacacaacgagcaaatgattgagaaaaccaaattcggaatacacagagtcctcccgatcataatcgggagcattgtcacacccaacgagcgaatgattgagaaaaccaaatttggaatacacacagtcctcccgatcataatcgggagcactgacaaacccaacgagcgaatgattcagaaaacatgtactcggcattttttttttttttttttttactcggcatacccatagtcctcccgatcataatcgggagcattgtcagacccaacgcacgaatgattgagaatacccaaactcagaatacccacagtcctcccgatcataatcgggagcattgtcaaacccaacgagcgaatgattgagaaaaaacaaactcagaatacccacagtcctcccgatcataatcgggagcattgtcaaacccaacgcgcgaatgattgagaaaaccaaactcggaatacacacagtcctcccgatcatagaaaaatcaatcctaaaacctgtcaaagaaaacttgatccaccgaatgcctagacggaacaggcaaaagggctaaattcttctgggctgtgacatttcatcagtcatgctatgcaagtcaagcaggcctcaactacacatctttgctttacctattgcagtactgggccactaaaacaaacctagtaaataggtaggtggccgaggtgggcaagaacacagtaaaatagaagaactgcaggtgtacatgatccatatgtcagtgtcatgttaagtaccaatcacaacataaacacccaaccacactcccggcaaagattaaccaataaacaaggcaacctgttggcaagcagtaacttggtcaacacaggcacaaggcagctaagtctgggctacaattgcagtctaccactacaatgcaattcataaccaaaccagacgctatggaaatcttggaacggtagctaaggatgcatgccatatgggtatgcagtactgtccgccattactctgacgcaggtgcaagcgggtaaccatcatgcaggtaggcaggcctcaggaaggtgcaggcgggtgcagagctgttcgccagtactccggcgcaggtgctggcccggcgcgtgtcctggtctggtctggcaggtgcaggcgggtaaccgccatgcaggtaggcagacctatccagtgctccgagcgccagtgctcctggctatctgcccagcatccaccagagaaggtgctaatcaggacagtgacagtgaaatgcattgcgcaaagggtgcgagagttagaagcaactcgggggttattcacaaccacccggtgctaatgcagatgcgcagcaaggcgatgcagaaagcgaaaggcaaagcagcagatcatgagaacagagctgaagtgaattcccatagcagtgaaatgcattgcgcaaaaggtgcgagaattaggtgcaactcgggaccatgcagggccatccggtgctaatgcggatgcgcagcaaagcaatgcaggatgcgaaaggcaatttgcgcaaggcatgaaaggaggtgaaagcgcaaggcattaaaagaggtgaaagcgcaaggcatgaagcaaagccttaccgacttatcaaaacagtctttcatgcatgcgcagcaagggggggcccggcaaggggggtcaatcaatgcacatcaaggggtcatgcaaaggggtcaagctgccagagaaggtgctgggcatggcaatcaatgcacagcaaggagtcatgcaaaggggtcaagctgccaatccattgagaaggacaccaaggcagaggctgtgcaatcggatggagactttgtgtattgtgagataaataattatgagcaatgcgttcaagactttgtaaacagctttcaccttcctcttgactgtcctctacaattgattttgtattggaatacttcgaaggaactttttctctctccaaccgagcaaatcaatgttacaattgaaattgaagggaatagtctctttctccggaatgcaacaaaacaatcttacataataaattgtaagatattttcgtaaaatacaccaaaaaagcaaaatcaatcaatttgcgaaaacgatcttacaaaataaattgtaagatattttcgtaaaatacaccaaaaaagcaaaaccaattaatttgcgaaaacgatcttacaatatttatcgtaagatttcagtaaaataaaaaatccgttcggaagcaggaacgcccattaagttgcacgctggccagaagttaagggctagcgtggacgcttctgggggggtgcttgtgcttgccaacgacggtgattcgcgtttcccactgacagtcagtggagatgcaccgtcggacctcgtgcaggcggcgtttggatcctcgatatcgaggccgcctgtagctccgttgccaagttacacgggaatgcgtttggagagcgggggtggggacttggtgattctaggtggcgaggggggtggcgtgatgcaggtgtccgacgttggcgtcgccttggatctgaaccctgcaggcgggcttgtgcgtgtgaacggtgtgccgattcagtcgacgtcggacgggcgccagaagacgaatcgctcggatcttttgggtacatcgtctgcggacattttgcggaggctgcgtccgtgcacgtacacccaccgtggcgtggtggaggcggggttcatagcacaggaggtgttctgcgaggtcccggagatgcgtcacctcatctcactccctagagactttgagatcgatgacgacaacacgcttggcaatgcaccggtcgggtcagtgggtttgaactatgtgggcattatcgcgtacctagtgagcgcgatgcaggagcaagcaaataagatagaggacctccaggcgagaatagccaagtagttcaaggcatgtagagacacatattacgagtattgggactcgtcacggcaggacttgtatcgcagtcaaggttggatactgagaaaaccttacgatcaaaagagaggatgaagataaagatgcagatgattcgcattcggaagagaattttttacctcaagaaagaatttagggaccagacaacaaatttcttggccgctcgctacgatgtgttgttggtacctcaattggatacggcgaagatgacaatcagtgctgaacgggagctgacaaccaaggtttcccgtcagatgctgactttgagccactctgtgctgttcaatcggctgaaggagaagtgtgaagagtacgggattgtgttcttgcatgtgcttcattacacaagtcagacatgccctatgtgggtcatatgtgggattaaaaaaaaaaaactggaaacttggaacaatccagagtacatgacagtcttgtgaacaggccatccgtcaatgaaatcttcaagatcggaatcgtctacgacttttaaagatcatcttggaacaatccagagtaatccaggacagtcttgtgaacaggccatccgtccatgaaatcttcaagatcggaatcgtccacgatgcttcgaaacatccaacatactccgtagctgcgtgagaatcctgaatgctgattccaagccttcacacacaggacaggaggagcgttggccatcgcacagagggaatcgatagcttcgaacgcatggtagccttcggcattgcaatcaatgtagacacaatgcgtcacactatcgtaatccatacacaatgatgcggagttacacacgttttcgatgctcttgcacaaaattaggggcgcaagttgtggagtaaatcctatgtcaaccagcgtctccagcatgtgagagtaatattgatccattgtgaatgaatgtatgtcagttagttctgtcatcataatccaatcaattttttgtacaacaaccaccgaatacaatgcagtacaatacagtacaatacagtacagtacagtacagtacagtacaccgtcctccagagtgtgcagtccgaaaaagaagggcgcatggttcgaggcttgctatggtgcagttccaccatggaagttgtggtaggacgcaaaatattaccattttttttcaaaacaacctataaagagagatgatcacgttttcagaagtatctgttcgttcacttgccacttctaatattgtgaacgccccctaccctcctctgtcgggtatcagagcacagtcaggcacttcaggacttccaaccctatctttcgctaactctcctgacaccgggttgttcaatccaagtgtggggacgctaggtgtggttgccgggggagcagagctggtgcgagtgtcaaacaatgtatctgtgttggcggatatagtggtgtcgtcaaacattatccctgtgaagaacgcgacgcagcacatcgggtcatccaacatgcactggattgacacgttgcacatatcctcgaacacgttgtacgtgggcgacacgctcgtcctcggcattgacgcccagaccttggccatgagcgccggccccggccagggcatctctatcacgaccaccggcgctggcgagacctcgctcgcgtccgaggagggtgtcaacgtgacctcggtcggcggcgtcagcatgcatgtcaccggcatcgacaaggttgtagacatccagtcgactggcgcaggcggcattgtgcagctgggcgcgaccaaagaggtggtcttgaccgcgcccacggtctccacggtctctagcaacttgaccgtcaacggaaccaacttcactgcgggaatccgcgcgaattccggttctgccggagcgccttcgctgtctttctcgaatgcgaccgacaccggtttgttcaatccaagtgtggggacgctaggtgtggttgccgggggagcagagctggtgcgagtttccaacaccgtgagtgtgatgggagatctcgtggtgtcctcgaacattattccttccgcaaacgctacgcagtacatagggtcatcgaccatgcacttcaaggaggcgtggatcgacacgctgcacatatcctcgaacacattgtacatcggggacacagccgtgctcggaacggatgaccagacagtgtccatccgcgcggaccctggtcaaggcatctcgattacgaccacaggcgtgggcgagacctctttggtctccgaaagcggcgtcaacgtggtggccggcggaggagtgaacatgcaggtcaccggactcaataaggttgtggacatccagtcgagcggtgccggcggcaccgtgcaactcggcgcgacaaaggagatggtcattaccacgcccatcaccacggtctcaaacaacctgaccgtgagcggaaacctgaccgtcaacgggtccaatttcacgtgaacacccagaccgtaactgtagaggataacatcatcgtgctcaactccggcgagatcggacccggtgtcacaaagggcgaggcaggtatcaccatagacaggggagacgcgctggactaccagatcctctttagggagtccgacgacaagttcgtcatgggccctcaaggttcccttgtcccaatcgccaccgagaccttcgcggcaaacgctggtaatatatctacaggcgttcttggagtgaccatgggcggcaccggcgtctccgcgagcaccggaaccgggagcaacgtgttgagagataatgctacgatgagcaacttgacgaccataggaggaatgatcagcggtaacggtagcggacttaccgccttgaacacaaacaacatatccagtggaacattaccggttgttagaggaggaacgggggtctccgtcagtaccggaagtggtagaaatgtgctcagtgacaactccacgatgagcaacttgacgaccataggaggaatgatcagcgataacggtagcggacttaccgccttgaacacaaacaacatatccagtggaacattaccggttgttagaggaggaacatgggtctccgtcagtaccggaagtggtagaaatgtgctcagtgacgacgccacgatgagcaacctgaacatcgtaggagggatataccagaacggagtaccatttaaggtgggcggtggctttgatgacggaacggttgggtttccgtccattacattcacgtctgattcaaacaccggtttgtttagacttggtgcggataaaattgggttcagcaccgggggggtgtcgcgtgtaactattttggataacggaaacgttggtttttctacaaacgcacccgtatcaagagtgcatgttgtaggcgatggatatttcaatggcaacgtgatcgctaccagcaacatcatcggtttcagcacaatggagtccgattctaacgtcaagcaccacttcgagcccatcacggacgcgctggacaagatcgacgcgatcggcgcgtacaccttcgagtaccgtggcgacgatagccgcaagaggcacgccggagtcatcgcgcagcaggtgcaacgagtccttccggaagtcgtaagcgtgcacccgcttaaggacactctcacggtcgcttacggcaacttgtcatcgttgctgctggcgggtgtccaggaactgcgcgacgaattgaacaacctaaaagaggaactcaaggaaatccgtgaatcgctcgccccgcacacacaatgaaaggattatagcaatatttaattgtatatcgcttgtaaaaagaacccttatggacgtgggacatactctgtcaatttcttataatgcattggaaaccatacagttgttctcaaataattttgggacactcagtataatttgaatgatatcccctgaaaccaggtacaggtccgtggttcactacaaatattttttgaggagtctcaggaaggtttgtaatatatacaacgtttccaagagctcactacatagatgggtcaatgctgatcaggtgggtaaaagtaagcgtttaaaacgaaaaaggaaagaattgtccatgcttttacgttccacgatatccaataatattgcagagaaccccttcataacatgcaaggatttggtcggtataatttgcaagagttgtaatgtgagattatcgatcagtacggcatcgagacacataaaacaatgtggattttctaggaagaaggcgtttcccacagttctctacggacattcaaaagaaaatgtagaaatgttttgtgacaagtacagagaaagctctaacgttgtttgtatcgacgaagcaggattttacgctggcgaacacagcaaatatggatacagcaagatcggttctagattaactacgaagacaatgagtaacctccgtcgtgtgaagttcactttattactcgctatttcatctcaggcaataatagattatcagttattggagcacaattgtaaaaaagaagatttcattaaattctttaaaactttggtcatcccaaagaacaccacgatcgtcatggataatattcggtttcaccattcttcagaaataaaggatatatccgaatgcaaagggtggaagcttttgtacacccctccttattgccccagagctaatgcgattgaacaaatatttggaagcatgaagagagactacagggcatcatgtccattgacgtcaacctgtaatttcgattacttaatgcaaatatgttgtgttctagaaatgtggaggtataaagacttttcaaaatatatgattaatatgagagattgggttaggaatgttcgagagagcctgtctgcagatccagattacatcaaaacgttttcggggtacaatttgtgatggagaatgggatcggcgagtcatcatcgttggtacatgaggctgaccaacatgatgacattgcagaacttgtcgattatgaaggggaggaagacgaggagtgtgcacctgggcgagcgatttgtgtggtcaagatgaaattgagtacctttattccccatgattggcttcgtaaaaagatagacacactggtactggacatgaacaagttgcttggagagggttatattttcgcaaatttccacattgctcgtctttttgagaatggtatcgctgtccctcctgtaaatcgcaacttcttctaccggtgccttattgcagtcagtaccaacaaatgtaaggggtccactcttggcgaagacttcgagagtagtcggcttctgttcgacttgttaagagagccggggcaatccaaagttgacattcgggggaacgtgaagaaccagatcattgcagacctgtctattctcatggccacaatggcctctaaccatctttggaccaaccttgagcgacgcataacgacttacttgaagtggaagtacccacagattgcaaagcgcctgcggtcggacatcgtggctgcagtgatcaagtgccctacaaagaatctcgacgtcatcttcaagatgagccctcatacaaccaagctgccaaccaagctgccaacagctagacttcgatcggcaaaaagtgcagttgctcttgcgaagaagagggtcggtaggaaagaaccagaaggatcccctttgcgtgttaggttgactaaacttcaagagaggcttgaaaagttgagcgaagcttggctctcctcgaagaaccttagggtggacgcagataacgcgaaacgcttctttgcacgcgacgtggcattctgtctcaggggggttctacctttaccatccggaaacacttttgcgtctcgggctcacatgaccctgcctctgtaccacaagatattgttggagaccatcgaagaaaaacgaaaaacgaaaaacgaaaaacatcgcacattctcgttgttgccttacaaatctggattcactctgtcgcacattccgatttcgaaaatggcctttttctatatggtcaacgagtgccacttcgattcatgcaaggcagacgttgcttccaaaaaccatcaaggaatatgggagcgcttcgcaaacctcaagaaagtggagacagtttctcggaagttcggttaccgcattgtgacaaacggctttgcagtcagcatcttgatgaataagcctacgtgtctgacatgttcgatgcctgcagacgcgttctctacgcgggcgcatgagtatgtgacaacagacgagggtggcattgtatccttccttgacaatgtggtcgtggctgcggtagacccgggtgttactgatatcgtgactgtaacaggactcaacggaggtaccagatcgtacagctcggcgcaatattatcgcaagggtctgatcttcaagtctcagcgtcaaactgacgtttgaaacctcgagacggctgatatcgtcggtggtatcattccggatagagactcttcgagttctgaacagattggtgcgtacgccagattctacatgggtgccgccccaatccttcttgcccatcgtgcttccagggggtaccgaaacctccgctttcgcaggtactgcaagaaacagaaactcattgttgagattgctgactttgtagctccgagagagaagagcgctaaggtactcgtcgggtttggtgattggaaaggtctgggggcgacgccaatctctaggcggacttgtggccctctccaagctattcgtttcgagcttcgtagccgagaaaacgacatcatggaggacatcgatgagttcagaacatctcaacgatgcagctgctgtgagaaccacctttgcaacatggtggcactcactcatcgtaagaagcaagacggtacaagttgggaatgtacagaaggacgcaagcggattcataagattctccactgcaaaagcagtcaaagcggagcgccacgccaacagagcggtggtatgcttcactgcgggaagacttgggaccgcgatgtgaacgcttccaggaacatcctgatgcttacacttcaccaagtctttgggagagagcgtcctctcgcgtttcgccgagacgcgccgagaagttcctcgacaaccccacccccaccccctgatactgacatggggacacagacggttgaacggtttaccaaagaggctactcggaatatctttgagaacctcttcaacctgctgcaccccccaacgttgcccaaaagcaacgatctgcagtctggatgattataaggtgtcccactttatttgagaacaactgtaacaaacattggtgtaaataatacaaacacattatttgtatgcgaagtggtcttaccatcaacatatgctgaagattgtgtactcttcgagaacggaggcacgtcctactgagcttacgtcggtgtgcgggacgtggcgtccggaattcccaaacttcgggttagaggtggatttgtaggaggcacagtaccacatgcaaatatcgtgtacgtcgatgtatacccgatccctgcggacgatttgacgcacgagatagcattcgaattcagaacagatcccacggaaggagtacgtgtctggatagacgggactttgtacggcgaagccacagggtcttttcacagtggtatatggtcgggtagtgggcctggttcattcggaatggttaaagatggtggtcccatgggagagtcgtcgaacccttggccagttaccatcacaaagccgctaaggaggtacgataaccagctcggatggctctctgccatggaggccaatctcggaactcccgactacgtatacagcgggccgtcaacgttcgagtcattgactcttgccacggacaccatgttctcgatggatgttgtcattcccacaaactttgctagcagctgcattttgttcgactacggaggatctgaatacggtctctatataggcgtagtccgatctcaggtggatggaagcacagtaatgcgtgtggttgcaagcaacatttctacagtggacatttcggattttccgagggacggtcgttggcacaatatagcatttagttaacagaagaaggataacgatattgacacgtcacgtgtgtggatagatggggtacttaaggttactagtacagtggaacttggggcctttatatcagggtcagatggaggaggattcggtttgtttaacaacaccgtgaagaatatgcaggacacgacaccatggccttctagtttgcgaacaattcgcatttacctaaacgagaccggctgtctacccttgtttggagctctgagttttgcagacatcgctcacgagtacgggctttcgaccacgcaaccagtcgcgctagacagcttctaccaaaatcgacctgcaatcaccactggaatatgggacacacgaagatccgctcttgcacgtagggcgtttgtaggtcgattggggacaccgaacgttccatcggatggttcattgtccctccttgcattcaggggcggaaggagaaagcctcctgcattggcgcgcgagatagtgaccgtgcctccgcagatgaatgggttcgcggaggacgttgcgacagagctttttgctgcatcatttgcgaataccacacaagcgcagatggaatctgacggatggatattcaatactgataatgtgttgacatttgaaagtacgtttgctcggtctaataggtctggaacaatttcctcgcctccagtgatagatacgctatcgggtgttggatcagtatcgttgacattattcggttcgtctttggaaggagacgagagagtaacgtttcgggtacaagatgtgtcaaacggaaatgtcattgaactcgatagaacaacaatcgagacaacgagtacgacttacaaatacgatctgcgagatctagattccagtgtggtcgatatttacaaccccaagggagttaaactcattgctatcttagccatgggtataaccgacggctatcatcttgaaagttttagtgcgtcgaagattgagaactacgtttgtgccgccagcacaaacagagcagggtggttattagcttggaatgtgttcgaccttaacaatggtaatgtttggcaatcacaggatggcgcatacaacatcagtatccaaccccaggacggttctgctcggttgttacgtaacatgaacggattcaatgacgggattctgggcgaattcatctccttgcgcatcccttggcccatctacttaacctcatacgagatgactggcaactgcagggactgggttgtgtacgggagcgtggatggtaagtcgttcgatgtgctcgacacgcagataggtatcgcgtctgtgtctgtaagtacacagcgtctcatcacacccactgtaagtccaagcgaaaatgcttataacatatttgtagtgaagttcacgaggacggcgagaggtggttggaacagaggagaaatgaatgtcatgaatttcagcggcttccgtgcatgaattgtggaaatgaatgatgcatgcgcaaatcgctgacttggtgtctgcactcgaatacatgtaagtccgatatttctgagaaacaacgtttcggagaaaaaaacatttcggagagcatgacaaataatgaatgggacgcttcgctgaaattgtggagtggtggaggcagggtagcacaggaggtgttcagcgaggtcccggagatgcggcacctcatctcactccctagagactttgagatcgatgacgacaacacgcttggcaatgcgccggtcgggtcagtgggtttgaactatgtgggcattatcgcgtacctagtgagcgcgatgcaggaacaagcaaataagatcgaggacctccaggcgaggatctcacacggcgttgttgtccccggacgtgagtctcgcgagattggaaagcgaggggctcaagcagctgaatgtgggatgaatgctcttgggcgttcattcggggcggaaaaaattgtaatgtaccgttgaaaattatttgagaacaactgtatgtttacttattttcggaaagcaaacgagtcaactgttgcttccttttgtgctttgtgaatgtcgcgtggccacaaagtacatccgatcgtcgtcaaattgaaactgtaccgtcccacgatatttgaatcatgtacctcaccctcctcgtattcggatccggggagaatgactctgcacaatttggggaactcgagatccccgttgggacatgatacacgaggtccgaaccgtaattgtgacacaccctctccccatccatcagtcagctgccccttaacgtaattcaacaacttgacatcgtccacatccatcctcgagggcctccattcgtccggcactttgtttttcccaaaagaaaacagacctcctcctcctcctcgttggtgtttcttccgagtcttcgaaaagctcaagacgatctcgacgaacatgaacccgttcgcaacaggttttaaacgggcgtgcttgaaatcgaccggccacatacccatcgagttcagcagagggacctcttcgatcagatgctcgaaaccgaacgatttccatcgtttttttatggacgcgatcgcttctctcgggacgggggtgggtgtggacaatcccaggttgacgtcgggacggtgacattgcacgtcgtccaacacggcggggaaagtcagcgtaatcattggcgcacacgatcagaatctaaaatacgaagatgttaaaaaatcactgacttgttgtcgcgtttctcttctgcacttgaaggttgcaacaaaatgtccggtccgacttttctgagaaaaatcatttcggagaaaaaaacatttcggagagcatgacaaataatgaatgggacgcttcgctgaaattttcgccgtgttcatcatcgtgatcatcattgtagggtacctccgcggattctacagcgaggtcgtgttcgtgagctcggacgtcgacggtcgcgaatacctgatgcgtcggctgcccgaccgccagaacgcggtgaacctcatggcgcgcatcaactcgaatcttaacaagctcgttcagcatctcgtggccaagtacccgaaaaacccggtcgtgcgccagctgtacaataactacaacccagacgctctctcggagggcggggcggaacttgggtacacatcgtactctgtaaacaagggtgagaagatcgtattgtgtctgcgtcagcgtgaccacgagctagtggaggagaacatcctcatgtatgtcgcgatccacaagctgggtcacctcgcgacggacgaggtgggacacacgcccaagttctggtcgaacttcaagtggatcctgggcgaggcgatgtctatcaggctctacaccaaggtcgactttgacaacgagccacaaaagtattgcgggatcaacatcacctcatccatcgtttgatggtttacagcgttcttgtctacaaaaaatatacaccgaaaaataatgagtcatccggggtacgcgcatgcattgtacacggtcctgtgtgtcgccttcctgatcgcgtggatttccacttacatagtgaggtcgaccaccaccagcacagaagagttgaccttggagaacgtagggatcacgtacgccggtttaaggaatgaccttgggttctcgatggtagagcctctcataatgttagctatcggggcgaccgttctggcagtactgcacgcgtttgtcctcccaacgatcgtaggaaacgataacgaggccatgtttttatgcggtctgaatctcatgtacccgcatttaaagttgtgcctctcgcacttcatccgcaagatctatgatgcttttataatcttggggatggggtgcatgcccataataatgtacacagtcccaatggataagtttgtcatctgcatgctctggagcagcctctacatcgtcattgcatctttcgcgagtagctgatggaccggtcgttgaagagccagttcgcaaaggcgccctggtcgttggggtcggcgacagtgtaaaactgacggaagccggaattacgtttgaacacatcgtgtggctcctgccatttatcgccgtggaagagtttgacaactcgctttcggaccgacggacgcgtgatgtcgcaagggggacgcgtccctcccaccagcactgcgcccatgtcaccgattgcaggattcatgaacgggttctctttcgtgggcgcgcgacagagcctcgccgtctcggggtcacgttcgagaccctcgttgcgcatcatctcgatcgtgttcgttcgctggccaacgtcaaaacggtggaccgcggcggtcagcgcacctgtcaaaacaggaattagcagcgccttgggggagacacagaaaatgcacacggcgatgccgtagtatatggagaatctgaacagtgcgttcagctgctctgtgaggagcatccctggaaggggtacgaaactgtagagtgctttcgtcgtgcccatgaaacttcgtaggtcatcgtgccatatggttgtggttgccgccgcattgccgttcatgttgatatagcaactgaactgctttacatgtacttgacaaaattacttggggaccccatacttgacgggacagctcgggaactgcttggcgatggccacggcgacactggctgtgctattgggtgtatggagatcctcgtcaagtacgacatttagtgtatcggtttcggtttggcttacctcgacggtcgagacgccaggaatggcccttaccatgtccatcttctcctccgtcagcacatttgcgtcgcacaatgtaattgagatagtgatagaggtcattttcacactttttttggcacgcgacaaacagatctccatgcgcactttttgacaaaatattgtggtttgaaggaaagaacacatccgcatggaggctgcgcttctccttatcgtcgcaggcgcagggtacatgctttcaaagcgacgcaaaaaacctggaagggtgccgctagctgttttcccgatgacatcatacacgataaagaagagacccggcacattccacaaatcatcatcattatcaatgcctatctcggttgtcgcgtctgacgcggaggcgcgcgaccgaccatccgttcatgacccgtaccactgcacacgcgtgcaagatgtctacgcacacgaaaaggagctcctcatgcagaacacattcaggtcctcaatgactggcgaccgcatgccagcgacgcacggcaacatggtccctttcttcagagggagcgagcctccaggatcggccacaaaccgaggacacgagatggagaacttcgtgggcgagaaaggctcccaagacttcacatcactaagcggtggaaagcgagaaattcagcaactcttcaggcctacagaggcgagagtggacgtcctgcgtccgcctgtaggcgtcgggggatccgagtaccgcgacgtcgtgcaattgccacgcaatcgcgctaacgaactccctttcgaacaggttcgtgttcaaccgatcccggaggaaaagatgtgcaaaatggggggtctgcgcgcgctaacagtggacgacatgcgtcctctcaagcgtcccaaacagagcttgcctggacagattatccccgggtcgtccacatctactgctacggaccgacctaagcaccaacccatcaacactcagacgcgcccccctcctctcatccgcgagcagaagaccaccgacgactttatgcgcaccggtggcgcggccgggtctcagcccgggtacgacaagattcgcattgtcgaccggcacaccgagcgtgaaacgatgcgttccgcctacctgtgcaagggtgcagctgcccctgtgggcgtgcaccggatggaggaccgaggagggtcccaacgggacctcatctttcgaacccccctgggtgagatgtcgcgagggcctgccacgacgacggtcaagagcgtcactgactacggtcgaagcggtatgtcgtcccctggcaacgcgcgaatggagaccgggtctcgcacgcgccctggaactctcactacggccgtcaaggcgttggtcgcgcctttgcaggatgtgctgcgcacgacgcgtaaggaggagtacctcgattcggcgcctgtggtgaaccttgtaggatctcacggcgttcccaagctcacggtgtacgactcgcaggatgtcacgcgaacgacgctcaaggatgttctcctcgattcggcgcctgtggtgaaccttgtaggatctcacggcgttcccaagctcacggtgtacgactcgcaggatgtcgcgcgaacgacgctcaaggatgttctcctcgattcggcgcctgtggtgaaccttgtaggatctcaaggcgttcccaagctcacggtgtacgactcgcaggatgtcgcgcgaacgacgctcaaggatgttctcctcgattcggcgcctgtggtgaaccttgtaggatctcaaggcgttcccaagctcacggtgtacgactcgcaggatgtcgcgcgaatgacgctcaaggatgttctcctcgattcggcgcctgtggtgaaccttgtaggatctcaaggcgttcccaagctcacggtgtacaactcgcaggatgtcacacgaacgacgcgcaaggaggtgggtatccacgacggacatcagactggcaactttgcgggcggctctgtttcacgccgcggtcctgtggtggatcctgattctggagcgcgccaccgcgccaccgcgctgtcaaccctgacggtcaccaacgtaatttgtatgcgaagaacgttggtggcgttgtttactcggctgatgacgcggcgcccgatgcgactcgtaaggacgttgcggtgggtcaggatcgtggtggtggcttgccaatgatgacatctggacgcggagcttacagtgtttcagtgttggaccctcctcgatcgactatgcgtgagacggccgctgattcgggaacacggttcggtgtgtctcggcttgcagagagttctggtgcgtacgttgtggccaagcccgacagtttagaggcgacgatgcgcagcacgacgactgacgggtctgagtactatggtacttctgagtctgctgtgaccggaccggtttcgcgtgccgacgtcggttcggtggagcccgcgctgtctcgtgaggcgcttgtgatgactgggcgcgaatcctggttgacaggagggggtgtgacgctccagctggggcgcgattcggtgccggcgtagctgagatgggtgttgttggagacgaacgtggcggggtccctgctttgcgtgacggtgttggcagagtaggtacttgaattctagtgtcgctgggggaggtgacatgttgttgccttacaacactgtcgagcctgatcctgagccgcggtacacggtggatcgtttgatgggtgacatagagggcagacgtgcacaacaagaccaccaacaatacaaaatatcgaagtttgtattgtgtttgctgttgttgtagcagttaatgggcgttccagcctccccggtcgttttctactggttgcgaaacatggtctagagcggaattgtgattcctcggtgccaatattacgataaacgcaagaaagagccctgaaccctggcgcaataacttgttataaaaaaattgaatgcttgtggcaaactcattaaagtgcacacaacagctctatctctcacaaatggcacgtattaagcaaatcgctcgtaagtccacgtataacaaggctcccagaaagcagctacccataaaggcgtcgaattatgattcaaacgtacctgccacaggtggcgtgaagaaacctaaccggaaccaccccggcaccgtcgccctgcgcgagatccgcaagtaccagaagtctacggactttctgattagaaagttgcctttccagaggcttgtgcgagagatcgcacaggacttcaagaccgaccttaggttccagtcttcggcggtccttgccctccaggaggcctcagaggcctaccttgttggcctcttcgaggactgcaacttggcggctatccacgctaagagagtgacaataatgcccaaagatattaagctagcaagacgaatccgaggagaacgtgcctaggttaattagttgttgtgtacattttttttgacttcgtagctccgatggagaagagggggcgacatcaatctctacagtcggcggaacagtaaaatgaaagatatatcagatggaaataaatgtacgacatcgccgttagaaaattggcgttaagaatgggcgctgacttatttacgaacatcagtcgtgttctactctgtggaggtggaaacgctttggtgtacatcgaaaacgacgtgaatttgtaagcaaactttttaccaaataggcgactcggatttttttcaacctccccccaaacggaacgatctgcagtctggatgattataaggtgtgtcccactttatttgagaacaactgtatgtattaccatggaagagcacagtactgacttgaaaaaagtaggtgagaggatcgaacatataataaacgagatggattctttgcatgaagcgacaggcgtggagtatttccaagccctggcattagcatggtccggatgggtgtggatgctacaagatatcaagcgacgagagtggaagattacattccctggggatgctcagggaatggattgattgataatgcaaacacacgcacgcagagtgataggcgaacggaggatagagagataagatttacatcacaggatcacgcacgcacacatacaggatcgaatgacacatccatcgaccgaatgcatgcatgcatgcaagcaagcaagaaagcacgcacacgcatgacctaacttctttggcggaattcgaaaccttcacgcacacgcatgaccttacttctttggcgggattcgaaaccttcaaccggacacctctgtcatacctatctgcgttgacgcacttggacatttcgggaagcgaagatctcgaagacctgacacctctgtccggcctcactgcgttggctcacctgaacatcaattacaccaacgtgaccgatatatcagctctgtacgacctcactgcgttggctcacctgaacatgacgcacatcgaagtggaagacatagcagatctttactgcctcaaatcgttgcttcacctcgacatttcgaacacacttgtggaagacatatcaccactttccaaactcacttcgttgcttcacatcgacatttcgaacacacgtgtggacgaca

SEQ ID NO: 281 - DNA, 20513 bp, unidentified
  misc_feature 1..20513: note = Fanzor polypeptide
  source 1..20513: mol_type = other DNA
caaacgctaacgaactcgaacgctaagttgcccaccaacatgaggctcgcggcgtcctttgagacatcgcataagcgacggtacttagcatcgctctttgagatatgagacgcgatgatgtagagtgggccttcagggagcagttccatgttttgttaacatggaatcaaaacgtgttctatgtgtataacgtgttcaacgacactttatacaacaaattaagacttggacatgttgtgtgacatttttatcaaaatcatacagttgttctcaaataattttgggacactcagtataatttgaatgatatcccctgaaaccaggtacaggtccgtggttcactacaaatattttttgaggagtctcatgaaggtttgtaatatatacaacgtgtccaagagctcactacatagatgggtcaatgctgatcaggtgggtaaaagtaagcgtttaaaacgaaaaaggaaagaattgtccatgcttttacgttccacgatatccaataatattgcagagaaccccttcataacatgcaaggatttggtcggtataatttgcaagagttgtaatgtgagattatcgatcagtacggcatcgagacacataaaacaatgtggattttctaggaagaaggcgtttcccacagttctctacggacattcaaaagaaaatgtagaaatgttttgtgacaagtacagagaaagctctaccgttgtttgtatcgacgaagcaggattttacgctggcgaacacagcaaatatggatacagcaagatcggttcttgattaactacgaagacaatgagtaacctccgtcgtgtgaagttcactttattactcgctatttcatctcagagaataatagattatcagttattggagcacaattgtaaaaaagaagatttcattaaattctttaaaactttggtcatcccaaagaacaccacgatcgtcatggataatattcggtttcaccattcttcagaaataaaggatatccgaatgcaaagggtggaagcttttgtacacccctccttattgccccagagctaatgcgattgaacaaatatttggaagcatgaagagagactacagggcatcatgtccattgacgtcaacctgtaatttcgattacttaatgcaaatatgttgtgcacctgggcgagcgatttgtgtggtcaagatgaaattgagtacctttattccccatgattggcttcgtaaaaagatagacacactggtactggacatgaacaagttgcttggagagggttatattttcgcaaatttccacattgctcgtctttttgagaatggtatcgttgtccctcctgtaaatcgcaacttcttctaccggtgccttattgcagtcagtaccaacaaatgtaagggttcgactcttggcgaagacttcgagagtagtcggcttctgttcgacttgttaagagagccggggcaatccaaagttgacattcgggggaacgtgaagaaccagatcattgcagacctgtctattctcatggccacaatggcctctaaccatctttggaccaaccttgagcgacgcataacgacttacttgaagtggaagtacccacagattgcaaagcgcctgcggtcggacatcgtggctgcagtgatcaagtgccctacaaagaatctcgacgtcatcttcaagatgagccctcatacaaccaagctaccaaccaagctgccaacagctagacttcgatcggcaaaaagtgcagttgctcttgcgaagaagagggtcggtaggaaggaaccagaaggatcccctttgcgtgttaggttgactgaacttcaagagaggcttgaaaagttgagcgaagcttggctctcctcgaagaaccttagggtggacgcagataacgcgaaacgcttctttgcacgcgacgtggcattctgtctaggggggttctacctttaccatccggaaacacttttgcgtctcgggctcacatgaccctgcctctgtaccacaagatattgtcggagaccatcgaagaaaaacgaaaaactaaaaacgaaaaacatcgcacattctcgttgttgccttacaaatctggattcactctgtcgcacattccgatttcgaaaatggcctttttctatatggtcaacgagtgccacttcgattcatgcaaggcagacgttgcttccaaaaaccatcaaggaatatgggagcgcttcgcaaacctcaagaaagtggagacagtttctcggaagttcggttaccgcattgtgacagacggctttgcagtcagcatcttgatgaataagcctacgtgtctgacatgttcgatgcctgcagacgcgttctctacgcaggcgcatgagtatgtgacaacagacgagggtggcattgtatccttccttgacaatgtggtcgtggctgcggtagacccgggtgttactgatatcgtgactgtaacaggactcaacggaggtaccagatcgtacagctcggcgcaatattatcgcaagggtctgatcttcaagtctcagcgtcaaactgacgtttggaacctcgagacggctgatatcgtcggtggtatcattccggatagagactcttcgagttctgaacagattggtgcgtacgccagattctacatgggtgccgccccaatccttcttgcccatcgtgcttccagggggtaccgaaacctccgctttcgcaggtactgcaagaaacagaaactcattgttgagattgctgacttcgtagctccgagagagaagagcgctaaggtactcgtcgggtttggtgattggaaaggtctgggggcgacgccaatctctaggcggacttgtggccctctccaagctattcgtttcgagcttcgtagccgagaaaacgtcatcatggaggacatcgatgagttcagaaaacgtcatcgtcggtatttagtacttctttgagggtcgtttgaaacaaagaaaatcctgtttgaattgttcgtttgattcattcttagattcaatcggagataaccttgattcaatcgatctttgtttcctgtttgaatcagtcggccatcaaacctaccgattgagatccgtttgaaacaaggttggttgtttcaaacatgactcaaaccatgttcaaatagatcttaatcaagccgtcatcaacgtgccccttgaaaaaggtttgaaacaaggttggttgtttcaaacatgactcaaaccatgttcaaatagatctgtttttttgtaaagcaatgcaagcactgaagactgagggcgcatatttggacagcaggactcttcgatctttgttacagaaattgaaagcaccataatgaatgaatccttagatagttaaacatgatagtaattagtaattgaagagctagatatatatgctactaaggaagtgcagttggccacgaagtagttcctcaggtacgaattgacgaaactccagcatgctgtgcttcttgttcatcaacgacatcgtcttcagcctcaaggtcataagcatccaggcgttctgacgcgagaccagtcgcaagagtgagacctgcagacaaatgttcgttggtgagcgttagttgagatacattggcagcaatgcgcattcttccgactttcaaatagcagccatggttcaaaccaaattcgctatctgaatgcgcacctgttttgcacctcgagcattggaactcttgcggctccatgatgagctggacgataggtcgacttgctgcagctgccttaatgcctgcggaacaactcgaaaaagcgagtcagtcaaagttgagacaaattctggtcaagtaaggcaccacttgacgagacgcaaaacgcagtaccttaaccgcacgcgcgggggcggagaagcaggtcgctacagtcttgggttgaagcacaacaattcccaaagcaaagtaccgctgaagcaaagtgctcgcgcgtgtaggtattgacggatctcagaagtaattcgggaatggctgaagctatgaaagcaagctcagtccaagttaattcaaggaaagcaggcagcatgtcgctatctgactgcgcacctgtttcacacctcgagcattggaactcttgcggctccatgataggtcattttgctgcagctgccttaatgcctgcgacacaactctggtcaagtaaggcaccacttgacgaaacgaaaaatgcagtaccttaaccgcacgcgccggcgtgggcggagaagaaggtcgctacattcttgagttgaagcacaaccattcccaaagcaaagtgccgcggaagcaaagtgctcgcgcgtgtaggtattgacggatctaggaagcaattcgggaatggctgaagctatgaatagatcagtccaagttaattcaaggaaagcaggcagcatggtgcgctattctgcaggaatatcgctgagtcgagaaccaattgacgcgcagtgaacagtgaaagcttgcacagctgctaagttgaagcgctaacccattgcgctgaccagtttgaactgtacagcatgcagtaacgccgtaaccgcacgcgcatgggcggagaagcaggtcgccatatttgaatcggattctcggggcctgcgcctgcggtgcatgcgggatctgcgtcgcaggacctagacaaccctgatgggggtcatgctaatcaaacctgatgaacaatgggggataatgatcccgaaacttctcatgtacccaaatatgattattccgattctggaaaacaaaatatcataaccagattcaaagggacgaggaagttctgagcttagagaactggttacacatccgcgcctttcgaacagcgaccagttgggaccctgcacaccagtaggctatcctccactatgataatggtttctaaacttctcatgtacctatatatgattaattagattcaggaaaacaaaagatcataaccagattcgaagggacgaggaagttctgagcttagagaactggttacagatccgtgcctttcgaacggcgaccaggtgggaccctgcacgccagtaggctatcctacacctagataatggtttctaaacttcttaggtacctatatatgattatatcgattcaggaaaacaaaatatcataaccagaatcgaagggacggggaagttctgagcttagagaactagttacagatccgcgcctttcgaacagctaccagttgggaccctgcacgccagtaggctatcctacactacgataatggtttctaaacttcttaggtacctatatctgataaattagattcaggtaaacaaaatgtcataaccagattcgaagggacggggaagttctgagcttagagaactggttacagatccgcgcctttcgaacagcgcagatcggtaactactgatttaaactcagaagttcctcgttccttcgaatctgcttctgatctttggttttcctgaatcggactgatcacatataggcacctgacaagttcagggaccattttccaactgtaggatagtttatggggttcaggatctcaactggttacggtttaaagagcgcagatcggtaactactgatgtaaactcagaacttcctcgttccttcgaatctgcttctgatctttggttttcctgaatcggactgatcacatataggtacctgacaagttcagggaccattttcctactgtaggatagtttatggggttcaggatctcaactggttacggtttaaacagcgcagatcggtaactactgatttaaactcagaacttcctcgttccttcgaatctgcttctgatctttggttttcctgaatcggactgatcacatgtaggcacctgacaagttcagggaccattttcctactgtaggatagtttatggggttcaggatctcaactggttacggtttaaagagcgcagatcggtaactactgatgtaaactcagaacttcctcgttccttcgaatctgcttctgatctttggttttcctgaatcggactgatcacatataggtacctgacaagttcagggaccattttcctactgtaggatattctatgggggtcaggatctcaactggttacggtttaaacagcgcagatcggtaactactgatttgaactcagaacttcctcgttccttcgaatctgcttctgatctttggttttcctgaatcggactgatcacatataggtacctgacaagttcagggaccattttcctactgtaggatagtctatggggttcaggatctcaactggttacggtttaaacagcgcagatcggtaactactgatttgaactcagaacttcctcgttccttcgaatctgcttctgatctttggttttcctgaatcggactgatcccatatgggtacctgacaagttcagggaccattttcctactgtaggatagtctttgggggtatgttataaacatgttttattacattgatgacctctttgacatatattccaaagcatcccttattcatatctaagtctatgtaacttaaaggaagtacggtatgcaaagatttgaatagttattcattaaataatgcagttgtattcactgctgaaattgggccgaaatacctacggttaataagcaatatagacccttgtgctaaccgtatattccctttcctacccttgctggcccttcaccgttggttcctctcttccctgttccaataaatccgggacgcgaactgttgtagtgctagctggactgttgttccaagcaaccgtgtaccatactcctgtccggctctcagctgtccccgcgcccagtagaagatccctggcaacggagcccacgcacgccaaacccctgaacccacaaactgaaccggccaagtgcaattcgagccaccagattgtaaactcgcattctgaacgctacgctacgatcctcctcttcctctttttttcttcacttcgactggagacaactactaacgaggcaacgatcacaaggcatacatgcatcggtgcgcagccctggtcgccaactgcatcttggccttgtgatcgttgcctcgttagtgcaagctgctcctcgtagttacacgaggctagttcgacaaattgtacaagatttcggaaattacagaatccaagcaggggcaaatttggcccttcaggaagcgacagaggcctacttggtgggcctcttcgagaacactaatctggcggctatacatgccaagcgggtaaccattatgcccaaggatatgcaggtgcgctatctacaggggttgggggtggggtggggggtgggtgggcggggtgtggggtaagagttggatccacacaaaatatgctgcagcttctgggcagatccctaggtgggcagttggcctttggtaaaaatatgctgcagctgctgggacccgtacacgacaaaacacaacagtacactacactacactacacaacagtacacaacactatacaacactacacaacactacacaacactacacaacactatagaacaagggggttgggagggggatgggggggggggggggggggggggggggggactgagctacttgaaacactcactcattcactaactttgatgtctgtttccacttgcagctcgctcggaggattcgaggggagcgaaactaggacttggcaagaagttgtggtgagttatgctttcatgcctgaaccaccctcatgtaacaacttaatgaatgcatgttacttatcaataatatcataatatggcttagctgaacctacccatacagtagcccgataagcgcccttgaggctgcttgctacagaatgggcgggagatacgatttgccttgtatggtatgcctgaaccaccctcatgtaacaacttaattaatgcatgttacttatcaataatatcagaatatggcttagctgaacctacccatactgtagcccgataagcgcccttgaggctgcttgctacagaatgggcgggagatgcgatttgccttgtatggtatgcctgaaccaccctcatgtaacaactcgattaatgcatgttacttatcaataatatcagaatatggcttagctgaacctacccatactgtagcccgataagcgcccttgaggctgcttgctacagaatgggcgggagatgcgatttgctttgtatggtatgcctgaaccaccctcatgtaacaactcgattaatgcatgttacttatcaataatatcagaatatggcttagctgcacctgcccattatgtagccgcataagcgcccttgaggctgcttgctacagaatgggcgggagatgcgatttgccttgtatggtatgcctgaaccaccctcatgtaacaacttaattaatgcatgtcagtaataaaaaaatatggcttagctgcacctgcccattatgtagccgcataagcgcccttgaggctgcttgctacaaaatgggtggtcaatgcgtttagccatgtatgcatccaccaccctctgcacacacttaagtcaccaacatgataagtgcagcacattctaagcagcattatcttactcattctaatgtttttcccttgcaggtcattcatgaatgctggctgttgggagcaagtaaaggacgaatatgcagtagtggagctgcctggaagctgccatcatgtggtgccaagcttagccaatgggatattaaggcatgttagtgccctgaatatatagtagcatggagcagtaatcatagggtgactttagtttgggttttgtttatgagggtttaaaggtactgcctgtccttgttgaccaggacaggcagtacctttaaaccctcatacaaaaaacccaaaaatttaatttgaaatttcaagcacagcagtagataggccaattatcccttccaccaccttggacaatagccgggcctggtagttgacaatatacagccttcttgtgcgatacccacgagagcactgtattgtattcatcaattgtgcgatacccacaacgatgaatactttccctacaactgaattagacctaacttccagccagctccattaggttgtacagcttccagctagctccttaggttgtagaacttccagccagcttcaatagactttcactttgtgtgacaggttgtacagcttctagccagatccattaggttgtacagcttccagccagctgcattaggttgtacagcttctagccagctccattaggttgtagagcttccagccagctccattagactttcacttgtgtggcaggttgtaaagcttccagccagctccataagactttcactttgtgtgccaggttgtatagcttccagccagctccattaggctgtctctctgtatattaggttgttgtgtagcttcgagccagctaagccgtcctcagcaggaaaattaaatatatgacaccaatttgttttctggcattatatttgtttcctttcttgtaaaagtttctttcctaccattgtccaaagtgcgagtacttaaacacgcacacacaccctacttgggctgtttccaaactcctacattcaacttcaacttggttacatagccagacttcaacttggttacatagccagacttcaacttggttacgtagccagacttcaacttggtttacatagccagacttcaacttggttacatagccagttgtgacacttgagattacagccatcatcttgctagcacctacaccccaccctagatttttgtctagccaatgaaagcacaaactaatgtactacaaggtacggatttgtgccggttatcgctaggcgctcgcccgcctcggattcaaagcttcctacctctcggcagcctacatatgggagcttagctacatttcgaagtgcaatatcttcgaccaccttgaattccgtttgatattgtcttgattgacttccgtctgattcaatgaataagctgcttgaattgaatcactgattcaaactgttttcaaggtaccctgattcaaggggaaaaccgcttgataggggttcattgattcaaaccagttgattcaaacgatttcaaaggtctgcctaaataccggcgatcatggaggacatctcaacgatgcagctgctgtgagaaccacctttgcaacatggtggcactcactcatcgtaagaagcaagacggtacaggttgggaatgtacagaaggacgcaagcggattcataagattctccactgcaaaagcagtcaaagcggagcgccacgccaacagagcggtggtatgcttcactgcgggaagacttgggaccgcgatgtgaacgcttccgggaacatcctgatgcttacacttcaccaagtctttgggagagagcgtcctctcgcgtttagccgagacgcgccgagaagttcctcgacaaccccacccccaccccctgatactgatatggggacacagacggttgaacggtttaccaaagaggctactcggaatatcttcgagaacctcttcaacctgctgcaccccccaacgttgcacaaaagcaacgatctgcagtctggatgattataaggtgtcccactttatttgagaacaactgtagactgtataccacaaaataccattcacgttcacagcgacgtttcccttggtcgtcaaagacgagttcaagaaggttgaaacagttgcctcgtttgcgcgtttcagacaccggtctctgcggagctcaaggcccacctggccgagatgatcacatcgaactacttgggtacctgttcatcaacgggctcccgacaaggtcttacttttaagaaacggcaagccccgtcaatgacacgtggccctcgaggggtcaatgtgtaataaaggcaagcaatgcttgaaaatcataatttgtcaaaattatttgaaaacacttgtgtatgagtgcacgatgagcgaagcgcagaggaatgttttcattaaggtttacttcgacctccagaagttcattttcagcaacaagatcatcgtcgctgccgccggattctctatcgccgtggctaccaacgacgcagtaaagaaactgctcaactccattatcctcccattgttcgatttcataaacaatatctccttcgtgagaaaagccctcggtgtgaagatcatctcgatcatattcggtatcatggggacgttgatcatgtggatgctcactatactgctttgctttgtcctgcttgaatactttttgaacaagtctatattcggtatggttacgacgatatccgaagaccacaagacagaattcgtcaaagccaaggaggaggccaagagaaacgataccatttcaaagaaagtagaaaacatcaaaaatgaggaaaatatggttgacgaaatccttaaaatgtcaaagaaagatgacaaaccggtcaaagatattatacgacaagaaatgcacgatgacctcagcaagaagacacaacaaaaacaaaaacaaaaacatgaagaacaacgtaaacagtctcaatattgggatgatgggtcgtacatgcttgtgtaaaaccatctatataatgggcgttcctgcctaccggcagatttttttaaatttctaatcaggatttagagcctccgggacgaatcactagcttgagacatcagcaccaaggaatcacaaatccgctccagaccatgtttcgcaaccagtcaaaatccgccggtaggcagaaacgcccattctgtcttggcaacgatacagcactccgccttcatacaaaagacagttgaacgcaagactcgtacatgtaaaactggttcatgtggtttgttcaacgacatcgcatgtaaatatcgatactaaattcaaaaattcaaaaaatcattgcaaaagatagagtgtaaagccatattttgcaatctggattgtatcgttttgttcattctccctgtgttgtatcgtcgttacattacattacattacatgttaaagtctacttgacaccgcgagggtgtatgagactctgtgctttaaacaaaaagaaaaagcacccacaaagcaaaaaaccccattacatcaggggtgtgtcgaggacaaacaaaccaaactcccaaccaccgttttggtggcgtaggtattaaaccccttagagcaggacccagatctcaaccacttacagtggcggaggtaagaagctaacaaatgagaagtctcaagaagaaaaaaaagggataataaattacggtgccactaagcagtccagggcttcctgtcttgctcttctacaagtagaaagatagtcggctaggttgctccaaaaagacttagtgccatttccattcataaaggtcgtgtgttgtcgtcgtgtgttgtttctttttttgtttgtatcttagatgatttttttttttagcacgcttattagtcgtcttattcactccgctcactcgattgcatcgactgtcatcatcggtatggtcatgtactttgcgcaccgcttgttacagcttcagtactacccggtactgtcggagcgacttgatcggatcatttttcttcaatcaatcgcctattgcatgcacgtgacgagcatcctctcgatcgtggagacggctggcaaccatgtcgtgaagcatgtcatggacagcgttctccattgcgggtttgcccctatccactggtgataacgctggggcaacctcttcattcttgggcgcgcaacaacattcgtacggttgttccacaaacagaacacgccgctgagcattggaatgcgtacaatagcagacattgtgtggaaggcgttattcccatctcgatatggtcacgtcgaccaggtgacttcttaatcagaacaatgtgggcgatgcgcgtatgtcgtgacatgatgcgagtcgcgggtgctgggagaatccgtccctctctagatgatcgccccatggtgcgcacaagtttaaacacgttgttgtacagcgttggatcctttttcaacgcttgtagcaagtatgtcgtcatagctcctgagtactccttgctcgtgctacatatatccatggggtcctgcaagagggcatctgcggatgtctggtcgtctcgacatccgcttatggcgaggatcctttgccctcttccatgttcattcttgttctccacaagcggcgcactcctctcgttgatcaagtctgtccacgtgaacgggaggtcggagatggttcctgagtgacagcagtcggccacgaaaacgattactcgttcgtggattgaagtagataggacttttgcgatgtagtcgtctggaatcaggcggaaatcgcttgggacgagacactcgtcgaatccgtcgagctcgtgtctgaggaacccggcgagttttgtgccatgaccggagagtaatcggatccagccggtgtcaagagcctcgtcgtaggagtctattcgcaaggtcgactaaagcgcggccagtatggaagatgcggtcagtcgcggctgcaccgatccggactccagcgtgctcaattgaacttggttgacgatgggaactcagcatggctggcgcatcgttagacatcctgcagggatgcggtcgttacttagtagttcaatccaaacaggaaagctcttcgattattgtgtgtgttgtgttccgtgttcgtacattaacatgagaacaaaatgaaatatacatgtgttcttcactaatctctgttgttgacaacactacagtcggcggaacagttgctacaccattagggtacacgctaaggtgtgccgtccgagcggtttcattttagtattttgttgactgtaacacatgtgtatgttggtgagaaacgtgtaaacacacatgtgtatgttgttgagaatacattgtaaagagaacgaggaaaaaccattggttcgcaaatttgtctaacaatctggaaagataatgaagaagccggaacaaccgtgatcttcgtcggagatcgagactatcgtgagcatgcacgttcctcctggtgttgtgcgcaagaacgtacaagatatgtctgtggttcgttgccgcattcaccacccgctgggtgaaccgccacacttgctatgagcgtctagagtttctcggagattcggtgcttagtgcagttatcacgtcttacttgtacattcgctaccctcggaggacgaggggttcctgcgcgagcgccgcgccccagttggttagcgcgcgatgctttcgcgatcgcgcgaatcacactccattcgtggtgaattcgttcgtgtaggacgtggccaggttcaaaccgctctgaacacattgctgacaaagagacgactactgacaagaaggtcctggaggacgtgttcgaggcatttctggcggatgtttttggagatggggttgacgtcgtgagtgggtggctcgtaggcttcattgagaagtaggggatttgcagaggttatcatcaacaaacgcagcgcgaagcacgaccttaacaccttttaccgacagaagtatggttacattccgtattccagccgtttctgcgaaagcaacgcaacaacgcgcgtcactactagaccatcaggacatctacggtgtcatcctcggtacggggtctggtagcaacaacaaagtggaagcagaggcagacgcttctgcagctgtgctctcagcgtcgtgccaaggggggtcagaccggtcaataatgttacagtttgttctcaatataatttgggacactctatctgtataatttgaatgatccctgaaaccaaataccgtggttcactacaaatatttttgaggagaagtctgaggaacgcccattgttttgtaatacagttgttctcaataattttgggacacctccccgaaaacgtcgggacactgtcgaagactacgtctgactccaaggccccccaaatacagaacgaatgcgagaacatatcattcgtgacacacacgcctcctctgcgaaaacgcgggacactggcgaatactacgtctcactccaaggcccccaaaatgagaacgaacgcgagaagcatcatcgtgacacaagcctctcacagacatctctgagaccacaaacgtagttaagagttttagttggacaccagagtggtaccgccagcaatacacaggcttggtagggggggcttaggccacgactttacactcgtttttcgagggaacggagaggacttctcgcatgagtgaacccacaacctttgccgcacctgccgtcatcatcccacggcaggtgcggcggcgcatttagaatgcatgttttcatacactcgaattgcagttggtgtgtaaaaactggactcgcctgtcgacaagtgcacggagttcgttattgacttcattgaattgtcgtggcaagttattcattccttaatctcaaaacgtccgttttgaaaattcaatgcgcagctgagatagcgcattcaattgcgcttcggtcacaacaccggacattctgcaattggtgtagtaaaccacaaaatgaatatctttaaacccaacgttgcccaaaggaacgatctgcagtctggatgagtataaggtgttgtcccatttattgagaacacctatttctatggttcatacgatggaacactcattcaacgatctcggagaaggtgtgtgggccgtgcaagacaccgagccctattatacgccactgttcgcggaatgcgcatgaagcgcatcctggaaatcagtggtttatcaggttactcgcaacaaatttcatcaaggcgttcgcaaaaccggaagcgagcgtgactgtacacagtggacattcaacccgttcataaaatcgcgccaaaccacgtcgttctgcgcaaagatgctcgtcacattgagtcgtatgacgtgggaaactcaccactcgacctcgtgttcttcgattgccatgattatgacgtccagatggcagtgtacgataggcttgtggctaaaggtttgatcacggatgctacagtcctggctttgcacgacaccaacacacaccctgccaaattcttttcctttgggtacgctttgaacggcaatcccggcgaatgggtgcaccaggacgtcaacaaatttgtcgaatcgaacgggtaccacgctttctcactgcacacaccactgtcatcccatgatgcagagatgccttatcgacatggccttactttgttgcaaaaattcaagcgcctcgagacataatttcacattcgctcgtgaaacagagtcactttcacgcatcgtggcgtcggaaaaatggatacattttggggctgtacagtagttctcaaaagacacccctcgcgtttcgccgagacgcggcgagaagccgctcatcgacctcaagcaccacccgatactgatttgggggcacagacagttgattaccgagcggtctgtgcgtgaaactcacaagtcgagtgtgtgtgtgcggcgttgttcacactcgtttttagagacacgcagcatcatggtaaacgtgatggacagaagcacattccacgtttgtatgcatcccgcattcttcacatttatgccacccaacttttccgtcctttagcaggcggagatgaattttcatgtcgacgtctgaattacatcctttacgctcgaggaatttgtggatggaccacgaggcgttgtattgtaggcatgtacgccggtcttgtgtaatattgtgcgtgacgagggttgagttgcatttgggacatgccatctttacatcttcattcattcattgtgaatttccttatacggcacctcccacaaatgttactacgataccattaattacagccggtagatccatgtaaacatatatcagatggaaataaatgtacgacatcgccgtacacgaggcggtttcattttagtattccgtcgactgtagctatagacatttcaaaaaaatagacatagctatagacatttcaaaaaaatcgccgggaggaaggaacgtccattgaatcacaattccgctccagaatatgttccgcaaccagtcaaaatccgccgggaagcaggaacacacggcaggaacattcaatgccccgccctgaaatgtccccaccacacgatcaaatgaacacatattctcaatgtttttagatcgggactttacgagcacattatcagatctgggcagcacaacacaatcagttcgtgcacatctactgcacacatctcttcatcttcggttgcacacatctcttcatcttcggttgcacacattcccatggggggctcagtgggcgtcagggacctgctagcatgatacgttggcaagggcgggaactcttcgtgcacaggcttctgttgttctacaacaggatacacatagagttgctttgagaatccacgcttgctcatcgtccttagcggcttgatgaagatgaagtccatgatggagacttcggtgacctttggtggcgagtaggcctctatgacattcttggaaacgctgatggggattggctgggcataagggaaagtgggggcatctactttcatcaagcccagtctcacattcatcacgcgcataacacgtgtcggtgtggatggaaaattcatctcccggctcatactttgagaaacggaaaaacgggttaatatgtgttggaaaataaccaccactacgtatgttatttgcaggtccagaaaaggagaatgatgagtattctttctcgtcatgaacccttgcgggaatgactgtgctaattttatcccacactcgtgctgctagttcttcgcttgttaatgtaacacgtttccttttgcctgcaaacatatctcctcctatgtatgggctttggaaccctttttgttctgccagttttatccattcagagcattcgtttggtgttaagacatctctgaccacaaatgcgtcaacatttggaagcgattcgttttctctggatgtaatgcgatcatacatgttgttacgtgttaggaagttttaaatgttttacgaccaaccggactgaggggctaggggtggtagggtgagctagaaggcgccgaaacaagaaaataggattgactcgggcaagttacaagggtggtgcggacaatatcacaccctggagaatatgcgatgatcagggttcgtgatctggactgctgctataaaatgagccttagtcaatgagacagaccaaactaacagctacttatgacaacacaaaaaagttgcaaacaatgtctttacttgttgcgcaagaaatcgaatttttaggaccatccactcatacactttatttggatgtttcatttaattgttcctccgactgtaataatggcattgctaaggcccggatgcaaatgataatcattcgtctcgaacttaccttgtggtatgtcagtcgcccacatccggtgtatgtgcacgagagctcagagacgtaatcgacgtaagggtctatatcgacgttgcagtacacgcaatagtacgtagtggacgtagaggtcattgtttgttattcggtgttctagaaagtggatgtgtacacaagcgagccgatctgcagtgaatgtgtatacaagcgagccgatctatatagacgcaaacgtgtaccgcatgtaccgcatgaaccgcatgtaccgcatgaaccgcatgaaccgcatgaaccgcatgtatcgcatttacagcatgtggtacgggggcttctccacctctcttgtcgatgtcaaccaaccaagcgatctagcgatactcagaggttctacagtcggcggaacatctcaacgatgcagctgctgtgagacccgcctttgcgacatggttgcacaccctcatcgtaagaagcaagactttattactggttgatgagtataaggtgtgtcccactttatttgagaacaactgtaaggtaaatgtctccgctttatttgagaacaactgtaaagtgtttgtgtgacgtcgtggtgtcggaaagagattgtagtaaaataaggtaatctgatttccggcatggcatccgaaatgacccaagatattccttgcatccttgtcgtaacaagggatcgtgttggcatcaacggaatagtcttagaggagctaatcgaaaacgtcttagtcaaaaacgactccaacgtgacaaaccatacaagtctttacaaacgcgaacatcactatgcgattactctcttcacaagctacttcactcattcctcctcacaataccccccaatactcgtgtttgacgcttcagaagatccagggagattaaccaacaacaacaacaaaggaccgctcgtcaagatcttggaacgggagatggtcgatacagcgtctctttttcccaatctcagaaaacaccaaccggatggcgacacgtgcaccaatcaccgtttgcaggttcgaaaacgcgtggtcattcttaatatcgaatgcgcacccatgcacgtccaaaaaagcatccgagttctcgtcgatagatacatggaccgcgtgcaaatcacattcaccacatcctctctatcaggagtggacgccggtctgcagagcagagccatggtacgtcccaagatgaccattgcaggcggcatcaacatttacaaaacccgcaaaccatccccacaacaagatagtcttgctcgcaaactcatcgcttgcagaactccaaaagagagaggaaaggtatggatagaagctgcaatatcaaccataggaaggttgtcatccgacacggaagaatccgatgggagcagcagcacgagtttggaggtcatcgagatggtcgcgtacatagaacacatgtgcgccaccgtccacatacgaaacagaacggacgaatgcaaggtcatcgaagcaggcgcagcgttttttttttttccgtcgaatacacaaatacactcgtgcaatgaaattgagtcgataacaaacaaaaacaactgtacgatgcagatcgttgctttttggcaatggtgcgcatcttggtggatgttcttggaggagttcacatcgcgatcccaagtattcccacagtttttgactgcttttgatacgaacgaaggattcgttgaacgaaaatcattcagagtgtcccaacaatattttagaacaaaatggaattgaatggggccccgccaagtgaagaagtgaacgaggtcacgatggaccaattgagagcgagccaagtgtcgtagcgaccacatcgtcttgcattgcatctcgaattattcgagtcttcttcgcctgacgctcgagaacatgctcatcaactgagtccttcgcgaccaaccgcaacacgcgaacagtacgctcttgtccacgacggagaacccgtcgaattgcctggtattcggtcacagggttccactgcggacgcatcatgatcacgttgttgaaggcatgctgcatgttcaagccacaatttgcgcattctatctgacatactagcatgtgcacgcgggtagtctcacgatccgtcctgcaccggtacaatgtcgaatcccgctcatcaatggagcacgctccgtccaggcggctcacgcaaacctcatcctccctaaatcaagcccctatgaacgcctcaagcaagtccatctccatgatccagttgcaaaaaaccaccaccccgct

SEQ ID NO: 282 - DNA, 21221 bp, unidentified
  misc_feature 1..21221: note = Fanzor polypeptide
  source 1..21221: mol_type = other DNA
caacaacaacgttgcgaagatctataccacagatgagaacggcaacccgctgccgatgcctgtcaacgtctcattgcgcaccggagaggatgtgaacgtcccagtctacaacaatgagttcctcatcgtgtggattgaaagctacgtgctggctgtcggtggcgtcaacatcctgtggctccacaaccagaagcagcaggccttctctgctagcaacggcatcacggctttctcactgtaaatgtaaaagcgtgcatcttgtcttgcccgcatgccagctagtcttgcagttcctcagtacacgtacgtggtgtatccagtgccatgcagccgtaaaataacctcgcatcaggcggcacctgtgtctagtcgactcacatcacagagcgaccgaccactactctcatcacggcggcacctgtgtcagcacaggtgccgctatggccctccccatcaaaaaataacgaaagtaacaaaattcagggaaacctatcattctacatcacggttgttctcatcctcaagcaaccaacctcaaaactgtttgtcaatggatgagaaccaccgtaccacattaaacaagtggcggagcccctttcacctccccacagcggagcaacagggggcgaccggaggggagcccccacaaaggagtccgcgaggaaccgagcgggtgggcgaccggaggggagcccacaggtcacatcaaccagcagacacactactgatttacacacacacacacacacacacacacacacacacgcaacgccgcggatgatagatgcaggcagggagggagcaagttggttggttggttgtctgtgcaagaggggaggagggagcaagacgccgccgtcaggagaacatgagacacgcacccacgcacgcatggaacacacacgcaaacggaggggggaattcacagggggaccatggggtacagtacatacaggcatgaccgtctcgtctctaagaaatgtataaaaaaaaagaggttttagtatctaactaactgactatataactaaagctgctggctgagggacagggagcaaagctcaattgagagctcgatagcagcgagcttcttggctaggaaagactctctctttgagggagtctggttcatgcacgctaggtgcgcgcactttcctgttgtgaatgggggtccgccactggggttgcttaatagcacctgtcttctactgcacgggtttccgtgaatggtaacggcactgcatcccagggtgggggagtaccccacgatggtcaactcaccgtttttggagccaacaggaagctcgttctttagaacggacccgcgaccaacacgaccggaggccaaggaggaggacaggaagcacgtggggaacgagccagcaggagcagcagaagcagcaggagtagcagcagcagcagaagcagcaggagcagcagcaggagcaggagcaggagcagcagcaggagcagcagcaggaacagcatcaggaacagcatcaggaacagcagaagcagagcgtgaagcattggcgcgggggcgcttgttccctccgcttccctcatcagacatgcaaacgtcgtcctcttggagggagacggcggcactggagagggcaagcacggaggaagtcgcagaattatcagcgacggcatccgcagcagcgactgcaacggggagaagcattagctgcaggggctctttctccccgttgggggaatcttcgagaaactttttgtgcgccatcttcattgcgccgacagagtcggcgaggcaatcaggaaagctggtcagggatatgactgcgttgcaaatgcccttcaaattagggacggtggcgctatgggatagcttagttcggtccttcttctggaccacgtcgaagatacgggtagtatcgacgaacgcagttatctgggcagacatagacatagtggtagtagacatgacttgacttgaaagatttcaaaggggagagaggatatattgggatttatcagttgttggtggtggtgttgttggaacgaaaaaatgcgtcaatttttttttagcatgaaatgcaacggtaacaacaatacaggtacagggacatgtatacataagacatagacatgtgtctcagacactctgtacgtgaacagatgggatgccgttggggggatgatgtcacaaacagagtagagtcaacaagcggcggagcccttttcacctcttcccccaccgggggcgaccggaggggagcccccacaaaggagtccgcgaggaaccgagcgggtgggcgaccggaggggagcccacagtgtaacatcaaccagcagacacactactgatttacggaacggaaatcacacacacacacacacacacacgcgacgccgcctccatctcggacatggacagcatcagcaaacttggtctcttcgcctcatcatcatcgtgacacctcttcccctcccccccaaccgtatgcttaagattgccgcgcttttgcaggccgcgtccttaaaggatcgcgtgatggccgagctgtttcactcccccgattttctcgaccgcctgaagtggaagaagtatgtgttttgcgaagtggaagaagtatgtgttttgcgtagaaaatcctcgcggcgttgcatagcgcatattgtccgtgatttaaatgttctgtttggagcaccgtcttggttgtaccagtgtttttcacgtgtgggacacatctgaacattttggggaaaaaataaaactcggaatcggtcgcgatctcaatggtcctcggattgaggcgaagcaagttggactttaacgtggtcatatttggactcattatcatcaacgggtgcgtgatcttgtatatgtcggcgtcgaacgtatgcagcatttgtaagagcatcataaacgttgatccggaagccacaaaatctacaaggacaatgtgcgatgcatctgattcttttaaagccctacgcagtggtttaattatcgtttcgcgtatgttttgaacggtttccttcatttcttgtgctgctgcattgcacatttcggtaacttaccattatcgcagccactgaattcgaagtgttcagccactgttctcgaaaaaagcaccgtgtgcgtatgcaaattcatgtactcgaacgccatggcaagtttgtccgcactggagccaacgcaaacaaaccaacatttgttgcgcggtttgggcaccttggacaatatcgctttcaacacctcttgctgaactcggacgttgtcctcaacagtcttgagagaactactctggcgttgtcctcgacaatcattgtagttgtcgcgagtcgtcgcagcaactacggcattgcttagtagttgcatcttttggtccggcacagagcgggcgagacttacgcatgtctcggtgtccgcaacccgctttatcacctcatcacctaagatttcgccagccgatccgatcaaaacaagatcagaaaagtgataaaagagagttgcttcggttcccaacaggcgctctgatacttcgatgcatttggttagttgcgtgtccatgtcaataataatacgttgtttgttgtatcaaatgtaaatgattacaaaattattattattattattattattattgaatgatccgatcctgtacacatacaaacgattcggggaaatcaagaaagtacagcagcacgcgcgcaggtgcacgaaatattgtgaagacagccaaacactacatcacggtcgacgacaacttaaacttgacacagaagatgatacatacatgatcgatcatgtcggcagtcgtgcggattgcggggatcacgatgacttgcgcatactcattctcacacggaggcttaaagcagactcctgctttaacgacaactctattggtttctgaagggggagcgcgggcaccgcggagcggggcagaggattggattggattggattcatttgatgactcgcgtacaccattcactgtaacgcttgggcttttcactgtaacacttgggcggtgaagcgaagtgaccctcatcgtccccgtagcaagcagactacacttaacttatatcaaacggtggaacgatgtcgatacgcaggacaacaacagagtgacgtacaatatgcccggatgtgtaataagaaattcataggttcgaggatatacgggtagcttaaattcaacggtcaacccttcaggtacaacaacaccatgccacccacgtgtggtgagtcgagtctacatgcatataaaaacccctgcgttcaacgctgcgtgcggcattactgcttgccttgtggagatttatgcagtttctggaaatcatagcgtggctcctatcgacatgtgagtacatggtcaggtggtgtgattttgcctcttttatatctttgtggttgaatgggcgttccttcctccaggccgattttttaaaaaattctactcagaatttagagcctctggaacgactcgctagcttgagatatcagcaccgaggaatcacaaacccgctccagaccatgtttcgcaaccagtcaaaatcggcctggaggaaggaacgcccattcaaccacaaagatataaaagaggcaaaatcacaccacctgaccatgtactcacatgtcgataggagccacgctatgatctccagaaactgcataaatctccacaaggcgagcattaatgccgcacgcagcgttgaacgcatggattaggaggtcgtgcaccacaggaccgctgagtggtttgctattgaggctgtccttggactcaggtatacctgggtcaagtgctgcatggtcactgccgaggacaagctggaagtcgagtagagtgtgtagcctgcctcgcgagaactctgttggtagcggttggtaaggaaagtagtgtttccaaaaatttatgacagtccataagcttgcctgcacactctgctcttcaaagtaaaacgaacgcaatccgttgacccctgcctgtatgttgcgaatcgttgcatcctggaacatggttccctgaaaggacacagatctcgtgggagctgcaggcccccctttgtctctggattgctgcatctctgcgatcacgcagccgtccaaaatgccgcccaggaacatggatgccatagtgagctctcgtgctacggtgtcttgaaaaattgtccaatccatgtcatgatgatcttccagtgcattcttgacatagagtaggctcgggcgaatggacgctaagccactgcacagggctcgcatatgcatgaccttgcccggtaggttgagtgctacctctgaagccccgtcctggaaaggtggagcatacgtgcaccggcagtgactgtaacaaggacatgaggagcagttaccagtaaacatggtggcaagtcgtattgaaggttagatgcctgtttttttatatgcatgtagacgcgactcaccacacgtgggtggcatggtgttgttgtacctgaagggttggcaaagatgagctcgggttcgataaagactgaaagtagtagcagcaggttcgaaaggttgcaacatgcatgcagccaactactcacgtgcgccgtggaaaccaccacccactcgcccagaaagatgctcctcgtgtgattcgaacctgcgcctccaactccagctccccttcgttttttggggcggacctgcggacccggattccctacactcgagatgagacattcgactgacgacgcctcctctaaggacagcagaagccaacatattcctgagaagcttcgagagcagacctacgacttggcttgcgagtttcgcacagttcactcgcgattctgagaccggagatcgcggaaacgctttcaataggtgagtttgcatgggaaacgcttctttgaactttcagttctgacaccaacaaagaaagttatggcctctcaaagttgtgacccccccttgcttcgcagattctcattcacgacgaattcgaggaccaaagcgtctatgataatatactgagtgtcccaaaattatttgagaacaactgtatgtgaagtgtctcgatcccgacacattgttcatgcccgacatgcatgctgatcatgctttgcccgaaagtgatgactgttgttgacatcaagtgttgtgatacggctctcatccaagtgttggcaacatatatcacttgacaagcatgaggttgattgcttgaaatttttcatgtcatagcacgcatggttctttctcatcagcacaccatacatcggaaatcccttgtgaatgtaagcctcgtatactagccccacgatgcttgttgtcttatccaagtcgttgtgcgttgttgggttgtctatggttacaatggaccctacagtgtacgtgggattctggtaaggtaagtaatccatgtctgaagatcgtgttttgaaatgtacaatataaaaccctaaacaattatgagcatggacgcgaaggagtgctccgattcgaaagtagttgccgcttactgattacaactctgaaaaccctatttaaatgttgctggaagcagggactattaaagctcaagatctgtagggccgtgagaccagacgtcgatagtatagtgatagtattaggccacactaggacacgcgtacactagacgtttcatttttactgttccgtcgagtgtaggcattattatgctcgtgtgtgtcagaatttaggaagcagtttggctgggtcattggagtgctggggagcatgggtttgggtaaattcattacagtcaacggaatactaaaatgaaaccgcttcgtgtacggcacaccttacggtgtaaccttatggtgtagaaatccacggggcagtggaacaccaatacgattttgaatcaacaaattgcaggatgttaactagaatatcgtggttcttttttagatcacggctctccatcctgcagactccgtatcgttattttgtcggtactttcgtgagtgtccattgaaggaccagccgcacttaagcgatcgcctcttccccagtaccgtggcccaaaagaacacggggtctttgttgatgtgcaatgcgtcatgtaaggaggtttctttgctggacgggtcattttataggaccatccactcatacaatatatgattgtcaccgccttataccgtttttttgatgtttcattttactgttccgccgactgtagagggacaaaaatcatccagcctgccaacaccaaactgtaggtctatgagtatgtatgttgttacagtccaggggtaggctgaataggctaaagggacatgtccaaccgtgacaggagaggacttgcccagccgtgacagtaggtctatgccttcttatcagcagagcagagcaaaggctcatgccttggcctttcctttacccttcgcaccccccctcccccccacactccctctacccgcacctgcccctctgcccccggagccccgtcccgcactgcccttccccttggctggagccttgtcagactttaagtccatcgtcatgcctctcttgctcagcttggcacttagcagctgggctttggctgccgctaccatctcgtcgccatcatctgcgtcatcgtcttcatctgcaacgcctgcactaggcttctcgaacccggactcgtcctcatcgtcatccgctccgtcgtctgctccggcagcgcccttcttaccctttttgcccttcagaggtgcggcgagcattgcaccgcacttcgcctgcaggccttgctggttgaagctcctggtaaaggcgctcttaatctttgtagggacatccttcatggggtcctctccccaatcggccttggtcttgaacttggtcacgtcaataacgtagtcaaacatttcccgggagacgcagtagtcctgcatcagggtaacactctgctggatgccaccactctctccatcagtcactagtggatgcgtcagtagggtgcgcatggctgataggtactctaaccgcacgggagatctgctagaagccatgtggccgctggaagccatggtggaggtgagttctcccagcaagcgtttttgcttgtttgaggttgagaagttgcccagccatgatgtgaagcgagagtagttgtcgcctggccagaaggcgtccctcccgccgcgcatgtacgcccccggcacaaggcatgcaagcgtgttgaaggcaggcataaggctccagttcatgtagcgccgcacagacgtgttgatcacatctcctgcagatatggcctcagctgacttcgccactgccctcatccgctgctcctcagttcctgcgatgactgggcggtggttaaggtagttctcctggatcaacagggggacgatgtcgtccaccatagctaggttcagccgatcttgaatgctcatgcttgagctggcaggctctagcaactttcttgcacactcgaaaggagacaggtcactgtccttgtcgcatgcctggctgcccttaacgtcatcgtaggacagggtggtgcgactaagacggaccatttgcagctgtcctaggatagagcgtaggtcggcattggctcccttggccagggcctccatggtggcatcattgacagtcagcccctccttgcggcagatctccatcatccttatcttgacttgctgtgggatgggtgacctgaagtcaagctccacacagtagttccgcaagcttttcaacttctggttccacttgtcgttacatatgcagataatgggcacctttgaggacttgatcgtctggatcaggtcttgcacaccaccacggtcaccaccagacatcccatcaacctcatccatgatcagcagctgcttcttcatcttcccatcagctcccaccaacagagatcgattggttgccatctccttgatcatgttggccgacttccctcccatgccagctgagatctttgaatccgacttgttacgggtgtcactggcattcatctccacaatctcaaagttacactccttggccaagatatgggcggcagaggttttgccgattcccggaggaccactgagcagcaccgccttcttggacaggtacttaggattctgccggctgccaggaggggcctgtggttgctggccacgcagatttacaccctcccagttgctgagccacatcctgagggtggcaatcagcgtgttgttgcccaccagctctctagtgtttgttggcttgtacttggtaccacagttacccacagttggtagccggcattacctgaaggagcctggacaccaaatactactttgtcatgatcgttcagggaattccattgctcggcagtcatgcttgacagttcgtacctcagttgcttctcaagtgcttctgcgcgctcagtctcaatcttcagtcgagcagcatatgccttatttcgagcgcgctcagtctcaagctcaatctccagactattcactcgagcagcatttgccttatttagagagtgctcagtctcaagctcaatcttcagtcgagcagcatctgccttatttcgagcgctctcagtctcaagctcaatcttcagtcgagcagcatctgccttctttcgagcgcgctcagtcttcagtcgaactatgtaaataagagcgaatgtagcgatgcagataagtagtagagacttgtcaatcattgttataaattctgatgattgtttcttaagtacagtcaacggaatactaaaatgaaaccgcttcgtgtaaggcacaccttatggtgtaacctaatggtgtagaaatccacggggcagtggaacaccaatacgactttgaatcaacaaattgcaagatgttaacgagaatatcgtggttcttttttagatcacggctctccatcctgcagactccgtatcgttcttttgtcggtactttcgagagtgtccattgaaggaccagccgcacttaagcgatcgcctcttccccggtaccgtggcccaaaagaacacggggtctttgttgatgtgcaatgcgtcatgaaaggaggtttctttgctggacgggccattttgtaggaccatccactcatacactataacgtctgtcgtccagactcatcacgcacagtttctcggaagttcggttaccgcattgtgacagacggctttgctgtcagcatcttgatgaataagcctacgtgttcgatgcctgcagactcgttctctacgcgggcgcatgagtatgtgacaacagacgagggtggcattgtatccttccgtgacaatgtggtagtggctgcggtagacccgggtgttactgatatcgtgactgtaacaggactcggcggaggtaccaggtcgtacagctcggcgcaatattatcgcaagggtctgatcttcaagtctcagcgtcaaactgaagtttggaacctcgagacggctgacatcgtcggtgatatcattccggatagagactcttcgagatctgaacagattggtgcgtatgcctggttctacatgggtgccgccccaattcttcttgcccatcgtgcttcgagggggtaccgaaacctccgctttcgcaggtactgcaaaaaacagaaactcattgttgagattgctgacttcgtagctccgagggagaagagcgcgaaggtactcgtcgggtttggtgattggaaaggtctgggggcgacgccaatctctaggcggacttgtggccctctccaagctattcgtttcgagcttcgtagccgaggaaacgtcatcatggaggacgtcgatgagttcagaacatctcaacgatgcagctgctgtgagaaccgcctttgcaacatggtggcactcactcatcataagaagcaagacggtactggttgggaatgtacagaaggacgcaagcggattcacaagattctccactgcaaaagcagtcaaagcggagcgccacgccaacagagcggtggtaggctccactgcgggaagacttgggaccgcgatgtgaacgcttccaggaacatcctgatgcttacactccaccaagtctttgggagagagcgacctctcgcgtttcgccgagacgcgccgagaagttcctcaaaaaccccaccaccccctgatactgatatggggacacagacggttgaacggtttaccaaagaggctactcggaatatcttcgagaacctcttcaacctgctgcacccccccccccaacgttgcccaaaagcaacgatctgcagtctggatgattataaggtgtgtcccactttatttgagaactactgtatcaagcattaaatggcattggataacttcaatatgtatgcagttgaagaaatggatgcaagccttagtactacgacattcaaaagccgcatcatgggcacttcagtcaacgtcagcttgacaataaggaatacccatgaggccaccatggagttcaccctcttcggtgccgcttacacattcactgttacgaggtggagcagaaagggtttgtcgtcctttctgcttctcttctttgcttacaagtgccgcgaagcagctgacttcggttctctcacggtggatgacaacggtgttcctaccttcaatatgaccactgcccagaaggtcaatgctgtgatccaaggtgccaaggatgtcatggcatgcgtagacgagattggtactaggcaccagcggtcagtgctcgactatgccgtctggtaccgggagaagcacacctgctgggacacctacgagaactacatcaccatgctggcatgcaactgcatcgtccacacagatttcttggctccgggtgtcacatgagagttggtgacatttggcatggcttgaagtgtataaggaatttgcatgtactaaatatcagaatgccatgtatggcaaccaacgcttctgtaaaattcttcaacctgctgcaccccccaacgttgcccaaacgcaacgatctgcagtctggatgattataaggtgtgtcccactttatttgagaacaactgtgagagcgggcgacttctattcatgcaagtgttgggtgagttcaattgaaaactcataaattgtgattcattgagtgtacataaattgtgagcgaattacatggcctgcgttcgacgtaaatacggaatcccttgccaaccatattccaataaatgtcccagccatcttgctaacattccaacctgtgcagttgacagcatctcttacttggaaagactggttaaggcgaaaaaagaattggaggcccaggtcgacgtcatgtcagcccaagctgtacaggatgcagccaggatggaccatctggcatctcactccaatgtcatggcatcttactccaatgtcatggcatcttactccaatgtcatgtcagcccaagctgtacaggatgcagccaggatggaccatctggcatctcactccaatgtcatggcagcccaagctgttcaggatgcagccaggatggatcatctggcatctcactccaatgtcatggcatcttactccaatgtcatgtcagcccaagctgtacaggatgcagccaggatggaccatctggcatctcactccaatgtcatgtcagcccaagctgtacaggatgcagccaagaccaactgtttggaggcccgggtcagccagttggcagcgcagctcgctaggtttccgcacaacccgggtatgcatttctacggcgatggcaacatcaccccgccttgagattatctcccttggggtgagaccgcctgtgtgaagacttcgaatgccggtgacttgcgcatactcattctcacacgtgaattcaagcagagcagactcctgctcgaaaacctaaccaaatatgaacaacgcacacatgaagtccgcatttcgaaaaaaaaaaattatacgcagcaatttaagccaactcagtattattgagcaagtagataatgtcgtacatctcacggggaatcgcgggactcaactcgtcgaatgcagcattcagattctgggacagatcgtccatccacttgtgatcagcctcggtcatgcgcgcatcgcgcaaggagttggccttgtcgggatgcagccgcatggccatcatcctctgttcattcctcttccaaccggcatgtaaccaggtgtcaatggcgtcgtcagacaaccagtacttaatgggcgttcctgcttccgaacggattttttattttactgaaatcttacgataaatattgtaagatcgttttcgcaaattaattgattttgcttttttggtggcttttacgaaaatatcttacaatttattttgtaagattgttttgttgtattcctgagaaagagactattcccttcaatttcaattgtaacattgatttgctcgtttggagagagagaaagtattggaatacaaaatcaattgtagaggacagtcaagaggaaggtgaaagctgtttacaaagtcttgaacgcattgctcataattatttatctcacaactcacaactcaacagttcaaaattacaacttagtacttacgactccgaaatctgtacttatgtgtacctcataatttataactcacaactcagaacttatatgtaccttatacaagtcagaactaataactcctaactcaggacttattattcataatttcatacctcataagctcattatgtacataacacaaatttaaatcctgaaatctgcaacctgccatcctagaatcctgaaatcactcaaaatgtgtgttggatggtgcaaacaagtacactcgtgaaacttgtgcacaatgctaatgttgaactgctgccaacaagtccattggtgctaacttctgcacttagtgctgacagatcatgtgctaactgactcgtcttgctctgggaacaagttggcacgcaacccaacgagggctaaatctaacttcttggtcctcatcagcccttttactgttcctgcactgatgcagctttccagaaccttctccttgcaggcctcgaactcgtcctcaggccaatctgcggctttcttctcgcgatatgtctggagacacgtctctagcttttgcatcatttcctcactgggctcagcagggttgtcgcgaaactctgtgtcaatgtcttcctgaaccagtaccgccgtcctcacccttgtttcatcatctgcatcagtacaggcttcgagacgtgatagaatagcctgctccgtttttgcaaacatgttcaaacgccatgcagcagccccaagcttctgagtgatacagtccaagccaatggcgttcctcctctctagcaaagccgctagcatgcccgaggcatcgccagcttgcatgcacatcacatagttgccaacggagctaagctcccgcacaaagtgacggaattcggcgacacttctcctgcggtatccaacttgtttgggactcatcgagcagccgctaatgtcggggcgtccaatggcacttttctgtgcgtcaataggcggtaggaagaccgtgatggcagcggcaagaccagaagaagaaatggaagctttcgaggacgggcccgcttgtcccgcaccttgatgcaagatcccagagatggcaatgctggtggaatgtgtcttgaagtctggccccatgcgtgtaatgtgggtaaggcgaatgtcagccacgccagcttctctgaaagccacaaggaacctgctgccttcctcttggttggtgtacacgaccacatggcacactgaggcaaacttccgattctggcctgctaagttccgcagcatgtcgatcacatcagtcgaactccaagagtcttcatcgacgagccacaacggtcccttttcatcgccagtgagacaggggtcgatgatcaccaagtcgatcagtttgccaggcacctgcaagagtaaacgaaatatgtacaagtcagttagattatgggttggaagacaagttgaacaacgtgatgctcccgactgtgatcggaaggattatgtgtaatggattttgaagtggtgaaaagacatgcttaacacatcatcctcccgattatgatcgggagcgtcaacttttcaacttgtagtctttcattttaaacatctacgcaccttacggatttcatcacactggaatgttttcgccttcatgttgtaaaggtgcgcgctgactgttgccgtctctagctggacccgaccggctccaatctggtggtcagcgtccatgaacactgctgtagctgccgacatcaggtgtggatacatctgtccaccatcgtagagacggaaaaagcgttcggaaggctctccccttttccacactggcaaatcaccgtactttactgccaatgacaacaagacctcctctgtcaggttcaacatcggaatccctgctgctccatctttcctccgccttgttaagtccatgacgaggaaacccacgactcccctgatggtgttcaacgcatcgagatggatactccgaggcggaatggggtgtgcgaaaagcagttcacggcaggcctcgaggaacttggacatatcatcacagattggttgttggaggccgtctgtcgccattgggtactcctggtcaggctgaactagcaacttcatgtcgtcaatgctagcggccagggtactgataatctgtgcctggtttttttgctggacccttgtcctgatcacagaaaaccacctgtcgagaagctggtttagcgcttccttgtctgtcgcgaaactcagcagacctcccacttgcgtgacctcggtgatggttagctcgggcatcaaaacttcatccctaggtcgtataccataccaatcccttctctgggcggtatagtccctcagccacccggagaagacctgatgtgcgggaatcgaaacatcggatcgaatgcccccgatcaagatttcagaagctgccttgctgctgaaggcgatgccacccagctgaaggggtttgttggtaacggcgggttccgcgttattgcccaagaaggcgtgcatgtgcgtgaagccctttgcctcaaggtcaagcggcgaaccagaattgaagcgtaacttcaagtcgtcacgaaaggacacaggcgagacattgtgttgcttgagaagcctgtcgatgatgtagatgacgaagcccgctgacacttctgtcttgtaatgaaccaacgaagccttgtatgccgatgcaaacgtctgcgaataaaagagttttcttgtcatgataacgatcatactaggaagcatctcccgatcataatcggcagcatcatccaatgcaagaagggattcgccgtcaataactagatatggcacacgcacagtcttcccgatcatactcggcagcatcgtccaaagcgagaagtgaatttatgtcaataacgagacatggcacacccacagtcctcccgatcatactcggaagcatcgtccaatgcgagaagtgaatcgctgtcaataacgaaaaatggcacaccaccgtacttcatcacaatcatcccgatcatgtctgaaaataacttaatatacaacatgaacctaccgcggtagtgaacgcgacattgtccacttcgtccttgatcttgaaagcttcatactcgtggacatacaagtcgtcggtcacggacttcaggaagaacttcagctctccaggtggcagcttcgtagtttccttcatgtcctcaacgaggaccgacctcatcttgtccttagcctttcccttagcccttttcccatgggatccaggtgcagcttcctcgtcgtccccctcctcttcctcctcatcgtttggcgaaggcggaggctccacgttctgtaggcgctcaacaaggtggtcggcgccgatcttctcccggtcgtccatggaggacatgatcaggaaagccttcttgtaggactcttcgtccaagctcacgactttgaagcgtggcacggtggcacccccctggctagcaacagacttcgtcaacttctcgtccccggtgacacacagagttttgaagttgttgtactggtctgactgatgccccttctcagtccgagcgggacagcctgcctgaaggtacaattcacgccacaggaaggtagaaaccaaaaatggctgagagtcgtacccctcagtcgactggccgcttgtgttatccaaaagggaaaggaggcgagcgttctgaagcttctcgtcgtacgtggcaccctccacctctgacaaccggtacacgaagcaattgcgcagaggaatttcaccagggcggtctgctgcccacttgatgaaggcttgggagctgtggtaccctccgatgatccatggctcgccaaactcccctttcacattggagatgttgttgaacgtctgttccagcctgcttggatcaatattagcccaacctggagatacattcttcaggtccttgctgatgtccatgaacaataccttcccagtggccattgtggttttcaaaaaattggcgaggagttgatcgactcgaacagggtccagcacacggattctgacaggtagctttggagggaggaacttcgtgcagtccaatgaatgctctccaccaaaatgcttgtcggtcaggaaagccttagccttagccaaatcaccttcgatgtttccaacgctgtcccctttcttctctcctgccggtgatctcttcgctttccacatagtcttcttctgagaaccaggctgaccgcgacctcttttcttaggagcggttttgggtgcatcatcgtcgtcagatggcccgggcacagtgtcgacagaacttcttgagttcaagtctgaatcctcctccaaggaatgaatcttgtgttcgggtacaggagtttgtttctttgcggctggtgcattgtctgcagcctgcgacgcagcacgcttgcctttgccctcgtgtccagcagggttcttcttgggatcagcaaacctgaagggtttgataaaacatatttgacttagtgaggggtcagaacattgaacatccagtgtctcccgactatggtcgggagcattgacatagttgattacagaaagattgcggaatattaaacattgaatatccagtgtcctgccgattatactcgggagcatagacatagttgattggtaaattattgcggcagattgaagattggacatcaagtgtcctgccgattatactcgggagcattgacatacttgattagtgagtgattgcggtagtttgagcattgaacatctagtgtcctcccgactataatcgggagcattgacttagttgattagaaaagattgaggaagattgaacattgaacatccgatgtcctcccgactatactcgggagctttgacatagttcattggtaaattattgcggaagattgaagattgaacatccagtgtcctgccgattatactcgggagcattgacatacttgattagtgaatgattgcggaagtttgagcattgaacatccagtgtcctgccgattatactcgggagagttgacatacttgattagtgaatgattgcggtagtttgagcattgaacatctagtgtcctcccgactataatcgggagcattgacttagttgattagaaaaagattgcggaagattgaacattgaacatccgatgtcctcccgactataatcgggagcattgacttagttgattagtaaattactgcggaagattgaagattgaacatccagtgtcctgccgatcatactcgggagcattgacatacttgtttagtgagtgattgcggaagtttgagcattgaacatccagtgtcctcccgactataatcgggagcattgacttagttgattagataaaattgcggaagattgaacattgctcatccgatgtcctccggactataatcgggagctttgacatagttgattggtaaaatattgcggaagattgaagattgaacatccagtgtcctgccgattatactcgggagcattgacatagttgattggtaaattattgctgcagattgagcattgaacatccagagtcctgccgattatactcgggagcattgacatacttgattagtgaatgattgcggaagtttgagcattgaacatccagtgtcctcccgactataatcgggagcattgacttagttgattagataagattgcggaagattgaacattggacatccgatgtcctcccgactataatcggaacgcccaaggaggaccgtattcaaaatcagtgacgcgcgtgtttaagttgatgcgatcgacatgactacgatgcagggaacagacttgactgcaatggttcattcacgcaaacgagtgatcgattgcgaaaggagataacaacaaaacgcccaaggaggaccgaagtcctcccgactataaccggaacgcccaaggaggacggtattcaaaatcagtgacgcgcgtgtttaagttgatgcgatcgacatgactacgatgcagggaatagacttgactgcaatggttcattcacgctgaacgagtgattgattgcgaaaggagataacaatttgaatacgatgaacttacaaagttgtcggcgatctgccctcttcgttgattgtagtgggctgatctcgtcgcttccttcctgccttcttcgcggagcctgaaggaaatggaaagagtgcggaagttacgcaatatcctatcgaatttgaaagcggcagttgcggtcaggacacaatggttgtttcgaacggtgtacatctcacagcgtacgtaattacattacattacattacattacatgttaaagtctacttgacaccgcgagggtgtatgagactctgtgctttaaacaaaaagaaaaagcacccacaaagcaaaaaaccccattacatcaggggtgtgtcgaggacaaacaaaccaaactcccaaccaccgttttggtggcgtaggtattaaaccccttagagccggacccagatctcaaccacttacagtggcggaggtaagaagctaacaaatgagaagtcacaagaagaagaaaaaaagggatgataaattacggtgccactaagcagtccagggcttcctgtcttgctcttctacaagtagaaagatagtcggctaggttgctccaaaaagacttagtgccatttccattcataaaggttctgaatgtggaatcgcagaattccacattccatacggttaagttggtatcctcatggacatgcctataaatatctgtaaacagcttctggtagcggaggcgaatatcattataaaaagggcactcaaacatatgcatttcatcctcaggtttttggaacccacacatttgacagtgtctcattgagcgagggatgtgtgctctatccaccaccctcattctttctgtgttcagccaatgggaacccattctaaactgtgctatagaacgaatctgatcctgcttatgtaaggcggatgtaaagggaatcaagccattctcatcattgctgttggctgcgaaccatttttggtatcggaggcgtttaaagccaacccttctctcatcagggatgtctctaactgcattggtgtcacttgggtacttaaacctccatgactcaaaaactttagacataatacctttgacatcgacagcctccaaaatgttgatgtttttactggatcctagcttgtggagagcacaacgcaagtcatgaacccagccagtgttggagtcaaaagattcctcaagagccattctaatgagatcctcaggttctttatgtatggtcttgttccagaagcgcaaagcttgtttaagccaagcaaaacacaacggggttctacccagctcttccatgataatattagatgtagtagattggcaaacacccaacatttgtttaagtatacctctatgccatttctcacaagcatggtcatttgagataagtgtgttgttcagaatagaaggagcccacacctcacagccaaaattcaggataggttgtacaagagaatcaaacaggtgggtgagaatatcaatattgtatatctccatagtatggcatcgcctacggagcatgtggtgtgccttttgggccttagtgagcatcctagaaaaagcagcttttgcacgattgcttgagtcaccatccacaaagagggatcccaagtagataaaagataactttgtagaaagttgtgctccatcatagacaaatttgtaatcaggatccatgcgggcctcatcacagaattgcttgttgaaaacgacaatctcagttttctttatattcacagccatcttagtagcctcacagaaatctctcagacagtcaagcatcgcttgcatatctgccggggattctgc

SEQ ID NO: 283 - DNA, 21227 bp, unidentified
  misc_feature 1..21227: note = Fanzor polypeptide
  source 1..21227: mol_type = other DNA
ttcaacggatccgtcttgcatctggtgggggcaaacaacgagatgcgaggttctttgtttcaaccggcattcgtcatgcagagagaggtgagcttggcttgtaccaaagaggctactcggaatatcttcgagaacctcttcaacctgctgcaccccccaacgttgcccaaaagcaacgatctgcagtctggatgattataaggtgtgtcccactttatttgagaactacagtcggcggaacagtaaaatgaaacatccaaaaaacggtataaggcggtgacaatcatatattgtatgagtggatggtcctataaaatgacccgtccagcaaagaaacctccttacatgacgcattgcacatcaacaaagaccccgtgttcttttgggccacggtactggggaagaggcgatcgcttaagtgcggctggtccttcaatggacactctcgaaagtaccgacgaaagaacgatacggagtctgcaggatggagagccgtgatctaaaattctcgttaacatcctgcaatttgttgattcaaaatcgtattggtgttccactgccccgtgggttgctacatcattaggttacaccgtaaggtgtgccgtacacgaggcggtttcattttagtattccgtcgactgtaggaaacgctgtcatgtcgatactctttagggatcaccatgttggggaaggggattccgtattgtttgcaaagatcctcattgagacgcctgtcatgatcgttaagggaattccactgctcgacagtcatgcttgacagttcgtacctcagttgcttctcaagtgcttctgcgcgctcagtctcaatcttgagtctagcaacatctgccttatttcgatcgcgctcagtctcaagctcaatctccagactattcactcgagaagcatctgccttatttcgagcgcgctcagtctcaagctcaatcttcagtcgagcagcatctgccttatttcaagcgcgctcagtctcaagctcaatcttcagttgagctatgtaaataaaagccaaggtagcgttgcagataggtattagtagagacttgtcaatcatattgattgattgtttataaagttgaagaaatctcttctcgttttgccacggtaatatatatagcttgaatagttgtatacaggatggacacaaagaccgtatcggagcttagggcgatgctcggcacccctcaagctgatgatgcgatcgaagaactctaccgccgggctgaggtcaccgaggcagctgctgctgtgcctcctcagcctgaacatccgacgtacgtatcggcaattgttgctcgcactctcttttcatgcgcagttcaagctcgttttggtatgaggccgattttgtaaaaccgttgaatttaagctacccgtatatcctacagtccgcggaacagtaaaatgaaacatatatcagatggaaataaatgtacgacatcgccgttagaaaattggcgttaagaatggtcgctgacttgggtgtgttaaaaacttctgtgtttacgaacatcagtcgttctactctgtggaggtggaaacgctttggtgtaaatcgaaaacgacgtgaatttgtaagcaaactttttgagacgaacagagatttgttgaaattgtttttattgtcaactcaatgcacaaccgcaagaggtgttgttgcatttttcaaaagtactcacaatttacgattatcaactaaaacagtgtatcgtttcataaaactcattggttttacaagaaaaaggagcaaactccgtggacagtgtaaaggggacttagttccacttgtcactgaattttgtagtagatacaaggatacaatcaatgctgggaaaattttagtatcagttgacgaatgtgggtttagtgagcgtctcaagccacattatgggtattcccctgcggtgatcgtctgaagacgtcttggtcagtcagtcagtcagtcagtcagtcgtcgtcttgtggtctgccatgtcaaaataattgtccaactctctcagactgcagccaactaactacttgaagcatgaacaaagggtgcttgattgaggcctctgcctgatgtggagaagcccaagtgttacagtgagaatcccaagcgttacagtgaatggtgtacgcgagtcatcaaaatgaatccaatctgcccgcgctcccccttcaaaattcccatagtgttgtcaagcagaagtctgcttgcgacgacacatgttcccaaacacgtgtgtaaacaagtcagagcttcatgacccctttaatctgagtgagtagtacactcgacggaatactaaaatgaaaccgctttctggagtgtacggtacaccttatggtgtaaccttatggtgtagcaacccacattgcagtagaacaccatcatgtttttttgtagcccatcaacaacacgcatccctgcaaaatggaagcggtctcccttgacccaacagttccatgcagtgcagccttgcgattgtgagagcagaggagcggtcccggtccgagtaagtgctggtttctggagagaatcgcagtcctcgtacctcagggtaccgcttgatcgatttgttgtcgacaagagagggggctaagccacccctcctgtgtttttcttggatttttttacgtgtgcagtacaccctcaccgccaactggtcgcgataagagacctttggagtctccttcaatggggtgtgacccaacaactcgtaacctagacaaatctgaccttccgtggttatttggacacttggaatcttgtaaacacattccttcttggcaccggtttcccaagacacgagagtcgtcttgaactcatctgtcacatgaacctcctctttgaagaggcgcttgcaggaagcgaacatagatcccgtaggcacagctacctctcctggtccggtagccttcagcttcgtgattgcagaaccatatgctacgcgaaccctcaggttaggatgatccaacttcatgttgcgcttgatccctgcccaaaatgagtccatagccttgcgcttgccaatgtacctctgaaagttgtctcgggattctctgcgacggagtgccatcctccaccactcgtcggaaaacgtagcgtaatttttcaagtaagccgagatatcatccttcctggatgtactcaacgctgctccattttcacgcagagactcccatctaggaatcatgtctgagaaacgtttttcttgctgttttttctgtttcttgataccagacttgtggtaaaaagctccgcgtgtaagcttccatgtcttgcttttgtcgtctgccagatacgtgactgtagcgatgttgctcctaccaggatccacacccagaacgacgatacccatatcgggcaatgtcgttttgagtttatggtcatactgttctgagacgctcataccttcctcgtcacgagacctcttacttgtcttcttcagatcggatacacgaacttgtactgtcttgctgtactgcatgctcaatgagactccgtcagtacagatgctacaatcgaacacccaccccgtcttgacaggtggtttcttgaagaaggaacctgcgactgtttttcgggcgttcacgagcgtgtcatacctaccctttgcatgtctgtactcgtcagtagccttgatatccttaacgtcagcatcgtacttctgttgggccaacttttatgcctcccattcaccaggaccacatgattttttcttcttaactgcaggcttcagaggcaacatgaagcggtcgggatcctttacattttcccactttgaaagctcgacgatgtttgggtctttggggaacacgtgcctgaacaggttcacgagggtcttcatgtcaaggcggacatgcgcccgttggacattaaagatgggcatcaaccggatacgacgtgcaccaatagcctccaaccgtgtctgcatccaataattgaaccggaccatggtcgggaagtccatgtctttgccatagtcatcataaagtcgacttccatctggaactttcagcctgactcgaacttcacggacgtactcctgaacaggctctggccaagattccatctcctgtatttcttgttggatgaccctcatcacgtcgtacacacggatggtcttcggagctcccagtgccttcaaagtagccttagtgaggcgggtcagacgaggtaccaaaggaacccatgcgttgttcgacacgacagtgctcaatgtgtgaccggcatagtttcaaaacctggtcgaaatagatagggtaggagttgatgtagtcagggtcatcgctaccaagcacctttccgattacgtctttcacggcttcgtatgatattctactctcttcatctggaaagacgccgtcaactccgatccttagccaatccttccagtaggtatccttcatatcgtacatattaggaatcggcaggtcgccctccatgagcctcgtgacatggaaagtcagcaccagactggaacgctgtaacatgcgcctcgccacattgacgagctgatccacatgccccctgaacttaccgaattcttcatcgtcaagactcattgccttcttcagggcgcatttcacgacgcacatcttttccaccgtcttggactctggagggggtctggcgatgagaccattgtcttcgcataaacggacaatatcgtccttcttgtcctttgaggagtatgctacttcggccaattttagtagctccttcaatttcgcgactgtcggaggtttcgttgccatcttacataatttgtacatcacagaactctttatacaaacatcacatacgtgttccatacgtggtcaaaacaacccataatgatttatcagtgaggttgctgaatgctaaggaaatcatatcagacacgtgcgtctttgtattgtttggtatatagttcaatcgacgaaagtccttcttcaccttagcgaagcacagctcaatagcattgaattctggactgtaaggaggagtgtaacaaatatttacggggcttctgaggaccaagttcttatggatactggtgttgtccattattactactgaattattgcacaaactcaatgagtcaataaatgcagcgaagttcgtcttcttcacagatcctttcttcacaacgaactccttcctaccatctgaaaaaactgccatcaacaaactatggtgtacccacccaccagtagttttaacgataacaggttttcctacaggggaatacccataatgtggcttgagacgctcactaaacccacattcgtcaactgatactaaaattttcccagcattgattgtatccttgtatctactacaaaattcagtgacaagtggaactaagtcccctttacactgtccacggagtttgctcctttttcttgtaaaaccaatgagttttatgaaacgatacactgttttagttgataatcgtaaattgtgagtacttttgaaaaatgcaacaacacctcttgcggttgtgcattgagttgacaataaaaacaatttcaacaaatctttgttcgtctcaaaaagtttgcttacaaattcacgtcgttttcgatttacaccaaagcgtttccacctccacagagtagaacgactgatgttcgtaaacacagaagtttttaacacacccgaatcagcgaccattcttaacgccaattttctaacggcgatgtcgtacatttatttccatctgatatatgtttcattttactgttccgccgactgtagtagtagtagtagtggtgtacttcctcagttgcaaccttccaaaaacgagtgtaaacgaatcgagtttatgaaccttacagcacgcacattttcctccttttaaaaccaacaacaacaacctttgataaaccaccaaataactctttcccgtcgtcatgtcttacatgtctgctgcccaaatcactacgttcgtcgataccaccaatatcttcgacgtcgttcagaagaaggatcgaactaagatatcccacagcgccaccgtcgctcagttgaagagcatctgcaacgcagtcatatccctgaccagcgttcctgattgcctcgccgactctgtcggcgcaatgaagatggcgcacaaaaagtttctcgaagattcccccaaaggggagaaggagcctctacaggccatgcttctccctattgccgtcgctgctgcggatgccgtcgctgataattctgcgacttcctccgtgcttgccctctccagtgcctccgtctccctccccgaggacgacaaaaccaccgaggacgttggcacggggtccggcagtagcggtaacaagcgcccccgcgccaatgcttcacgctctgcttcacgctctgcttctgctgttcctgctgctgatcctgctcctgctcctgctcctgctcctgctcctgctgctgctcctgctgctactcctgctggctcgttctcaacgtgctccctgtcctcctccttggcctccggtcgtgttggtcgcgggtccgttctaaagaacgagcttcctgttggctccaaacacggtgagttgaccatcgtggggtactcccccaccctgggatgcagtgccgtcaccattcacggcaacccgtgcggtagaagacaggtgctattaagcaaccccaatggtgggacattcaccactggcaagtgcgcgcacctagcgtgcatgaaccagactccctccaagcgtgaggcgtacctcgccaagaagctcgctgctatcgagctctcaattgagcttcgctccctgtccctcagccagcagctttagttatatactcagttatttagatactcagttagatactaaaacctcttttttttgatacatttcttagagacgagaaaaaatggtcctgcctgtatgtactgtactgtaccgtaccccatggtccccatgtgaattcccccctccgtttgcgtgtgtgttccatgcgtgcgtgcgtgcgtgcgtgtctcttgttctcctgacgtcggcgtcttgctccctcctcccctcttgcacagacaaccaaccaaccaaccaacttgctccgtcccagcctgcatctatcatccgcggcgtcgcgtgtgtgtgtgtgtgtgtttgtgtgatttcagttccgtaaatcagtagtgtgtctgctggttgatgttacactgtgggctcccctccggtcgcccacccgctcggttcctcgcggactcctttgtgggggctcccctccggtcgcccccggtcgctccgctgtggggaagaggtgaaaggggctccgccacttgtttaatgtggtacggtggttctcatccattgacaagcagttttgaggttggttgcttgaggatgagaacaaccgtgatgtagaatgataggtttccctgaattttgttactttcgttatttttttatgtggagggccaaagcggcacctgtgccgacacaggtgccgccgtgatgagagtggtcggtcggtcgctctgtgatgtgatgtgagtcgacacaggtgccgcctgatgcgaggttattttacggctgcatggcactggatacaccacgtacgtgtactgaggaactgcaagacaaggtggcatgcgggcaagacaagatgcacggctgttacacaaatctgatggcggaccacaagtctggcacctttcaagtgtcgctcactcgctcaaatcacactacgtttacagtgagaaagccgtgatgccgttgctagcagagaaggcctgctgcttctggttgtggagccacaggatgtcgacgccaccgacagccagcacgtagctttcaatccacacgatgaggaactcattgttgtagactgggacgttcacatcctctccggtgcacaatgagacgttgacaggcatcggcagcgggttgccgttctcatctgtggtatagatcttcgcaacgttgttgtcgatcgcctccactcggacctggagctgattggtgatgttgaagccgttgacggtggcattcttgtacgagaagcaccccttggctgtcatttctgcacagcataacgtagtcatgtcagtgttgtgcattactagtactagaaaagtttacagccaacagtaactaacacacactactgcacttttccgtcgcttttatcttgtggatacagattgacgagacaatgaggatgcgcaagccgctgtttgcatgtggagtcagatggacgacaatgaggatgcgcaagccgccgtttgcatgtggagacagatggacgagacaatgatgatgcgcaagccgccgtttgcatgtggagtcagatggacgacaatgaggatgcgcaagccgccgtttccatgtggagtcagatgtttttcgatcgtcgtcgtcgacagtgttcctccgtttgcgtgtgttcgtttgttcgtacgtacgtacgtgtgtgttgcttgcattgattcattgattcattgatgcatgcggtcgatggatgcaaatgtgcgtgtgtgcatcttattcctgttcacttgcgtgagtcgtgagggctccccttcgtacgtcgcttgttccgcgcctacgatcactaggctacttctgcttgaggcgtatttaatgtgttttgtgcattgtgagaggcacgtaaatacacacaaggaaagcaccggaggggtggcttacgcttgaggggcaccatccaggttggcatgaatgtgccaaaaactcagacatctgggtgatcttaatcagatgaatccgacatctcgccaaattgtatacagttgttctcaaataattttgggacactcagtataatttgaatgatatcccctgaaaccagatacaggtccgtggttcactacaaatatgttttgaggagtctgaggaaggtttgtaatatatacaacgtgtccaagagctcactacatagatgggtcaatgctgatcaggtgggtaaaagtaagcgtttaaaacgaaaaaggaaagaattgtccatgcttttacgttccacgatatccaataatattgtccattgacgtcaacctgtaacttcgattacttcatgcaaatatgttgcgttatagaaatgtggaggtataaagacttgtcaaaatatatgattaatacgagagattgggttaggcatgttcgagagagcctgtctgcagatccagattacatcaaaacgttttcggggtacaatttgtaatggagcatggggtcgtgttggtacatgaggctgaccaacatgatgacgctgctgaacttgtagattatgaaggggatgaggatgaggagcgtgcacctgggcgagcgatttgtgtggtcaagatgaaattgagtacctttattccccatgattggctccgtaaaaagatagacacactggtactggacatgaacaagttgcttggagagggttatattttcgcaaatttccacattgctcatctttttgagaatggtatcgctgtccctcctgtaaattgcaacttcttctaccggtgccttcttgcagtcagtaccaacaaatgtaaggggtcgactcttggcgaagacttcgagagtagtcgtcttctgttcgacttgttaagagagccggggcaatccaaagttgacatcagggggaacgcgaagaaccagatcattgcagacctgtctattctcatggccacaatggcctctaatcacctttggaccaaccttgagcggcgaataacgacgtacttgaagtggaagtacccacaaattgcaaagcgcctgcggtcggacatcgtggctgcagtgatcaagtgccctacaaagattctcgacgtcatattcaagatgagcccccatgtagccaagctgccaaccaagctgccaacagctcgacttcgctcggcaaagagtgcagtggctcttgcgaagaagagggtcggtaggaaggaaccagaggtatcccctttgcgagttaggttgactaaacttcaagcgaggtttgaaaagttgagcgaagcttggctctcctccaagaaccatagggtggacgaagataacgcgaaacgcttctttgcacgcgacgtggcattctgtctcaggggggttctccctttaccatccggaaacacttttgcgtctcgggctcacatgaccctgcctctgtaccacaagatattgtcggagaccatcaaagaaaaacgaaaaacgaaaaacgaaaaacttcgcacattctcgttgttgccttacaaatctggattcactctgtcgcacattccgatttcgaaaatggcctttttctatatggtcaacgagtgccacttcgattcatgcaaggcagacgttgcttcgcaaacctcaagaaagtggagacagtttctcggaagttcggttaccgcattgtgacagacggctttgcagtcagcatcttgatgaataagcctacgtgtctgacatgttcgatgcctgcagactcgttctctacgcgggcgcatgagtatgtgacaacagacgagggtggcattgtatccttccgtgacaatgtggtagtggctgcggtagacccgggtgttactgatatcgtgactgtaacaggactcgacggaggtaccaggtcgtacagctcggcgcaatattatcgcaagggtctgatcttcaagtctcagcgtcaaactgacgtttggaacctcgagacggctgacatcgtcggtgatatcattccggatagagactcttcgagatctgaacagattggtgcgtatgccaggttttacatgggtgccgccccaattcttcttgcccatcgtgcttcgagggggtaccgaaacctccgctttcgcaggtactgcaaaaaacagaaactcattgttgagatagctgacttcgtagctccgagggagaagagcgcgaaggtactcgtcggttttggtgattggaaaggtcaatctctaggcggacttgtggccctctccaagctattcgtttcgagcttcgtagccgaggaaacgtcatcatggaggacgtcgatgagttcagaacatctcaacgatgcagctgctgtgagaaccgcctttgcaacatggtggcactcactcatcgtaagaagcaagacggtactggttgggaatgtacagaaggacgcaagcggattcacaagattctccactgcaaaagcagtcaaagcggagcgccacgccaacagagcggtggtaggctccactgcgggaagacttgggaccgcgattacattacattacattacattacattacatgttaaagtctacttgacaccgcgagggtgtatgagactctgtgctttaaacaaaaagaaaaagcacccacaaagcaaaaaaccccattacatcagggtgtgtcgaggacaaacaaaccaaactcccaaccaccgttttggtggcgtaggtattaaaccccttagagccggacccagatctcaaccacttacagtggcggaggtaagaagctaacaaatgagaagtcacaagaagaagaaaaaaagggatgataaattacggtgccactaagcagtccagggcctcctgtcttgctcttctacaagcagaaagatagtgcgatgtgaacgcttccaggaacatcctgatgcttacactcaaccaagtctttgggagagagcgacctctcgcgtttcgccgagacgcgcagagaagttcctcgaaaaccccaccaccccctgatactgatatggggacacagacggttgaacggtttaccaaagaggctactcggaatatcttcgagaacctcttcaacctgctgcaccccccaacgttgcccaaaagcaacgatctgcagtctggatgattataaggtgtgtcccactttatttgagaactactgtaaagggtgtcccactttatttgagaacaactgtaaactgtacagctccatccatacaacgaactagacaccgtgcgagaaaaaaagaaatcaggccaaaccatttacaataatagctcgaataacgtcagaacgttttgtaggaaaaatcaaatatggacaaatgtctcatggtcattcaagcatccactcaaagtgttgctgatgtggatagagttgtttcacgtgaagcctgctataatatacctgtgattctgagcaatgagatctgtgaagacttcaacgacatagaaattgatctgcctcacatgcgaacaactggagaaccagggagattgttggtaatgaaggaaagtgctttcttgcatgcaatttgtaacatgtgtcaaatatgtccacgtggcatcgaaatagacctcatatctgttgacatcttcagactacatccaaatgaactacacttccttcatgtttgcaataaacataaattgcatttgaacaagtatctattcaccaattagtcttgctggctgtgaagaggagaataaggttcgttacagggtctgatgcgttgtttacaccacttccacgagacgatgagtgacgatgatccgccaccgtgtgtcatgaatggacggacggacggtgtggatgcgacagttttccagtgttttgcgtgtgatgatgccttgacaggtttctgcagctcaattcccctgccccactccgtggggcccgcgattaccctatcgatatacgagatctattgtctagcagacatctgcttgacatgtgatcaccgtttgcgattactttaccgggttttccgtcatctgtgagtgatatcttacagtatcgaggtattgacacaggtgccgccgtgatgcgagaggtcgccatgtgactcgactcgactcgactcgacaggtgccgccatgatgcgcgaggtcgctctgtgactcgacacaggttccgtcgtgatgcgagaggtcgctctgtgactcgacacaggtgccgccgcctgatgcgaaagtcgctctgtgactcgactcgacaggtgccgccgcctgatgcgagaggtcgccgtgtgatgtgactcgactcgacaggtgccgccatgatgcgcgaggtcgctctgtgactcgacacaggttccgtcgtgatgcgagaggtcgctctgtgactcgacacaggtgccgccgcctgatgcgaaagtagctctgtgactcgactcgacaggtgccgccgcctgatgcgagaggtcgccatgtgatgtgactcgacacaggttccgtcgtgatgcgagaggtcgctctgtgactcgacacaggttctgtcgtgatgcgagaggtcggtcgctctgtgactcgacacaggtgccgcctgatgcgagaggtcgctctgtgactcgacacaggtgccgcctgatgcaagaggtcgctctgtgatgtgagtcgacacaggtgccgcctgatgcgagaggtcggtcgctctgtgactcgacacaggtgccgccgtgatgcgagaggtcggtcgctctgtgactcgactcgactcgactcgactcgactcgactcgactcgactcgactcgactcgacacagatgccgccgtccttgatgagagtggtcgccgttcctctaaaaacgagtgtaaacgtagtggcctaagccccctcacccaaatcctgtgtagtgctggcggcggtacaatcgatcgccggacatgataaaaggcccgacgatccccgaaactgcataatttccttttgttttgttctcctctctcttccttcgaacacgaccgaccgacatcttcctcctttccataagcagcatcattcatcgagcctcgagtgaagtgtgtggctcacgcccgacagcatcgatggggattgccaaaaccctgatgtctgataacacactcgaggttggctaacctttcggatcgatgagagtgctgtcaaggtagccgccacagcttgcgcatacgagcaattcctgtgtcaaaagaggaatataagactcgcttcttccaagcttggaaagctagctaccttggcactctgtacgatcctttagggttctttgaagccgccttagtccttcctttgctttgctttgctttctcccgtccatccttattttctgaacaaatcttcctcatttctagaagcagcattatcatcgagcctcgagtgcagtatgcggcttacgcccgacagcatcgatggggattgcccagaccccgatatctgagtacacactcgaggttggcttacctctcggatcgatgagagtgctgtcaaggtagccgccaccgcttgcgaagacgagcagttcctctgtcaaaagaggaatcgtcagactctgcccttccaagctgtgaaagtctcctgggcactctgtacgatccttgagggttccttgaagccgccgtagtagtagaagtatcatgatgatgatggaccgtagtagtgtgtgatccacatagcatacttcgctgcatctgtttgacacagtttccgccttgatgagagcgagtggtcgtcgtgtgatgtgactcgactcgacatgatccgccttgatgagagcgagtggtcgtcgtgtgatgtgactcgactcgacatgatccgccttgatgagagtggtcgccgtgtgatgtgactcgactcgacatgatccgccttgatgagagcgagtggtcgccgtgtcatgtgtcgtgtggaggctgatggacgaggattcttcgacagccgccgccgtgcgtgtgtgaggatgcggtcgggcgggcgctatttacacatcccatccatcatcccccttttgtttgtgagtcgtgagtgagtgagtgcactacttcggattttgaccacctgattccttcaccaatctgaactacaaatgtgacgtgtttttcaagaatcatcgaatcaagcggcattcctgccgcctttttgttggctctcagagtgtatcaggtcattgatatgtgaaaccgagtataaaacaacacgtcgctaacatgtcacaagataacactaaacccatcacaaatggggtcaggatccaccaccagcctttctactatcagtagtattccttctgggctccgtttgagtcgttgtcctcctgtgaacaagcgtccatcttcttccgagcatgagatcttttacttgcacgaaaagtttgacctctccaaagtggactccctcttggactcccagggcatggtggatctcaagatcaatgaccgtgataagtggaaacaaatcgcgagcacgtgcatggtcgcccgttccttgggaggctacgttccggttcgttattatatgcacgagtcccaggatggatatggtcgcatgaaaagtcgttttgatgcgaccggcgtgtccgctgttccgtacgtgaggatgggtcgtgaggcccgtgctgtgctcgctggcgatttgtactgggatgtggacatggtcaattgccaaccgagttttttgtcccaaaagtgccagcaatacaagatcaaatcaccactcttggatcgctatgtcaacgatcgtgaagcttctctcaccgaggtcatggatgcatgtggtgtcactcgcgaagacgccaagaatctcttcatccgcctcctgttttggggcagcgtggatgcgtggacgactgactgtggtctagaagttgatcacaatcttgtgcctgtctggatccacgccctcaagaaagagctccgcgaggtggcaaccaatttgatggatttgcccatttcagaagttgagatgatcggccagatggttaaaagccggtccgcgtgtactcctgtctcgtttggttctgagctctcaaattccggcgaccctttggccacttttatcgcccttttcttgcagagcatcgaacacgaatgtgtttcagcactcgtgcacaaagtgcatggtcatcattacagtgttggcggcatcatctacgacggcatcttggtggacaagtgtggttgcatgcccattcctgatgatgacttgctgcttctcttggaaactggagtgagtcgacgcaccggctataccatcaaactcgcagtcaagcctttgtcggcctctccgcattggacgaccccccctccccttcaagatacctccaataatgcagaatatgaggattggatgaacggagctgagctgctcagctatgatgaagtcaaacgcgattgggaaaagtcggcgttcaagatcatcaaccaggtcgtgtacgtgcgcattgatgggcaagatatccgccatgtcacatctgacaagactctgcaagaggcgtttcgtcacttgggatatgtcgacattacgttgcgcgactctgggagcgtttcggtaagccggacacaaccattcattccgaggtggatcaaagacacatctatccgcaagtatgatgacatgaagcttatgccgccccctatcgaggttggaggcaatgtctacaatatttggaacggtttcgaagtcgatcgcgatgtgtcgtcacatgatgattcagtcatggccgaccatccctcggtcgaggtcttcatcgatttccttcacacgttgtgtggcaataaccaagagtgcacgaattacatcctgaactggatcgcgcaaatcttccaacaacctgctcagaagaccggggtggcaatcttactcaagggcgaggagggcgtcggtaagaatcgtgccaccgaccttttgagggcgatggtgggcgccgacaagttcctgaaaactgcaacaccggccaacacgctctatggtcgcttcaatcgccaacgtgaggggcgtttcctcatcgtcgtcaatgagtccaatggacatgataactttgcagccaacgatgtcatcaaggacatgatcacatgtgatcagtttgaatgcgagtccaaaggagtcaatgcatacaccatgcagtgtttttctcgcttcatcttcatcaccaacaacgacaactgcctccgagtgaatcctgataaccgaaggtatgtcattatcgagacatcgtctgtgctgaagggtaacactgagtacttcaaccacctttcggggctgatcgacgatgcagagtccagagtcgcgttttacaagttcttgatggcaagggacatcaagggcgtcgaatggatccggtctaggcctgcaaccacctacatgtcgcaaatggtctccatgaatcttccgtacgagcaccaattcatcttgcacatgatccagggtctgagcgtcgagcataccaacgtggtcgacagtatcatcgattattctccctccgtgagcatcaaggcggagaccttgttcgaccagttcaatgactggctatccacgatccgtgcttctgataagcatgaaaccaacttgatcaagtttggtctcaaggtgtccaagctcgtgcgtgatgatacaaagaacctgggcttgaggggcatctccaagaatcgcaccaacactggggctgttgactatttctgtattaaggatgtcctcgatgccatgcgtgagaagatgtgagttgattgatgaatgcttctgtttgtcggtcctctcgtcaagcacacgccttctgccaacgaaagtccgttgtgggttcgttggtcgccactcaactcgtaatgagagtccccttaattgttataaggttcagcagctgatattaccgtaaaccatataggtagtgattagattacaagttatgtatagttatatatatattgtatgtaaaatgaagtagatatatatatcggtataattacattatatagggagggttccaagtacccatcacctgtcaactctacacattgtacctcagctccggcaatcaatgtaatgtaatgtaatgttttctacgacctacgccttctgccaacgaaagtccgttgtgggttcgttggtcgccactcaactcgtaatgagagtccccttaattgttataaggttcagcagctgatattaccgtaaaccatataggtagtgattagattacaagttatgtatagttatatatatattgtatgtaaaatgaagtagatatatatatcggtataattacattatatagggagggttccaagtacccatcacctgtcaactctacacattgtacctcagctccggcaatcaatgtaatgtaatgtaatgttttctacaacctacgccttctgccaacgaaagtccgttgtgggttcgttggtcgccactcaactcgtaatgagagtccccttaattgttataaggttcagcagctgatattaccgtaaaccatataggtagtgattagattacaagttatgtatagttatatatatattgtatgtaaaatgaagtagatatatatcggtatagttacattatatagggagggttccaagtacccatcacctgtcaactctacacattgtacctcagctccggcaatcaatgtaatgtaatgtaatgttttctacgacctacgccttctgccaacgaaagtccgttgtgggttcgttggtcgccactcaactcgtaatgagagtccccttaattgttataaggttcagcagctgattttaccgtaaaccatataggtagtgattagattacaagttatgtatagttatatatatattgtatgtaaaatgaagtagatatatatatcggtataattacattatatagggagggttccaagtacccatcacctgtcaactctacacattgtacctcagctccggcaatcaatgtaatgtaatgtaatgttttctacgacctacgccttctgccaacgaaagtccgttgtgggttcgttggtcgccactcaactcgtaatgagagtccccttaattgttataaggttcagcagctgatattaccgtaaaccatataggtagtgattagattacaagttatgtatagttatatatatattgtatgtaaaatgaagtagatatatatatcggtataattacattatatagggagggttccaagtacccatcacctgtcaactctacacattgtacctcagctccggcaatcaatgtaatgtaatgtaatgttttctacgacctacgccttctgccaacgaaagtccgttgtgggttcgttggtcgccactcaactcgtaatgagagtccccttaattgttataaggttcagcagctgattttaccgtaaaccatataggtagtgattagattacaagttatgtatagttatatatatattgtatgtaaaatgaagtagatatatatatcggtataattacattatatagggagggttccaagtacccatcacctgtcaactctacacattgtacctcagctccggcaatcaatgtaatgtaatgtaatgttttctacgacctacgccttctgccaacgaaagtccgttgtgggttcgttggtcgccactcaactcgtaatgagagtccccttaattgttataaggttcagcagctgatattaccgtaaaccatataggtagtgattagattacaagttatgtatagttatatatatattctcattagaatggctcttgaggaatcttttgactccaacactggctgggttcatgacttgcgttgtgctctccacaagctaggatccagtaaaaacatcaacattttggaggctgtcgatgtcgaaggcattatgtctgaagtttttgagtcatggaggtttaagtacccaagtgacaccaatgcagttagagacatccctgatgagagaagggttggctttaaacgcctccgataccaaaaatggttcgcagccaacagcaatgatgagaatggcttgattccctttacatccgccttacataagcaggatcagattcgttctatagcacagtttataatgggttcccattggctgaacacagaaagaatgagggtggtggatagagcacacatccctcgctcaatgagacactgtcaaatgtgtgggttccaaaaacctgaggatgaaatgcatatgtttgagtgccctttttataatgatattcgcctccgctaccagaagctgtttacagatatttataggcatgtccatgaggataccaacttaaccgtatggaatgtggaattctgcgattccacattcagaacctttatgaatggaaatggcactaagtctttttggagcaacctagccgactatctttctacttgtagaagagcaagacaggaagccctggactgcttagtggcaccgtaatttatcatccctttttttcttcttcttgtgacttctcatttgttagcttcttacctccgccactgtaagtggttgagatctgggtccggctctaaggggtttaatacctacgccaccaaaacggtggttgggagtttggtttgtttgtcctcgacacacccctgatgtaatggggttttttgctttgtgggtgctttttctttttgtttaaagcacagagtctcatacaccctcgcggtgtcaagtagactttaacatgtaatgtaatgtatattgtatgtaaaatgaagtagatatatatatcggtataattacattatatagggagggttccaagtacccatcacctgtcaactctacacattgtacctcagctccggcaatcaatgtaatgtaatgtaatgttttctacgacctacgccttctgccaacgaaagtccgttgtgggttcgttggtcgccactcaactcgtaatgagagtccccttaattgttataaggttcagcagctgatattaccgtaaaccatataggtagtgattagattacaagttatgtatagttatatatatattgtatgtaaaatgaagtagatatatatatcggtataattacattatatagggagggttccaagtacccatcacctgtcaactctacacattgtacctcagctccggcaatcaatgtaatgtaatgtaatgttttctacgacctacgccttctgccaacgaaagtccgttgtgggttcgttggtcgccactcaactcgtaatgagagtccccttaattgttataaggttcagcagctgattttaccgtaaaccatataggtagtgattagattacaagttatgtatagttatatatatattgtatgtaaaatgaagtagatatatatatcggtataattacattatatagggagggttccaagtacccatcacctgtcaactctacacattgtacctcagctccggcaatcaatgtaatgtaatgtaatgttttctacgacctacgccttctgccaacgaaagtccgttgtgggttcgttggtcgccactcaactcgtaatgagagtccccttaattgttataaggttcagcagctgatattaccgtaaaccatataggtagtgattagattacaagttatgtatagttatatatatattctcattagaatgg

SEQ ID NO: 284 - DNA, 20504 bp, unidentified
  misc_feature 1..20504: note = Fanzor polypeptide
  source 1..20504: mol_type = other DNA
atgtggttcgaaaacgagtcggacatgctggcaagacgcggggcacgcatgcagcgcgacgacatgtccaagctattcgtgtggatcgatggcaaaaaggtcccgttcacagcatgcattggctccaacatgcggaacgggtattattaccctaataacacgtggaatatccccttacataagagtccaggggcagggacgggggccgacatccgcagcaggctctgcgactctttagacatgtccctgaagaagggctgggtgccccgctggctccgcgtccgcgacacactggaactccggttcgtgcatggagaggggacgccgaaggtcaaggtgtcgcggaacgcgccgattgacgcgaggcggtgggggaaagaactcgtcggcatcgagttccgcgcgatcgacaacatgcccacgcaccaaatcgataatgtgcttcacctcgtcgtgctcttgggcgcagccgccgtctcgcaggtcgaaaaaatatggcatgacaacgccaactctgacccaaacacccaagccttcttcgccacgcacaccgccaccctctcgccccactggaacgccgcgctcgacgccgtccgcaagcagggagcgcacgccccattacccaaggcgtacaccacctacatcgcgtcccaggcgggtatttcatccctgaagacacgcaatgcatccgccaccgcgttcggtgcgctgcaggacttcgcgaagagccttcacgcagagtactgcgcccactccgtcacagccctcatgcatccgcggtcaaacgacgaaggaccgcctgcgttctcgaacaccaaccaggaggcgtgggaagcgatgtacaacgaattggatgctacggaaaaaatattggtagaaaagtcaaaattggacgcaccatatctcgtcgcaatgatgaacagagcaacgcattctacagtcggcggagcagtaaaacgaaacaaatatcagatggaaataaatgtacaacatcgccgttagaaaattggcgttaagaatgacttgggtgtgttaaaaaccccggtgtctccctgtaaaaaaaaacctatacaccagtttgacttttcaggctactttgaacatgtacactcggacaagggaattatgttacataattactgtatgttgaaatagactttaaggctcgttagagcggttagtccggacagcggtgtcaggtctacagtcggcggaacagtaaaatgaaacatatatcagatggaaataaatgtacgacatcgccgttagaaaattggcgttaagaatggtcgctgacttgggtgtgttaaaaacttctgtgtttacgaacatcagtcgttctactctgtggaggtggaaacgctttggtgtaaatcgaaaacgacatgaatttgtaagcaaactttttgagacgaacaaagatttgttgaaattgtttttattgtcaactcaatgcacaaccgcaagaggtgttgttgcatttttcaaaagtactcacaatttacgattatcaactaaaacagtgtatcgtttcataaaactcattggtttcacaagaaaaaggagcaaactccgtggacagtgtaaaggggacttagttccacttgtcactgaattttgtagtagatacaagtatacaattaatgctgggaaaattttagtatgagttgacgaatgtgggtttagtgagcgtctcaagccacattatgggtattcccctgtaggaaaacctgttatcgttaaaactactggtgggtgggtacaccatagtttgttgatggcagttttttcagatggtaggaaggagttcgttgtgaagaaaggatctgtgaagaagacagacttcgctgcatttattgactcattgagtttgtgcaataattcagtagtaataatggacaacgccagtatccataagaacttggtcctcagaagccccgtaaatatttgttacactcctccttacagtccagaattcaatgctattgagctgtgcttcgctaaggtgaagaaggactttcgtcgattgaactatataccaaacgatacaaagacgcacgtgtctgatatgatttccttagcattcagcaacctcactgataaaatcagtatgggttgttttgaccacgtatggaatacgtatgtgatgtttgtataaagagttctgtgatgtacaaattatgtaagatggcaacgaaacctccgacagtcgcaaaattgaaggagctactaaaattggccgaagtagcatactcctcaaaggacaagaaggacaatattgtccgtttatgcgaagacaatggtctcatcgccagaccccctccagagtacaagacggtggaaaagatgtgcgtcgtgaaatgcgccctgaagaaggcaatgagtcttgacgatgaagaattcggtaagttcagggggcatgtggatcagctcgtcaatgtggtgagccgcatgttacggcgttccagtctggtgctgactttccatgtcacgaggctcatggagggcgacctgccgattcctaatatgtacgatatgaaggatacctacttacattacattacattacattacattacatgttaaagtctacttgacaccgcgagggtgtatgagactctgtgctttaaacaaaaagaaaaagcacccacaaagcaaaaaaccccattacatcaggggtgtgtcgaggacaaacaaaccaaactcccaaccaccgttttggtggcgtaggtataaaaccccttagagcaggacccagatctcaaccacttacagtggcggaggtaagaagctaacaaatgagaagtctcaagaagaaaaaaaagggataataaattacggtgccactaagcagtccagggcttcctgtcttgctcttctacaagtagaaagatagtcggctaggttgctccaaaaagacttagtgccatttccattcataaaggttctgaatgtggaatcgcagaattccacattccatacggttaagtcggtatcctcatggacatgcctataaatatctgtaaacagattctggtagcggaggcgaatatcattataaaaagggcactcaaacatatgcatttcatcctcagttttttggaacccacacatttgacagtgtctcattgagcgagggatgtgtgctctatccaccaccctcattctttctgtgttcagccaatgggaacccattctaaactgtgctatagaacgaatctgatcctgcttatgtagggcggatgtaaagggaatcaagccattctcatcattgctgttggctgcgaaccatttttggtatcggaggcgtttaaagccaacccttctctcatcagggatgtctctaactgcattggtgtcacttgggtacttaaacctccatgactcaaaaacttcagacataataccttcgacatcgacagcctccaaaatgttgatgtttttactggatcctagcttgtggagagcacaacgcaagtcatgaacccagccagtgttggagtcaaaagattcctcaagagccattctaataagatcctcaggttctttatgtatggtcttgttccagaagcgcaaagcttgtttaagccaagcaaaacacaacggggttctacccagctcttccatgataatattagatgtagtagattggcaaacacccaacatttgtttaagtatacctctatgccatttctcacaagcatggtcatttgagataagtgtgttgttcagaatagaaggagcccacacctcacagccaaaattcaggataggttgtacaagagaatcaaacaggtgggtgagatatcaatattgtatatctccatagtatggcatcgcctacgaagcatgtggtgtgccttttgggccttagtgagcatcctagaaaaagcagcttttgcacgattgcttgagtcaccatccacaaagagggatcccaagtagataaaagataactttgtagaaagttgtgctccatcatagacaaatttgtaatcaggatccatgcgggcctcatcacagaattgtttgttgaaaacgacaatctcagttttctttatattcacagccatcttagtagcctcgcagaaatctctcaggcagtcaagcatcgcttgcatatctgccggggattctgccattatagctaggtcatcagcataaagtaacagttgcagaatctttcccctaagctcagcccctacatttgggagcttggattggaggaacgattcaattctatcaatgaacagaccgaataggattggggatagggggtctccttgtttaactcctacaagggatggaaaggaggatccaatgtccccatgtaggcgaacttggaaaacaacatgattatacatggacttcagaatactgagataggggtccttgactcctagccttgctaagcaatcccatagcaagtctctgttgacccaatcataagccttcttgaaatcaacaaaagccacaaagagtgtttttttcttttctctatatttatctacaatatggttaagaatgaatgatgcatctgcagtacccctaccacttctaaatccatattggccagcggctctgaggttgaattcttctgaccaatcatctagtctacgtagcatgcaaagggagaagatctttcctatggagttgctcaccgcaagacctcgatagttgtccttgtcatacacactgcctttggatttgggtacaggtaccaaggcagctgcagcccattggctagggtaagaagtcttccagatgagattaaacaggttagtcatagcttgtacaaatcgggagttggcctcatgggaagcaaatctgtaccattctgcagggataccatctaccccgggggaggagtttttccgtagggattggagaacagaaaacacctcctgggtggtaaagtcttgacataaccatgttggtgcggcctctatctgaggtccatcagcttgagggacaaagtccctagcatccagacttggatcaatacctacttgcacatcaaagaggtctgcaaaataatcagtccaatcatgaattgtgatatctgccgtagtggccttgttaggctcacgcacgtctttccaaaaacttttcggattatgccgaagattcgtatgaaggttctccatgcgtgtttctagccacttcctcttctttcttctgagaatcctcttgtactccttgtgcatagaaccagccaagtcagagctagagccatgttgatgttctgcttggcttgctgcctgtctagcacgattgcattcatcatcataccatgcgttcacgggcccgtgcttacgcttagctacaggtttgtgacatggtgtgcatttgcttatggctagttcaatagcactagcaatccccttctctgaatcttccatagatgagctatggagtgcattgtcaagtaatcggttaacgtctggatcacgcttaattgtgtgtgcatacatctggacatagttgtctttccatttcagtttgggcgaaggtttaccaccagcaggtgtactaatagtaccttgagaaggcctaagggcagcatctggtatgtggagtgtgataggcatgtggtcaaactttccacccccgggcctgagagggcagtcatgcttgggagccacactaaacttgactcctggggtgttgagaagactaggggcggctagcgcataatcaatgacagatttcttgtccatgccatctgcaaagaaggtatgtgcaccttgcatatcaccttctgttctaccgttaaggatgataagaccagttactacacatagctggagtagggccccccccaatcgattggggggagctgtgtccatgctacacctcggttgaatggtttggttgggggctgtactactggtttgggatactggttcatctcctaactcggtatcatcattgtccacaccaagaccaacccgagcgttgaagtcacccatcaccacaacgttgcctttttcctggaagttcccaatgattttacctagagtgaggaagtggtcctctatactaatgcagtcgtcaccatgtttgtagtatgagctgttagcatgtgggatatagcacacaccaatgtgtgttccatgtatgcgaatccatgccatgcctaattcaggtgcctcatggactaaagtagcatttaggcaagtgcagacatagatagcgacccccccatccttgctcaacttggggcgaggggcacaagaaaggcatttgaaacctggaatgtggggggtgtctagctggccacgcacccctgtgtgtgaaaacaataaaatgtcgtgttttctcaccactttcattgctgcaccgcagctgctcagaacactgagttgtcctctgatgttccatgcaaggcaccttagtccacttcatgcatcagtcgatgagacacctgaagggggagccttgtcccgcaccttcaggagtcctctattgaacgaaacccacttagaggggtccctcttagcttccagaaacgctggaaggtgttccttgtgcagcttcagctcctcaggagacaagaaatccagagctgctattccgctatccttgaggaaccttcggttcctcacaatggaggaagcatcgaagctggaggatactgtgattagggcaaggcggggtcgtgagggatccaccttgcctcccatgcgtcgagcggacacaatagtaaactctgccttgtcttgctccttctgggcgtaggtgttgttggcttctaaagcctgggtgagcttagactttacagccaccgctagctgcctgtcgttctcgttgggatcttcagggatgcctgagatcctgaattgcatgtcgtaacctgcttggtctgggggggctgagcccggtcgctgtatgagtggccgactccatgatgtgggtgaaatcacagccacggtcacccacatcaacgaaggagccgtgcccgtcacaactctcttccgagcactcggcatcgaaagcgatcgcgccatcctcaaaaccatcttccacgaagatccaggagaagagagaaacagggtcgaagtcgcattcatgcacgcatccatagccgcaggacacaagtccggagtaagcagccagagaggagccatagatttcctcataccacgcacacgattcaagtcccaactcgacctcaaaagcgtcctcacagacgacctcttcccaaaagtaggacgcacgttcgaggccaaagcaatcgccctaggagcagtcgtgagacatctcgtaagagccgctctaggaaaagaacccatgtcggtactcgatcactacgccaacaagagactcatgtgctcaggtgcaatcacagccaatctcttcagagacgcgtacctactatcaatcgcaacaaccctgcgcacgctcaacgaagagttcctcaccggaccatggcgcgtcgcaaacgatatacacacgctcgtcaacgaagccaacctaaaaaatatattccaaccaagaatcatccgagaagccctcgtacgagcactcaaaggatcgcgacgcggcgatgacaatgcacgcgcgcccgtccaagaactcagcagagtctcatatctaggatacatttcacacatgagacgagtaaacaaccccgtcgacaggaacgtcaagatagcagacacacactgtctaaggccgtcgcactggggagtcatctgcccagtagagtcaccggacggacccaacgtaggcctcctcacgcacctggccacgcttgtcaccatatcacttgccataccagaacccgtcgtacaagaaaccataagacccaccatagacaaatacacgaaacatctatcaaacagcacattatccccacaagcaaccgcggtgcactttaacgacacatggatagcgatcacagacacacccaaggacctagtcgatgcactacgaaaaatgaggacggaagacaccagaatgaacacactcggcgtcacatgggacgtgtggaggaacaacgtggcaatccgcacagatgcaggaagatgctgcagaccactaagaagagtacaggaaggaaaggtcgtaccaatcaacggcgatccgtcgtggaccgaattgatacgcagcggagcgatcaaaatgatagacgtcgaagaagtagctacatgtctagtggcaatgaacgaggcagacgtcaacaatcgagacccgatcccaggcagatacacgcacgcagagatacacgcaggaagcacactctcaatggtaagcaacacctacccactacttaaccacaacaacggggcgtacaactcactatgcctagcgcaatttaaacaagcgctaggcacgaccatgacctccctcagggatagattcgatacaaacacattcctactacaccacgcacaaaggccgctggtaagcacgagtttcgcagatagactcttcggaggacgtctcgcgcacggagagaacgtcgtagtagcaatcgccacatacacaggatacaaccaagatgacgccatcatcatcaatctagacgccgtgcagcgcggccgactagcactcacagtattcgacaccatccggtacgaggagtcagaggaggaaccagaggacccaaacattcaaaaaacaaaaaaccaaattgtgtttgcgaacccacagcggctagtgtcacgcgggtacgccctatcaaccaccaccaaaacaaccacaaaagaatataaaaacctcgacgaacatggaatgccaaagatcaacaaaatgctaagagaaggagacgcagttgtaggaatggtcaaggtaccatcgaccgcagcataggaagacgtcttcacggacgcatctcaacgtctacaatccagagaatccgaccttcccacatatgtagacggcgtccacttgcaaaacatagatcagaacacagcaaaagacaacgccataccacaacttagagcatgcaaggtacgtctccgccagatgcgcagccccgaactcggagacaaactaagctcgcggtacggccagaaggggtggtgggaatgatactacccgccgtggacatgccgttctgcgcagaggacggtatcgtacccgacatcatcatcaaccccaatgcattccccaaccgtaggacagtctctcatctactggaagccgtgctagcgcgcgagggagcagtcaaaggagctcgcatgaacgccgacacattcggaggcgaaaacatcggagccgcgctgacccaactgggtctgcgtgaaaacggacacgggaacatgctcatgcacaacggacgatccggagaagaggcgaaaacacgcatctttgtaggcgtgaattactacggtcgcttgaaacacatggtagaggacaagtaccagtcgcgtgcacgaggagcagtcgacgccacaacacgtcagccaacgaagtccaagggacagagcggagggctgcgcatcggagagatggagcagaacgcactcgtcgcacacggacttgcatcgttcacacgcgaagcgttcatgcagcgcagcgatcaccactcaactaaggtcaatgccacgtcaggaacgccggcggaatggtgggccgcagcacgcgaagacccagaaggacccgacgaggaggcaactgttgaaacaccttacacgttcaccctcatgcatcacgaactcagagcattgggggtggaggcagcgcttctcacatccactgatgaattttatttatagctcagtggcgttgggttgtttgagtttttccgtgtaaaattcgtacgaatcaatgtcgagcagttgcaccaacagatgtttacgaacaaccgcccgctttcctgcactcctcgataagcgtgcacagtcgctcgaactcttcgtagtccaagaatgtagtgtgaccggtgtagcgcatgaagcaaataggaacgccgttacaacatgccaacgcggcatccgctttgcttgccagatagcggtcaaacgtgtcggcaagttcgatgattataaagaatttcccaatctacagtcggcggaacagtaaaggaggacgtcgatgagttcagaacatctcaacgatgcagctgctgtaagacccgactttgcaacatggttgcactcactcatcgtaagaagcaagacggtacttgggaatgtacggaaggacgcaagcggattcacaagattctccactgcaaaagcagtcaaagcggagcgccacgccaacagagcggcggtaggctccactgcgggaagacttgggaccgcgacgtgaacgcttccaggaacatcttgatgcttacactccaccaagtctttgggagagagatacctctcgcgtttcgccgagacgcgccgagaggttcctcgaaaaacccaccaacaccagatactgatatggggacacagacggttgaacggtttaccacagaggcgactcggaatatcttcgagaacctcttcaacctgctgcaccccccaacgttgcccaaacgcaacgatctgcagtctggatgattagaaggtgtgtcccactttatttgagaacaactgtacaacatggaaaggccggatatctcaagacaatgcggaagcggaacaatatcattctgcaaaagcctttctttaccgaagtatatagatgagctaggtatttcgagatgttctgtctgcaaatgcagaggcccgatgattgactattcgcaacaattagtgttgaaaatatcaaaacggtcagacagcatgactctttttgaagccatagcacctgaaacatgatgtttgtaaactccatggtccggtcccagactcacccattgggttaaaaggtcgacgggcaggtgtcccattatttatgtccccgactgtagtagtaaaagatcgcatccccatcctacaatgttcaagtagtacgtgaataagttgccatatcgtgcatcaccatgatttattgtacgtattgagcttgctgcaaatcgggggctgaatgagggtgtttttgtgcttgcagatggaaaccatcagtttcaatggaaaaacattgaggaccgaagcaataatcgaggatgatggcccccttcgtggtgtgacatggtggacgaggacttgtgtgtcggcgacactacgacaataaagagtttatctactgatgttgggttgccttttagttgcacggtaaaatccggcttggctattcgtgcgggaagctcttggtaggatcggattccacgtagatccgatcaacagtccatgtgattccgctcatgtacttcccattacactcatatccccatacgtcggtcaaacgcccaatgagttgtaaagtgcatttcggagatactctattgtcccatgccatattgtaaattgttccgtttcttgtcaccaattgttcaggcaggtgccctacgttgatggtgcgatcagtgggagaaggtgccatgtgggtacaatcagggatagcaaatggcagcaacatattctcagcggctcggatctctgataattgtccatcatcaatcaccgatgcagtgcccctgttcaagttctctacatcaaccactgcaacaacaattggaaaatgctcatgaagcaaatccggtctatcatgcacgatgtatacgcacttggtttctgtatgcattttacacaatgaaaaacaaaaaaaatcatagcatgtaaccgatcatgggcggctttgagaactgaaggagaacacgattacgactaacacagcgaagcgaacgtaactgggatgttaattaactgagtctcgatattctctaattattccgtcgtcgactgtagccggataagcatttcggttcgaacccactttatttcccactttatttgataacaatgacaaggagtgataataacaacaacctcgcatctaatgggtacatgaaggacgctttagcggttgtcgcgttccttatcgcattggttgtgatcgttgggagatctcgctcatggtggtgttcgcccacacagagaaacttgatcatcctcgtgctcgtcgtgtgcgggtccatagaccttctcttcacactgaacccagagtggcacaaccgaccgttcacgggggccgacgcaccaagcgggtgcatctatttccaggccctatcgatgatagcaggtatagagtacgccgtattaagctgagtggatggtctgactctacagtcggcggaacagttaaatgaaacatatagccccaacgttgaaagttcgatgattataaagggtttcccacttttttttcacgtagtacttttgattccatgttcatgtaacaaatcatggaacttctccctgcaggcccactccacatcatcgcgtttcatttatcaaacagtgatgataaataccatcgattatgcgacgtctcagaggacgccgcgaacctcatgttggtgggaaacgtagggttcaccaagcttggtattgcggtgcaagagaagttggagcctgatggaaaccttgtgaaagatgaagagttcgagaggatgcgtattcacgagggtctttcagaggcaagcaaagcggatgttctaaagaaggcgtgtcgagatcgtggcctgatggtttctggtgtcaaagctgcattgtggaggaggctgatggaggcggaagttgtcgctcgcccccctagagggtgcatcctgtctgctaaattccgttccgaaatgagggctatgcgctgcgcacgcatgtgtgtgtcaaaggccaagttagagtatcgcttgaccgagagggatctcacgacgctgagttgcgaactcaaacgaaatccgatgtatcggtcagcagcaccgatgcgttgatatcgctcgggttgcgcttgagaagcatgcctcatcccatacacgtattcgagtccccgtcatatctgcggatgagcgacgtacctctcgggagacgttgctttccaagaagcttggtgacatgacgttggattccaggatattctccgtttcggaatccgcatgcagggccagagatttgtacgtgaattctggcagaggggggggtgctgtgaaagtcgctgcagacatcattgctacaaatactcgccttcacattttggagagggctctcgaggctcgcgggtgtgaacttcgcagtgactctcgtttgtgcacaggttttgttgacaacggcgacggagatccagaggacatcgctgtctcgatgcttgagatgaagttctttcacaaccacactgagtacgcttcaattctcgacgatctttgggaagagcgtgattacatcgacgagtacgagtacgacaattaccaccacatcgatcctcatgagctgagttcgtctgccaagtcggaagccatgaggcagtgggccgatacacacgatcttgacgatgtccctgacatacctgaaagcctgcgatcatctgtcttttatctgaaggcagagtgtatcgtttccgacaccaggaaagcgtggcgtgctcgccagcctcgaattcctgtccaagtcctcaataatatcgagacggtattctaccagatcctcaagcgcactcgcgacgcagagtccctggcatccctgcgatccacactcgaagatgcagagagtggactgtctgcgcgtgtggatgccgtttctgtgatgtgggataagatctgtgagtggccacatgcgattcccggtgcgaccgtgatattcgataccgagttcaagattctcaacgcgacccatcctacctacatcgcttccgcggataagtttcgtatcaataaggaggagaaggcacgtctcaagaaagagagagaggataagtttcgtatcgagaaggaggagaaggcacgtctcaaatatatcgagaaggcccgtttcaagaaagagagggtggagaagtgtcttatcgataaagagagttgtgtttgtccggattgccaaaagacgtgtaagaccccagatggtgtaaggatgcacattgttgacaaacacatcaacatctaatgtgagcgctcagccacctgtagaagatgtctagttcgctttcataaccattattttgttgacgctcttaacgttttaacattttaacggtttaacattaaaaaattgtgtgttttcataaaacacggatgtgaattctccaatctctatttgtaccccactcttcgaacgatgttaaaacgttataacgttaattggaagtctaaaatctacccccttctcgcaatagaggagaagatgtctagttcgctttcataaccattattttgttgacgctcttaacgttttaacattttaacggtttaacattaaaaattgtgtgttttcataaaacacggatgtgaattctccaatctctatttgtaccccactcttcgaacgatgttaaaacgttaaaacgttaattggaagtctaaaatctacccccttctcgcaatagaggagaagatgtctagttcgccttcataaccattattttgttgacgctcttaacgttttaacattttaacggtttaacattaaaaaattgtgtgttttcataaaacacggatgtgaattctccaatcactatttgtaccccactcttcgaacgatgttaaaacgttaaaacgttaattggaagtctaaaatctacccccttctcgcaataaaggagaagagacgattactgattacttgagtgcggcttgtccttcaatgggcactctcgaacgtgtaccgacaaagggagtctggtggatggaggggtgtgatctaaaacaacccacggtactcgttcatcttgcaatttagatggaccccactaacttgattcctcgaatgaccccgcgcttcacaaccttcttcttctcctcctccgtagagactgtcacctgcgaggtctcttcccactcggttccctgtttgcccaaaaagaacgccttgtccaacttagtgctgaatactgaagatgtctcgtgtccatagtgggacactttccaccgactcttgaggtccccgatccacaccgcgtccgaagacgcccccatcacctcaaccacttcctctagccattcagccagggggttggcactgtccgcaataccagacttccactcggtcatcgagaccggtagggtgtcgaagattctggatcgccccggtcgacgaaagtgctcgatgagcagctgcgtcagcgcagacctccaggttggtaggatgtctgcaaggtcgtcacggcgctcaaactcgtgctcgcgctgtgggtcggggtgtatcaagaaatttgagcgcattaggacaatgatcatccgcttgacgaaggcactgtctcctccgtcgaacttgggacaatcgccttcgttgaagatcattactacaccagcctgccacatgaatttcgaaagagttccccgtgccacacgagcgcccgcaaacacgcacaccttccccccccgcaatgcgcttgatcaacgcctcgtccaacgcgatgttgtgtttcatttcttcggccaccagtcttcggccacgcccttcattggcttgagacccgcgtcatggtcatcgcggctccgggcgaacgacccctttgtcagaaattttgtcctattgctgctcccgtactcatcaaaaaagctaccaaaaaaagccagaagggtactcttcccgttgtcaccagatgtcttatcggtgaaggctaggaatttcttttccttgcggcgaccggacaggagtcctgcaaagaatgcgaggacgacgtcgcgctcctcgtccacaggcatgagcttccgctagaaatcatcgagttcatccctgcatcgcttgaggtggtggttgtcctctccctggtaatcccactttgcgcacctactaatgttgtcggtcatctcgacttttcggaacactactgtgtccctcgacgagctgtcgaagacgccgttgttgactgcaaagagatccgggttgatatcgaggttatcagcgaatgtctcgtcaaggacgagagatgcaacggattgaaggaacgcagaacgtcctctaattgtgtcgacaaacccccgaatcttctcattcgtcttgttattcttctcaacagggaatttggatgtgaactcgattttgattaatttgctgatccgcatgttgctgcagtttgaccaacgattggtagcagggtcacagtaatacatgtcgccaacacattccttcttcttgatttctggcacaaacttgattcggctgaagaattcaggtgaggcctccatgaacttctccgccagcacatcctcagtgattgaggacgacgacaatgagtcatcatcagttcccccccccacgtggatgttgatggtattgttgaccaggaagatgttctgagtgatgccatacatgttcttcgcgtgggactcttgagccttgaagatcatgttatggattgcgttgatgacctgcttgtctcggatcttgcatgcgttgcacgtgatggattgcacatttacatattggctttcacttcccatattcatgaatgcgatgtgcacgtcggcgctcttcacaatggcactgctaattgttttgccatccatggtccgcagctcgcattcgtaggggcctttgtcgctaggcacgttcttcatgaaccccgggtcttcgtggatcgggaacttgtcgatcagcgatccataatatttgtcatcgacctccaccatgtattggttcttgtggatggctcctttcgctccgttttccatattgaactcgatgctatcgtgtacgacatccaataatatcatgttgtcaatgtgcaagtggattagctttaacttgaggtcgttgatgatgcgatccttgtcgagttgcacgtctggtttgttttctttgttgtcccattgtcagacccattcggagtaccccatcgggtcatcctccttggcaaggaagcatagtgtccctagagtgatcttttgcggcttaagattggcccacaccttttcgtgcttggtgtcacagaactttgaggggcatttttttgcaaaagccttccagatctcgaggcgctgagtgtctgtgcccgtgtctactttgttcttcaacgccatcccgaccttcagccatgaatcgtatccgctggccctgtgtacatcgagtatgtccacgagattgtagagggagtccacatccattccatgatgcgagtcgaaagtcttcttaggctccgacaagttgtcgtcaccacggatcaccatttcctcctggctgtgtttggtttatgggctgtggccccccttcggatgcacacagatgctcagtttctgcacgagtgtatcgagatccatttgctgtacgtcacgtttcgcgaacgagcctgcgccaatatcgaattggtaccaggcagtgactttccacgggtgggcctcatccggtttcttcgatccgtacaagaaccacctgcctccccgtttgatcacgctttcgtcatatatctttccgggatccatttcggcaagtccaggaatgcaaatggtgctcgcgaacgccatatgttcggtcacatcgttgacgaagtgctctctgatggcgagttggatctcttggtgtgtgatgacatttggcatgagcacgtgtagaccatctttgtacacccctaagtgtttcttgtcgagtcttggatttggcttctcgaggatcacgacgtccatgtgctgctggtcgacaaagtactttgtggccgccacgagcgcgtccatgaaattctcgatatgcttctgtgtgtagatgtgctctggggtcgtctgtcgcatgtccaggtcaatgatgacgggcgaggtgtctgtgtgggcctcgacgatagacatgggtcgaccctcatccctgagcgcgtgcacgtaggcctcgcggaacgcctgtgcctgaggtccaccatcagggatcgcgaacgaaccgaacatggggtcccccatggcaccgtgggttgcctcggtgggggcagggaagctcttgacatgtgccgccaccagaagagcatcgggggatgacatatcgggtgtaatgccgttatcgttttcactttataccgaatcgatcaattcgcccttcacgtatgtgcttcgcgaagctcactcccctgcacatccaagaacacccccacccacctaagattcgcaccgcaagtcggcagaaaccgctgccatcaacctccaacatccatggacctcgtaaaaacgctcgatataaagctcgcgacaagcatcttggttgagtcaagccgtcccttgtgtatcatccatggcgcaccacacccaacacgtcgtgtacgccctcgtcgagcgcgagttcctgggcaagtccccgttggtagtcaaggtcggccggaccagccagccgttctgcaagaggctctcgcagtaccccaatggatcccagctcatttttgccatccatgttcgagatgcacaagcgtgcgtggatgcagaggcgacactgctcaggtacatgcgcggtggttacgattcccgaatccagccacgaagagatgtgggtgcagagtacttcgaggtgggcgaagccaccgtttacaatggtatgttagcggccgttttgaagtacgcatggtacggcgacgactgcggtggcaaacaggaggagtgggacactccacgtgatgactccgtgaaatccgccgttgaatctgagggatccgtggaatctgtgaaatctgaggagacggaccaggagcgtatggatcgtgagacgtacgtctcacgtgtggtgactgtgatttttgacaacgtcgttcaggctaacatcgagcgttacgatacggtgcacgcctttgtcgaggccaatgcaacagagctgtctggtgtggtgttggatcagggcgcatttgtcgattgggtattgttgaaactacccgccgccctcaggtcgagcttcaccaccaagaaagtggtatcatcgctcaaggatctgggcatccaacccatccagtacattttcgacggcctgctgcctcgtcatgccctgcggttcccagacttcactcgccacaagaaggtcatccgcttcctggatgagcggtgcattgccaccaaccccggcgatctgcggtcgcagatcgccacgaccccgggcatgtacaacgcttacgtcacgttctgcgaggaggaggggctacaggcgactgttgctgacgttgtcgagctggctcaggtggtcaaggagtgcggcctggacacgaggtacaccctgcaaaaagctaccttcgaagccatcctgctgattgagtggctcaacagtgtggtggaggtgacgggtgactcgcgcgatgctatatgggttggtgacctcaaagcgctgtggaaggagacgcatgttggcgcagaggccaatgtcttaaaccacaaattggtcaaggcatacgttgccaccaaggcgggggtggagtggaagaggattggccgtatcaagacgggtggtgggtcatttgtgaagaatggggtggtcatggggtgcacattgaggtgcgtagtataagtcaacccccgcttattgagtggctcaacagtgtggtggaggtgacgggtgactcgcgtgatgctatatgggttggcgcttcgcttcccctcccaagctttttagagagaagccgattcgagcatattttatagcacctttccaagctgcaattcatataaaggtgttccgctttgttgaagaagacaccaccaatgacaatgtccgcatcaagggtacctgaaattcccaatgtattggttaatgtaatattgtcccagatatgcggttgcgttgtggaatccatgagacgcctgcccacaggctcccctttgaagacggttcgtgcggcattgcgccgctcgtgtacgtatgtatgttgaatcaggagcacgcgaccttcgtcggtgaggacatatgggaaactgtttttcaattggtctgcaggatctgcagcagaaaagtgtgtagaggtgatgtgaaatgctcgtatcgaaacgcggtaatgctgattctcggacgcggatgtgagtggtgtgacgctcacccgaagactttcaaagtgtattggcagtttggcacacgcatttgtcagacatgtctacgggaaaacactatttgcgattttgctgtcaagaatgacctgaaggagttgggtccagaggttgtttcgtatatttgtcggggactgccctctatcacaattggcatgtacaaacaatatgtcgacctcacctacgacctcacatttctctggagcgccgatgtgtatgcgcgtgcgcgggagttccttcgaaaggatgtgggttgtttcggcgacatttcttcttattcttgctacaccgagctttgcgaaatcgcaacagcaaaagtaatcgcggacaaggaggctgcacgactcttgtgcgtctccatgcggaaggcatcgttggatgaattggatgaccacatcatgtcgtctcaagatcttgcacatgtgttcgagtgctgcgcaagtgttgtgcccaagggtcagctgcgcgacaagctggtgcc

SEQ ID NO: 285 - DNA, 20612 bp, unidentified
  misc_feature 1..20612: note = Fanzor polypeptide
  source 1..20612: mol_type = other DNA
taatcaatatcttattccataaacccctctttctctcacgtttatttccctctattaacagcctcggaattgcctataacgtctctctactattcctgtccaatactgcctagtctttacttacacttttctttacaattaaaaaacataagatgtaattggtgttttctcagttgttatccatcccataggggcaatttccccatctcatgctcataagattcggctaatccattctcttatgatctctcgcgcaattgaggcatattttttcgtcaaatttgaacatattgatccgcaaatcttatcttttcccttctcccattccattccccataatcacttctgaacttgtcgtaaaaatcagacataccccctttaaacacactaaaagtgaacattacgaatggaaatctcgggccggaaagtgaactgcttctcctccccatctctactcttccgggataagacttgtctctcgacccaatggcgcggaccagcaaccccgcgtcatttagaccgttcctacctcccccccccctcgtctcgagactggttcacgaagaaccgcctcacttactcagcaccgttatttctgatatgccgcgtcccccacctcacgctgtggcatccctgctccgatcgttcttccactctcatcacctctacccacctctcctctacctagccgatgcaacgcaattctggtcgcacttcttgtctgtctcgcgacgcacggcatgaattgttgatcgttgctgagactggacgatagttcgatcggtaactttctgttcattcctcttcccctccccccctgctcgggacgcttatgatgcgtctgtccgaatgcaagaatctacccatttatccttcacccagcctcttccactccgcgatagttcgccgtttcatcatcacccaccgtgcgcggcattataatcggattgaaaactgatccctcaacttcaacctcgtctagtgtcttgtagtgtaacaatcctgctatcgtaccgtgccgcttttttctttatactgcttaattttctgaattagtctgggtacaagcattgcttgttctaaatatccccttccatcaatcactactcttccgatatgttggcgatgctcgcctccgatttgtcggaacgatcctctggtcccctttccctgtctcgttctgctcgtcaaccccttctgtataccgctcccactacactgtgacctagtcggagagaaagcgcgacatagatccactccaggcgctcgctgccggcaggaagtcgaggggtgtgctaccaccagacacaaatacatcctcgctaactctacattcgtttccaccgcatcttctgccccgctgccccccggctccgagtgccggtccattcgattcgtgatgtcatctccccattgtgagtaacatctcacgcttggtattcgcctccaaacccatcccctccgttgggctcaagataacgtgggcgtgccctcgtccgacaatcccctctcgcaacctcgtctctcctgtcgctttcccccctttccttcttttgccgtcaagcagggatacaagcgtccgacgccagttcacaacccctccgctatttggatcgccatcctgtcaaggacccatcgcacgagggagacctctttggagaaacgaaacggtggtggagaatcggcgacgacgctgctcagcggccccgtaatccttagcgcgcacagcgatttggaattggagtgacaccgcatctccgtggtaagctcgttgttttggcagactatgattcgttctttctgcatcccccttgggggggggcgggaatgactcgatcccacgcagcccccacgtatgcctttacgcgtgtggtggactctgtccttccgcctcgcatcccctcctccaagttccggatcacacccaacctaacacgaagtgagattattctgaacacctattaagtattcttgaagacaggagtttcttcttcggcgacatcggcagaacaggtcgcatgatccagaagattgctatccgcatagaggtccctgcgcatacaaggcaatcgaccaaaaagaaacgtgaaaacatgtggttgaagaaactctctcgttcaccaagagattgataaatatattttgtacgtgcatatgctttttgaatgaacacaatgagaatcttacgcaagcttctaaacatacgagttattgtcatcatcgggatcgtggtcatggcgataatcttcactcacacactacagaaaaagaagaaggcagcaacatcaacagaatctgcaggtgggaagagcaatgtcgcttccaccagcccttccaaggagagcgaaacgtttgatgctgctcctatcaatgaggacaaagaaaaggaagttgttgtcgctgaaacaaatgatgttgatgttgatgttgatgttgatgttgatgatggcaaggaggaggattcaaaaattagatagtacaagtctgatttgagagtgtaaaagaaaaagtgatccattgttccattgttccattgttcatctatcatgtatctcatttccatcgaggggaacatcgggtgtggcaagatatccttgttgaatgagatcgagtctcgcgtgaccgccagcaacttcaaaattcgtgttgagtttgagcctgtggaagagtggacgaaggatttcacgggtgtttctggcgtggggtcgaagaacatgcttggcgagttttacaatgacaaggagcggaacgcgatgtcgttccagatgttcgtcctatacactcgcatgaaacaataccgccgtatcgccgaagacaacatgaataccgtaacggttattgagaggagcatggatacagatatgaacgttttcgcaatgatgaacctatcgcatgacgattgcgcatggcactcgtatgtcacgtggtacaatgaagcgcaaaaagccattgctttcccatgcacgaatgtctacctaaaatgcagcgctagcaagtgtctggaacgcatcggggtccgcaatagggacgctgaaatcggcgttaccctcgagtacctacaagatgtcgagaaaatccacgaacaatggttgttggattcgtctgacgtactcgtcgtggacacgaacgccgatggcgatgatgtgatcaaacgaacggccgacgcggtgtttgaaaaaatcaggaccatgtgccccattatcggggccggtgaagcttgatacatgattctcgagactcaactggcacagcatcccatgtacgcgaggaacaacatacaagaagattgcacagcacaacacaattgtgtccgtagaatgatatcccctgaaaccagatacaggtccgtgttcacttgaagatttgtaaaacgaaaaaagaaagaattgtccatgcttttattactccagtgtcttgcggttcatgtcgggttcgattgtcgagttgttctagattgacaccttgtaccgtggattggaaggctcggaacgcagattgtggctcgcgttacgcacactctgtccctgggtgttcataccgatgtgaaagccagcgttaaggaggttcacgtcgttcacatcgccctggcctgccgggttagcctgcgcccacttggtgttcgcagcgtcacggggcaatagatcctcgggtctcaaccgctcctgagggaaggttgaccccttgttcggatcgcttgagaagtaagatgagctctgtttggtcggtttggggggtaggtaatactcgttggaagcgggttcaagaggcatgaggtcgaatcgcttcatgtcggacgaggaaggagaaatacgagtcacgcttccatcctcatgttgctcgaacatttcctttgtggtacctgcaaccgggtattgctgcgcagattaaccgtcgtcggtgatcttgaggtggtgaacatagtagtaccaaacgagtccagcgagaattacagcagcaagtaatattaaaatgacacgaacctggtcactgttcatttttacacatattcttaaccagagaaaaaaaccttgtgaatcaaaagctgcattcactccaatacaatttaaagtcgtatgcgaagttggtccaatcttgaatcgataccccgcacaaggtcatccctcaaatttcgaaataaagtctccttatcctcgtccataatctgtacacgatgagcatcatatttatcgaaattatggtcggaatcagaagcacgcatctcttcttcttcaggaatctcgtcctcatggacatcaggaacaattgatacatctgttgtggaggagggtgcaactgttgcggaggaggttgcaactgttgcagaggagggtgcatctattgcagaggcgggtgcacctgttgagggggggggtccacatgttgctggggggggtgcaactgttgcaggggagggtgcatctgttgcggaggcgggtgcatctgttgcagaggagggtggatcaacataggtagccctccacacagggagcacgtccccgcaagaaagcttgaggcccatcagtgcgatgttggcggttgccgtgtcattctccctcagcccctcgagtatgtgcgtcccattacgaccgttcaggaatcggagcctcgtgacaacgtcagagatcaccgcgttattcttattcgcattcctagcgaacctcacacgatgcagcaacaccctgttctcaacatggcatagcttctgcacaccttctctcaacgcgtcctccaaacgcatgagagactcaagtgctgccgcgttggtaaccgcaacatcaaggtccgcaatcacgaccgacgtcttcccctggataacatcttttttgtggtgcgcgcgcagcacggtgaattcgacgttcttcacacacaagaggtgcaaatcggaggcgccgggaggatcgtagtacacgcgcacaaagtcgttgtccacggaaaattgcattcgctcctcctcatcgtcgcaatggtcgtcctcaatgcatcggcggttcttcgtagctgcatacatcatcatgttaattaaaaaaaaaaaaatttaacatcaaaacaaacgaattcacgaattgagaagcaaaccgccgaaccgacgcaaaaccaactcgtctctcctccgcaacgcaagcagacgtctctcctccctggcctttgcttcatcctgctccaacgcataccgctctagctcctccggcgtcatttcatgaccgacgtccgcggaggcacggtgcttctcgatgctgcgcatgtcattgaattgaggctttgtgcgcaggatggcctcggggtcgccttcgatcagcgaggatgtcgtgtgcgccagaacataatctgtgaaacccaacgcacatctctcgcttggcgcacacccatagtcgctgacgcgctcgacaccgagttccgaaaagccgaccgctgttcgtttagacaccagagacaccgcctggggacaatgcgtgacgctaagcgcatttttggcgtcgtcaatctgttggttgggtttctagggatcgtaattgcgcatccagtttgcgtagccttcgtcaatggcagggtccgtgatgcggcttttctcgaaacgagtgttgaagttcgcgagagaaaacttattggatgatccaggcttcctcttatcttgttgagattggttctgaatgaattcggatagctgctccttcatcaccacacggttggcctccgtcagggcctggaaggtagccgtcgcttcatccttgctcaaacgggagccgcacttgtcgggatgaagttggcgcgcaagcatcttgtagttagccttgacttgttcaggtaacagagaggatggtgtgtggggaaggttcaaaacgtcgtaaggatttaggcaagaccccacctcatcacctgcagcaactttattcgctaccatactgattgtttgatgatgataccacaaattacattggaatcattttaaaaaaacaaataaaaaaccgagtatttcttcactgagatacactcaacggaacatacaaatatttttgggacattcaggagattgacacaaggcatgtaaagacacaaaaattacataatgggcgttcctatagcggaattgtgattcctcggtgctgatatctcaggatagcgagtcgttccggaggctcgtactgaaggacgcaaacggattcacaagattctccactgcaaaagcagtcaaagcggagcgccacgccaacagagcggcggtaggctccactgcgggaagacttgggaccgcgacgtgaacgcttccaggaacattacaggttccgtggagtcgggggaccgcgacatagcgtcatgcaccaccgcgttgaagtccacgtacacgtgggagaaaagcgatgcagagattggggccaatgagacaacgttacaaatataatcagaaaacacggacatcaatgcgcggaacacaattcaaatagctgcaggggctttggaattgtccctggcttaaacgccactactagaatttatgccttgaaatattccgccgactgtgggaatttgtatgaaccagagaattggttgatggtgtaatgctgaaacacagagggtcaattatagtattaccattgaccctttgtgcatgtgttttatacccgtagcgtgctgcgtagcggcaggcccgcgcagcacgggaccgcaggtcccgaattaacaaaataggccgtgcgcctagcacagaataaaagaaagaaagaataatctcaagtgatgcagggagggtgccccataagggtgcccggaactagataaaaagaaaacgcttggtggtgtctaaagacaccttttttttgttgttttacatgaatggagtcttcactcccattctgatgatcttgaatcttctcttgatttgtaatgtacggtgtttttgttttcctgtttacaccaattttctttcatctacactcgacggaacatacagctagggacatttgaaaggcagacagcgtcgtctggcgcagagttcaaaacgagccccccgccttaaaaccctaaaccctaaaaaacaatgtgcgctgtggtgcaacctggaaccgagacgtgaacgctgccagaacattcttctgcttctgacgacgtggatggacgggaaagagcgaccggcggcattttgtgtgccctcctcatcacccatcccaaaaaccacagtttccggagaggcaaatgtgggcgctcaaccaaccgacccacctgggtcagttagtagcttacaattgttatcctttgggccagcttaaatgctgaaatacgggatgaagggcacgaaggattgggactttgatacaaaacctttagctgacctacccattgggttcaagggtcactggtaagggtgtcccataaattctgtctctgattgtacatgtacagtttttgaattttcaactcagaatttagagcctccggaacgactcgccagcctgagatatcagcgctgcggaatcacaaacgattggtttaccgaagaggcgactcggaatattttcgggcacctcttcttcaacttgttgaccccaaaagcaacgattagtatacagttgttctcaaataatttttggacactctgtataatttgaatgatatcccctgaaaccagatccatgtggattttctagaaagaaggcgtttcccacagttctctacggacattcaaaagaaaatgtagaaatgttctgtgacaagtacagagaaagctctaacgttgtttgtatcgacaaagcaggattttacgctggagaacacagcaaatatggacacagcaagatcggttctagattaactacgaagacaatgagtaacctccgtcgtgtgaagttcactttattactcgctatttcatctcaaggaatcatcaattattgaattatcaattattggagcacaattgtaaaaaagaagatttcattaaattctttaaaactttggtcatcccaaagaacaccacgatcgtcatggataatattcggtttcaccattcttcagaaataaaggatatatctgaatgcaaagggtggaagcttttgtacacacctccttattgcccaagagctaatgcgattgaacaaatatttggaagcatgaagagagactacagggtatcatgtccattgacgtcaacctgtaatttcgattacttcatgcaaatatgttgcgttctagaaatgtggaggtataaagacttgtcaaaatatatgattaatacgagagattgggttaggaatgttcgagagagcctgtctgcagatccagattacatcaaaacgttttcggggtacaatttgtgatggagaatgaggtcggcgagtcatcatcgttgttacatgaggctgaccaacatgatgacgttgcagaacttgttgattatgatggggaggaagacgaggagtgtgcaccagggctagcgatttgtgtggtcaagatgaaattgagtacctttattccccatgattggctccgtagaaagatagacacactggtactggacatgaacaagttgcttggagagggttatattttcgcaaatttccacattgctcgtctttttgagaatggtatagctgtccctcctgtaaatcgcaacttcttctaccggtgccttcttgcagtcagtaccaacaaatgtatgggatcgactcttggcgaagacttcgagaatagtcggcttctgttcgacctgttaagagagcaggggcaatccaaagttgacattcgggggagagtgaataaccagatcgttgcagacctgtctattctcatggccaccatggcctctaaccacctctggaccaaccttgagcggcgaataacaacgtacttgaagtggaagtacccaaagattgccaagcgcctgcggtcggacatcgtggctgcagtgatcaagtgccctacaaagaatatcgacgtcatcttcaagatgagccctcatacaaccaagctgccaatcaagctcccaacagctcgacttggctcggcaaagagcgcagttgctcttgcgaagaagagggtcggtaggaaggaaccagaaggatcccctttgcaagttaggttgactaaacttcaagcgaggcttgaaaggttgagcgaagcttggctctcctccaagaaccttagggtggacgaagataacgcgaaacgcttctctgcacgcgaagtggccttctgtctcaggggggttctccctttaccatccggaaagacttttgcttctcgggctcacatgacccttcctctgtaccacaagatattgatggagaccatcgcatctgagaacgataaacttcgcacattctcgttgttgccttacaaatctggattcactctgtcgcacattccgatttcgaaaatggcctttttctatatggtcaatgagtgccacttcgattcatgcaaggcagacgttgcttccaaaaaccatcaaggaatatgggagcgattcgcaaatctaaagatagtggagacattttctaggaagttcggctaccgcattgtgacagacggctttgcagtcaatatcttgatgaataagcctacatgtctaacatgttcgatgcctggagatgcgttctctacactggcgaatgagtatatgacaacagatgagggtggcattttatccttccgtgataatgtggtcgtggctgcagtagaccctggtgttactgatatcgtgacggtaacaggacttgacggaagtaccaattcgtatagctcggcgcaatattatcgcaagggtctgatcttcaaatctcagcgtcaaactgacgtttggaacctcgaaacggctgatatcttcggtgatgtcattccggatagagactctccgatgtctcaacagattggggcgtacgccagattctacatgggtgccgccccaattcttcttgcccatcgtgctttgagggggtaccgaaacctccgctttcgcaggtactgcaagaaacagaaactcattgttgagattgctgacttcgtagctcagagggagtagagcacgaaggtactcgtcgggtttggtgattgagggtctgggggcgacaccaatctctaggcggacttgtggccctctccaagctattcgtttcgagcttcgtagccgcgaaaacgttatcatggaggacgtcgatgagttcagaacatctcaacgatgcagctgctgtgagacccgactttgcaacatggatgcactcactcatcgtaagaagcaagacggtacttgggaatgtacggaaggacgcaagcggattcacaagattctccactgcaaaagcagtcaaagcggagcgccacgccaacagagcggcggtaggctccactgcgggaagacttgggaccgcgacgtgaacgcttccaggaacatcctgatgcttacactccaccaagtctttgggagagagagacctctcgcgtttcgccgagacgcgccgagaggttcctcgaaaaacccaccaacacctgaaactgatatggggacacagactgttgaacggtttaccacagagacgactcggaatatcttcgagaacctcttcaacctgctgcaccccccaacgttgcccaaacgcaacgatctgcagttttttcgagtataaaaaggtgtgtcccactttatttgagaacaactgtaaagtatgtgtcgtcactttacttcataacaattgtaatgcttacacaatacaatgtcggtcccctactaggatcaggcgcatacagcaatgtctatgcagccgagggtggaccatggaacaaagagcttgccatcaagcacattgtgtacgacactagaaacacctcccggaattgtaagcattactctgcctcctgcaagagaatcatccgagagctgacgcttcacgcgctcgtgcagtctgtgtacccggggacgcttgccacactgcgcaacgtcgtcaaccgcccttcggacgaacagaaactccggcaagacatcttcatcgtcatggatcgctacgagatggatcttagcaaatacggtgccattatgcgacatcaaaacccgccatgccacaacttgagtcatcgtgtggccaagaaggtcgtgcgttgcgtcctgaacctgcacgccgtcaaggtgttgcaccgagatatcaagccccataacatcttgctcaacatatcgtcggacttcgatgtcgttctgtgcgacttgggtatggcacggcagatgacggaggaccccggcgacgccatcatgtggaccgattacgttacctcgctttggtaccgggctcctgagattatggacatgttcgagcttgggctctatagcaagtcctgcgatgcgtggagtctcggatgcgtcctcttcgaaatcgccacaggcggcgatgtgctcttcattgggacctccgaagcgcacgtgctagtggagataattgaattgatcggggagccccccgagagtttcctgagaaggttcacgtaccgcactgtttattacgaggacgcgtgcaaagaggtagaagaagtgaaacggagcattctgtctcgcaggcgcgatgagaaacagattgatgggcggagcagcgcgcacacaccaaaactgtcgattcgactactgatcgagcagaagtgcaagtgggatgatgtggtggaacgcgaggccatttgctccctgatagaggacctcgtctcatgggatccggaacggcgaacggaagctctgagtttcaaaggcgaaaccttctctgccaaggaaggcgggggggatcccgtatcgcgtgtgatgtccatgctagtcagcgactccaaaagccaacgcatgttcgaggaaatatttgtgacccagaaaaaggctcgggaattggtgagcattgcgtgcatccaagtaaacgaaaatctacgtcgggcgtcggggttcaatgtggaggatgaggacactgggtactcgggaacagaagttgacgaggtttcattattcgagacgaaccctcccggaaacttgattcatcatggcgatgaaacggttaagtccgaaagagaatgatgaggagacacgggagacgatggaggagtttgaggatcatgaggagttttttttcagatgtcgtggaaagctcaggctcgggcttctgtttcctcgacgccgcttgcaacaattcctccttcactcgaatagcttcgcgaacaatgtcgctgtccatgtctgacgccctcatgatctccagagccacgtactgtgtggaaacgccgcggtgcagcttgtactcggatgtaatcgctcctgtttgtttgtctaccttcacggtcatcttgaaggccctgtagcaaggttcgggaccgcgtgccaatttagtcaagtgagtaaagtgcgtgctgacgatgttgatagcgttctcgaaagcgccgatcttggaggccgtagctacagcccccgctatgccctcgacaggatttgtgctgctgaatatctcgtcaatcacaacgagacacgtgagccctcttttcctggcctgttcaatagagagcacgcaccgcttggcgcggttcatctcggcctggaagagggactccccacggacgtggctgtcagggacgttgatgtggctgcacagcgctccgaaaggccgaagctgcatgcgcttgcaaggtacaaacgataatgtctgtgccattagcacagataacaatgtgctcttcattagagtgctcttgcctcccgcgttgggacccgtcaagatagcgtttcgactcaggggtgagacccacaaaagacaaggcggaacgttagccaataagtaaagggaataaggtgatcaaaaaagtaagactgtggtgatcccaaaaacaagagtgatagaggaatagagaataagaggaatgtttgtgagcgtaatggcggtggcgataatgcggtggcggttttttgtaggaaaaaacggtgaacacacacgcttctagtcgcgtaaggtgttgttgctggtttcatttaaaaaactttgttttgaagtgctgcgtcactctcgtttttattgaattctgtgattcgctgaaatctctcgggtcattgttgtcgtattgttggtgttatctcatttagtacatgtgactaacgtcatttaacgtattttcagttataaccgtccgcactttgaagattttggtttcaatgtatagcaccgatgttgtttgacatctatagagcagatccaaacgcagctatgcggatcccgtgtgcgggtgctctcgcgtgaacgcatcaaactgtctagttctattctttccagtttattggtcaaagagtgtcgatgaggttcgtgagtgaatctaacacttactttagattgagattccctccgttggcgactgggccggaaaagctgatataattggacaacaccgatagactccaccaccgacggggcttgggacaagagtctaggtggatgagttttaaagaattttaaggggagccctgttgatgcgaatagaatagtatttggtttacaaaggggtggcaagatgttgcattctgaacacaatgtcgagaaaggtgaggcaacaagaatccgctaagggacgtcaaaagaaaactgggacattgcttcgcgatcgtcagcgtagacaccctatcattaactaaaggccgtcataacatcccatgactcatcgacgtcataaccggcactttatcgaggcatcgcgagcatagcgccccgaaggggatctggtttgggccagtacagtggtttgtacgttacggcaattatttcatgattggtgtcggtaaaagtcccctaactccatttcaaagagttccccacgcgttaatggatatcttaaactaatgctagagaagtgcaatcacttggccagatcttgctaaatcccttgcatttttgcctacctggatggatgcaaacgagaactactgcaaaggattttcagggtttccaaagcgaaggatgatggtgaggtaacttgatgctgggtgatgattatgataataatgagtgacgagatcaggaagggttcatcggtttcataaaatcgatcgcagacttttttctcttctttggtgaacgtagccaaaggcgagatcgcatcttgttgtttgtcaacttcccaaggacccttagggaactatcataggttttttgtgcattataatgcggctctccgtaggaatctccacacattacgtacgcataatctcgctatcgggagtagcagatgtatgggcattctgatcgcctgggcttgggcccctgtcgtccctgtttttacgttcacttttacctactgctgacatccattttttatcccattccttgtattgtttataattgacctgatgcaccagggcgctttgataaggttattcgcgtgcgaaacacttccatccgagtgggttgacaatgcgaactacatttacaacaactactacacgcgatcgatcgcgtacattggattggtcatgagaccgtgtgcgcgccgattccggcccaacggcgtcttttgcgaacggatgagaccggacatgcccgactactgcccacaccaactaatatgcaagatattttcgggcaacaaacctactgtgtctggacctaccgtgttcgacaggttccggtcatcggatccctacaatgtgtaccaccccgagacgaagcggaaattcgtgcgcgacagctggaagaccaaagtcatgtggaacaaaaaatgtacggacgttttctccgactacaatacattgtgagacacgtggcttggatccgtcgcagacggcgacacaacctggcgaagaagacacgttgcgatcgctttgcaaggacgccttctgctctactagggatcttgtcaactcaacatctaacaatcattttgctccgagataagtacccatcaagaaggatgacaatatcagatgaattcctcgtccgaacgccgagatattcaagcaaacgtgcagcgtcatgatgttcaacatttcagttgtcatcgttatatgtcgcttttcactgtatcgctcgtcatcgtgcccaggcaaagagaggggtgatgaaccaatcgtgaattcaacacaaccatctttgcatgccaaaggataatcaggatgatcaatgggtatgcaatgcggatcagaacatcttgccaccacttaaaagtccgagacatcttacccgatctgatgcgaccttcaagtaaaaaacagctgtgtgtgcaatgaaaccgcgaacagtattggccgagacaaaatgatagctttccaacactgctacgccgatcccaaaacatcgcaaggtatcccgaagaatacccgcaccaccatgttcagattggtacgttcgctgctccatttcacgattgctcctccacacttgcccaactttgataccgcatccgacctctgatgagagcctgatgaatatgtttgttggtggattccttgacttggatctgattttcatattcgttgttgttcatggacatgctgctgttgcaactgtgtttgttgttgttgttgttgttgttgctccaaatgttttgttgttgttgcacattaaatgcacttcgttctctagttttttggtcagtttttcttggcgtcgtgtttctcaatacggttggggtactcttgttgctgttgctctttctgttgtagttgtggctctacagttcccgacttttgtgaatattgttgtcctcgatggattgcggatcattatatattttcgtacaggttacctgtgtctggactggaaccgcgggtaagttccatcatttttgtggggatagtgatgatactgtctgtgggacagtgaagtgaacatattatcatatgaaattaatgtacatcgccgtcagaaaaatggttgccgacttggtgtattgaaaacttccactcaaccaagtctttgggagttagcgacctctcgcgtttcgccgaggtgtgtcccactttatttgagaccaactatagtatcgttgtggtgttttgaaggtgctcgtacaacgccatgtactctatgaggaagcctgacgatatgtatgatggcctccccttccacgtatgcggcgtgccttttcgtaaagcacacgcgcctcctcgtgtttgccaagacttccgagacaccggcgtgcatcgcccacgtcggggtggcgccgcaaactgggcaccgttcgggctactagataaagacaaacaaatcttgattgcggcatttagagcttccggtttgccttctgtttttgcgtgcgtcgaatagcttcagaatggctggttccatatcagcaggttgttggactgaatggtggacaccgcggccccaatctttgaccctccacgaatacgttgtgcgaggacgtacatgcgtagccccagggtgttaacgacgtagtgcaagtgcatgggcgtggggaggtggaccggaagcctagcccttgccatcgcctccgcggcctttggcgtcactaggtaagcgtcgcatgcggaggggtgctgaagagcgtgtccagtgctgggaagctgaggtcctccgttgggggggatgggaggctgatgaacacgacatcggcgtccgcaggcgcctcctgtgtaatgcgcgtgagaagcgggcgaaggttctggtgaatagcgtgtcatcttccacgacgagcggaaccgccgtttctgtgtttgtgatggtgttgtgcgcctatgcgtgtgatgcggctctgtgtttcagagtattagaacttgtcgcaggttgattgcagggggcgtgaacgacctgaacttttgggagggtgttttgtttttcgagttgttcccgttttgtgcttgcatgtcgtagatgcgtttgagttgctctgttgtcatggtcgtcttcactcgtggtgttgtttgtgcttagggccctagccggtacaggagttgcacggacgctgcgcgtgttttgcgcacaggctgggcgtgcactacatcacttttgtatgatggccttctcccgggacagggaggataacgaagccctaccttgttgttgttggtgttgtgtttcctcgcgctgcatgatgttttcttttctagataagaacaaaaaatgtgaatggagaccaccgcgcgtgtgaaatgactggtcactatcgaactttacctggaaaataactaagcggaatatctcaacaaacaatgctccaaaatcagtcaaaatacgcacggatgcgtaaataaaatgtgcctcaatatcaaatacctatgatattcatattcgttttttttgtgttgatgtacatggcggcaatcgctgctataatttacttagcttttacacgccactccttcaaaaaggatctcgattcaataacaacgaattttgacgactgtaaggagtccgctgccaaagctcttgagctttctcgtctaaaagacattcaaaatgacattattaagaaggaatccgctaccaaagctcttgatagtacaaaatcccaatcaaaaggtggtcgtatgggtattgcatacaagatgaatagtagtgaaacacataaaataatgatcaatactcaggacataatcgatttggtgcagaaggaggggtgccaatcctccatgcaagagataatgggggcgattacaaatataggggaaattctcggtaaaaaaccacttccttatggtctggtgacctctgtgtccgtagaggaaattaatagtttgcaaggacagtttcccgcttcaatattgaacaaggttcatgatctggtcaaaattatcattgacggatcgtgtggaaaagatggcatggtcgacgctgacatgatgatgaccattatgaagaacgagttgcatcaatatgtgacgtcgctgatgcaaatgtaaaatatccaaatgacatcgtcggtatttcttacacaacgaataacgaactcacccgaagaatattgatcagtgcaaatggaattgctgatgcgatgacgaaggaggggtgccgaacctccatgaatgagattatgtcattgattaaacatttaggggagatacttggcgaagtaccactcccttgtgttctgtcgaagtccattttcgcacaagaaattggtaaagctttgggtggaaaggttcaggttgcagtaatcgagaaggttcaaaatatggtcaacactatcattgacggatcatgcgggaaagatggaatggtcaacgttgacactgtgatgaccattctaaagaacgtagtttcatctctgtgttaaaagtcaacggaccaatacaatgaaacatatatcagatggacatcgccgttagaaaattggcgttaagaatggtcgctgacttcggtgtattgaaaacttctgtgtttacgaacatcagtcgcactatcaaatgtccctagctgtatgtgttacacactccgtcgagtgtattcttcatctcttcttcatgccacctaatctcttcctttaattcaatgaagtgaacggagaactctaactttttcttgtacatcttcaatgcgacgatcgcaattgcgtacgctggcattacagctacttcgcactcgatcaatgtctgcatcatcgatgacgcagcacacttattgattcgtcttggcgtatttggtgaaattgcaaagcgtgaagcatggcgcctaagagatatagggttcgcgttcattgcgtctcaccacctttctttacaagttaaaaattgttttttttattacaccattaaatggcagagtagtatcacgcaaacgaccatcatccggcgatgatacctacggggctacaaagtccatgctccctattatgcttctagacggtaccaccacttcgtctgaaaagactggtgcgatcatgcggggacgcaccttcgtcactatcggacgtctccaagttgttgcgcgacctggctttcgctaattccagggaccaagacaacgaagatggtctctttatggaatggcgaccccccatatttccatgcgcgcatgcggcgctcctatggctctccttaaggaaatgatagctaccccttcgggagacgcaaccctcctaagcgacgccaacgatggttctaataaagcgaagcgtctagtgactattcacgacgccattgtaatcatgccgaggcagatatgctgtggcgtggaggttttacctccccagacgaggacgttgtggctctacaccgctctgcaatacttctccagttggctgatcgatattggctgacaagtcatctgctgcatcgctgccaacaacattgtaccgcatatacgcggctccagtgatcggcgcactaacccctttgctgttgtgatcgttccttacatcatgttgcgtttcagttcgatccgcatcggcctgaccgcatttttgaagatgatgtactcgattgtctctgcccagctgcgaaaccttagtggtgccggcaacacatatcgcagtacgtgtccatcggcgtctcgcttgtcttttacttccagggcgtgttctcaagcatgcaggtgtcgcgaatgcttcacggcgtgtgttcaggtgtggcgcagcgtgtttcagccatccgtctgttcgcccgaaataccatagaggcctgggagggcataggcgacgcatcctcgtgggcggatgccgctgcttgctggacaggaccccaattcgattggtgcgatcctgatgtgcttccgtgcgaacgtgcattggcgacaagtgtctcccagggacaactgatcaaccggtacggaggcgacctcgagttcttccagcggtccgtcatcggtagccgcgaggccatctcgtgcgtgttgaggcgcgcctacgtgatggacgcattgggggccgtcatgcgcatggtcgggtcctctctctcgcccccgttaattcttgcgttccccttctccagagctgaagatgaccggtctatgcaccccgtgtgaagggcgcggttcctaacgattggtcgttctcacgtctgaagcttggacactgcattattggagcaatcccactctcccgcttagttaattttctaaagaaacgattcaatagtgaccgaagattataattgggcacacgcgcggtgttcatcattcacattttttgttcttatccagaaaagaaaacatcatagcaacggcgagaaaggcactaacaaggtggggagtataaggtctccgcacaatcgcatacaaatttgacatgcgttacgatgatttgcacaggcccgcagtctgttgcgggcaaacacaaccaatcgctgcaagcgtcgcgtggcacctctctgtccaccatggcgcgctagcttcccaacgcccgctaaggcagcgataacaatcagggaccacaagagatgatagactgaccatacacaccgacagaggcaaactcaacgcattccctactgagctgcaaggacgcaatagcgtggacatcaactctaacatatccccgaaaagttcaggggtcattcatcacgccccgctgcaatgcaaacctctgcgacaagtcttctaatactctgaaacccagaggccgcactcagcacgcaaggcgtcacaacgactcacaacacatcagaaccggaggttctcgggctcgtcgtggaagatgacagcgtgggctttgcacgcagtggggaggatataacg

SEQ ID NO: 286 - DNA, 21020 bp, unidentified
  misc_feature 1..21020: note = Fanzor polypeptide
  variation 7202..7259: note = n is any nucleotide
  variation 19435: note = n is any nucleotide
  source 1..21020: mol_type = other DNA
ggtatgttaggcacaactcgggaccatacgtcaagctctcgcaatgggacggagtcaaaagcaaacgaccagggccgcatggtgagaatagttccaatcggcacagccttgagggcgctaggccgtttctacggatacgcgttgctttctcgcactgtgcctgaccgcccccaacaattcgtgggtcgatagtggcctcataagttgaaagttgacgttgtggcacattcccgtgttctgcacggggtctaaatcgggaaccccctttgcttgcagttctactactgtacgttcgtgcgatgctgtatgcactgctgtaatcgagatctgaggggctctcgactgagcacacaatccacgacgtaccttttgttttcgcaatctctgcccccctacccccacctcctgtcgatagacgatggcattgccccgtcttggatccctgctgttgccctacgggtatcgtgaccgctgggagcatcggcaggggagccggcttgcagctgaggcggcgggggtggaggctgtgggggctgccaggctgagatggaggagggaaaaaggcgagcggctgctgtactctctcctgtgttggcattattgtccttgagaggaagttaagctgttggttagtgtcaatggtgtcctcattcatacgcgggtcaagtggatgtcgtggtccagagcgccgagggagctaccgctttgttgagcgcctgcaggattaaggttcgagcagttgcgtcccttcctcttgtgtatatattttacagctagagggcaacaaaaatcgccaccgattagttggagctgaagcaatacagaagaagttactctctgcctttccgtcggggtcatctgttgctggtgcctcctcagtgggctgcgaagtaccgcgagaccggtgaaagcttctaaaaggctgtgccgtgcgggtgttcacagcaggctcgactcgactatgctgagacagcgctcctttggacaagtgggtgtctgtgcgcgcttttatttcaacagtgcgttattcctgttgtctgtcgctcttgtttgcagccatgcgtctatggaactatttgtccccttttcgtgttgcattgctatcgcatgtgtcacgcctagtcgcgcgtccacttcagcccctctccccgccttcgtttggtggttggtggcctctctctttttgacaaaagagtccggtaccatccggctccctgaacgccacaatatgccatttcgtcgttgttttgtttctcatccctgtggcatccgcccacttctcattcttctgctgcccccatccccatgttctcaccaccccgttcctgctgttgatggtagatgacggcgctgggtttggcgaaaagggtgttgctaatgcgggtatcgttagcgccacgggaagagcagaggagctggtcgctcaggaggcttaagaaggatgccgagggcaacgtcaaaaaggcttcatgtagggagaagcacctggaggtgaaaagtaccgtcatacttgggaatatattgcattttaaagtggcgacaccagcagcgttttctgcacatctctctgtagcagaagccgcagcaacagacacaggcgcgtaaatggcaacaatcctttgagagagacgaactgaaaacactttggctaccccacaaccgcttacaccctccccgaaatccccacatctttctccctgcctgttcaagttgcgaccgagagcaaaggggggctctgtgggacatgaggaggagtaggccgacgccgccgtcgccgtcgccgactccttgagcatggattaagggcaaattccgcaggagcggcaccaggaacagcgacgtcagctacagcacctgctcgaagaggagcttcagctgaaactgtttgtgcggcaacacgaggggcagcggctccgggagcagttgattgtgtttgagcaactgcagcggcaccggcagacacaggtgcgtgaagggaaaacatcatttgagagagggagagttagagacgaaatgaaaacgcgtcggctgtacatttttgttgagtcgtcatccaaaacgagactccacgaagttccaacattatcacgtcatttctgaaaccgctatcgtcgcggggttctaattgttcccttcgtgatcgcccgagtcgatggcgtactttttgttttgagtcacggagacatttccgacgggaaaatagacagttttaatggaatgtaggtttagaagtcgggggacactgcaaatgtgccaaagaaaatggccgaaccgattacaaggactacgtgttcgttagcacgggatagtgtttggtcaaatcatctacattctgaaatatgtcctgctcaggttgagaccgagggcggtgggagctcggttgaattgaggaggaggccgccggcagagcctcagctgcagtcggagagggcgaggttggggccggtgatgcccaagcagcgccagcgtaccagagggcggacgaagggcagcatgcaggagaagctctcgcggaggcccagtcaggagcgtggcctacgggagggcttgtaaaggtgggtttcgtgtgtactgaagtagccaggaggcatgattgtgtatcctgaagtagtccggcatgcttcacgcgcccggatacacggccaaaaactcgtggaggtatgttgtgtatcctgacgaaacctggcctctctccccgtggccggatacaaggcaaaagagtcgtgatgggaagttttgtggatcctgaaacaatctggcattgctccccgctcccggatacccgatatgaagcgcgcagttcttggtgagatgtgtttttgcacacaaccgttttgaagattaccccgcttccttccccggcaccgccccccccaacgctgccgtctgcagatccatagcccgttcgtgcggaggccgaggcagaagggcgctcggcaacaagagcgagagtagcatgatgtattggagactgcggcacttgcatgctgagcttgtgaggaggaacggatacacggcgaaccaaatgggggactttcactggacgccatggaagacgccgcaggtagcacgagtagagcggagacaattcgcgtgctatccgtcggcacccgctttggtagttgtggtgttttgtgtgatttgtgtgttttgttttcttgcagtaaaacgcaaggtagaccacatcgaccatcgacgggcggataccgcaagaacgattgtagctgttgatgttggcgcctgcgttgatgagcaccaccatgcctgttcagaatcctttgctcgcggccacattgagcggtgtaccggacacacctcccactttgaagaagttgataagagcttcgatgtccgcgccagccttgaccaacgccttggttacagcaaggtgcttaccacagactaaaggtgtagagtggtatgcccgtgctcggtcttggtcgaaatatcagcaccccattgcagaagaactcgtatcaaatgcaagtaacccctgtacgcggcgaacatgagtggggtccagtcattgtcaccacgtgcgcggctaatactggctgaccctgtcgagaggagattaatcgtaagctcgacggaaccactggatgccgcatggtgtagcttgctcagagcagatggtatgttgaggatgtgtgttcgaaaacacgctcgtccaaacaaagtttatggtcaacaagtgtttgatcgaggccgttatctcgaaaagccaccaaatgcttttagcctggtacaaaatgagagtgggaatggcacggtatggtaaagcgtcacacaactcagctgaagaatttcctgagcgagaccgcgagcccgctacataatggcgccggtggtagtagaagtctgtcccgtgaccgacaggaacagtatgtcgttccaggcgttttgcgatgattgacgcattgtgagtttgtgtctatgtgcgagcggggttttgtctaagtgacaatgagtctcttttgtggagagcggcttgttcaagcacacaggtcgattttagaagttattcaaatcacatccatccggcacgcagtacccgctacaccgctagcctgactcttgtcctcggtgggggccacgcgccttgaaacatccccggcctttcaccgctgccgtcggagcgtgatgaatcgccgacagcgggtgctgaaagacgccgcaaactaggccgcctttcaaaggcatatttcaccgttcacgacatgaaacacccccatcttcttcgtcccgctcgactcacagcgatggaacattacttgcactcgtcaggacacgaaccaacggatgcagggctggaatcgttccccgagctctttgcagctgttggaggtgatcgtaatcacactaagggggaactcttgtgctgatgtggacgtcaaatgatgcgctgggcgcggcgttggttacggtgggtgcggccacgatgtatttcatcaaacgatttggggaagatggctagcgatggccgcgttgcaaagttgttaccggataatggaggcaattgttgcgcgcgatttccccgaccagaagtttattaacaggagcttccgctcggcggccctgcagttttctggcgacaggcaggtcccggacaggctcgatccgtaaagactggttgatgcggtgatcgcaacccgtacgtgatgtctgctgtagtccatcttggcgcggatcgggccatgatggttcgggactggcagcgggggctgagaaacacatcccttcgtcggttggcagagagtcagttcgtggatgtggtccaggcgttggtactgaatttgtcggcaaaggagatggggacgacggactaatttggctgtgctcctaccgaacatgtggcctcggaggcatacctttggcaacgtttctgattggtagggaggggtgtatcgtgtcccccctcgaccgcagcggcaatcaagtatcgcagacgttgtggggaatgaagcagcctttccgcgatttcagtcgtagcgcgtgatagggagaattcggccaagcgtcggggggttcttctttggcgcaagcgtggtgtcaatggtgatgctggtgaagtccctccgccaggaatagtcggagtgttgcaagaatctggtaggatttgttaaaacgaaagtgtttcaattgactcaggagcagccgctgtctgtccaagtgagacaattcttcagaccgccgccagttgcgttcactgagggtctagaccgcactctgcgtcatgttgacgagggaaagggactactgaacattctcgcgataatctgaagacatgcgccgcaggaggaatgtgatgagaagggggaaatccccggtgtttttgtgtcccggccgatcgttgtacagagatcatacacagaaatgcgtagtacaagacacctaaaacgaacaggtgacgccagacgccaatagatgggacgtgaaacacacacaccgcgttgcaattgctattgctgtttccgtctgacaaaacacaactctgcaggctaaaaaaacggtcgatgaaacttttttgtgggatgacaaaacactcggacagcgaccatcgaacaattgtcctttcccgtcaaaatggtccggagaaccacgagaaagtggacgcacacggagcacattgcttttctctgcggcgtgcagatgtgggagaggaactgggccgtggcctcgctagtgccggccgacccgctttgtggtccaaacaagaacgtcctcaaaatcgacaaaggagagcgattgacggatagattttcgaggagaattgacatttacaccgtggaccgcacgaaccacacgtttttgccgattacacctccctcaatcatgcgtttacgaaggaaatacgacgaacccctgcttgtcctccaagacactcaagcatcctagcgctcagaaatttaccttttggtttcattaccacgccccgtctgtatctacgttcgctttctcatgcccttggtcaccaacttgacgggtttgaagcggtagatctcgcgtgaatcgctgactatgaagcctaagcccttcttgttcttgagcagcgtctccactttgcggcaggctttcgacgcggctatgacattaaaagaaagttgcgtctttccctccttgagccatcctaaaacccactgcccgttgtacgcggaatcagagctgtccttaactcttgtgtagaatatatcaggaaactcccccttctcgtttggcttcacaagattgtacgggaatttgacgccctcttggaaaaacttcttctggaaggttctaaacctcgtctgcaatacagaaagcgacatgggggccaaaacatgcggttgttggtatgcgattgttggtaaatgtcacaagttgacaaatggatgaacgggtgcggaagcgacagatcggaccgagccgctctctacatacgattggaagctcgcgtttctgaccgaaattcacgctaacatgttttctgaaatgcgtaagctgtcttctcaccacagtttcgccttggaagtggtgaaccatctcctcccaaacttcatccgagtaacacgtcttgctcttatccttccgcgcattgagaagagcaggaagaaatcctgcgtgacagcgaacagggagaaacgcaacacatgtatgaatgaaatgacgtttggtgctccgatataaaaaccttccattcttactttggccactttcctcctcttcctcgtcgcctgcgttgcctgtgaaacgggcggcaacgagattagacaaccaatacatcgccaagtgagaaaaaaaacaagagaaggcgcaacgtgcgtccaaaaaaaaaactttcatgcgtaccgtggccgctccccccgccttcttcgtcctcgtcgccctcctcctcttgatcgtctaccgcgttgcctgtgcaaagggcaagacaaccaactattattcgacaaccaatacatcgccaaaagagaaagttatgtcaaggaggggcgccaggtgcatccaagaaaaaattagtccatgcttaccgtggccgcattcctcccctgcgtccgcgtcggcttgctcctcttcttcatcacctgcgatggctgtgacaacggtggcaacgtggtcacgcaaccaacattttgccaaatgaggaagcatttcaagtcgcttccccccgcttctacgtccattgtgccctcctgcaatgtagagaactacccccccccccnnnnnnnnnnnnnnnnnnnnnnnnnnnnnnnnnnnnnnnnnnnnnnnnnnnnnnnnnnctgcaatgtagagaactcccccccccccctcgccaccatcacgcgtgtccccggtgccttctggagacgaagagctggcaggaacaatgcgtgtgtcttcgtcggtgcatggcacaaggaagggcggcaccgtggttggacaaccaacacatcgccaaatgagaaaaagtgctaagctctcaccggtcttccttgacacacgcctagcggtagtcagacgagtagcaccaacagcagtagcagcagcagcacgctttggcctctttgacggccctgttacacgaaacaacaaatcgaacaacacaggaacaaacactcagaagatgccaagccgtcttcgtttcttccccggtggccatcgcgtccttctttcaagttcccgagcgcgtaccgcactcacctacgtccccatccgctcctcctgtcatcttcccctgcaccctctttcgcgagcattccggtagtgaaggggtttcacctgcgtattgatgtgcaaacacctcgccaaatgagaagatatttcgcgtattgctgcgatttgttggtgagcaggtgaatcgcgccatgtgagacaacaaatccacacataccgaactttcgtgccttaccgtggccatttcccttgtctccagcgttacgcgagcaagcaactataggggtcaatgctgtcgtcgaccggccttgccacagcaatgatggagttgtcaccaggggctgaggctagcatggcgttggtcgccgaggcgcgccgctggatgtccttgatgcgatcggcgaattcgatcccgtcgcgcccggagaattggttgacggactgcagttggtccctgcaggttctgcaaatgtcgatctcgttcagtgcaatggtttttttggccatgaccgaaacgaaaaagcccttttctcttcgtccgatgcgtactcaaaccaaaagggttcttccgaccgttgctttttggcgggtccttggtccaaaagaaagccctggtacgccctgccttcctccgtgctctgtaagcgatcgcagcgctgttcgatctcatcgcaaagacttgtgtcaccaccgagcaccctggtgatggtttgggctgattgacgcctgaattccttcgcagcgttcgaaggcagtagccaaatgatttctacgagagttgaagcgtcgcaaataggggtgacagggcccttgtcgttgatcctgacgtattcaatgcgttcagaaagtggaatcgtactctgtgcattttgtccaggcctttccatgccatcccttttttccttttcaaggacacgtgtgagcatttttgcagcatattcggcagacgcctcgggacacagcatgcggttgacatcgataatggaccctttcccagtgttctcgtcgatgcgcacggaaccatggattcccacggtcctcagcgccttttccaacctagcagttttcgtttcagcgtgagcgacatggtccgataactgatgttgcgcctgtgcacgcagacactgacaaacgcgctcgacgtggtttctgagcgattgtttaaatgcctctcccgacgtgtcccgccacgtgtcccaacctttcccagatatgttgttcaatatatagtcacatacttcgctcggaacgacagatgtgattctgccgtgtacctgacgcttcgaaatttttggaccactgaaatcattgttgtaaagttaagcatgttgacaacttaaatgttttttacaataagaaaaaaatgactcgcccgatatctcctgaaatatacgatgcattcaaaaagtgcgacgcgcaatggatgcagaggcggcgaaaactggacacatcttcagtgttctacacgatcacaaagtgctgtactcgagagagaggagtttctcatgttttgaaaatggaagccgaagaatattcgtcgcaggcggtacacttggccagaaagaagcttccgatcggggctttcaaagaggtgaaccgttttttgcatcgagggccacatgaaccacgcatatttgccattgatggttcgaaggtgcatgtacacccgtctttcatcaaggctggttacaaaacacgaacaaacgacaagccagtgccgcgtcctgctaaaagacctctggtcatgctttcgtcgatggtcgatgtgagaacgaaatcatgtatagactttgagcttacgaaacacttcgacgaacgaagggcagctgtttcgatgctccgtagtgtgcggaaaagtgacacgctgttgtttgacaggggatattactccaaagacctactccgcagtgtccatgactccggtgcatttggcgtctggcgactcaggataatgcgttcaagggtactaggtctttctttaactcgcaccacacggaggtagcgtgtctcattcttggtgttagggtgcgcctcttgaaatatttcatcaaaggtaagacgtatgtctgcctgacgaacgatccgtccttatctcgacgagacatcaagactatgtacgcatggagatggagagtggaggaatccttcaagcgattgaaatcaaatctcaagctcgagaaagctcacgcaaaaacacccgctctttatatccaggaggtggaagccagggtgttgttagacacgatcactctgagaatgcaaagcagtacgaaggagtcgtcatatctgtatacccttgatacacacgtcacacacattctccgtaacgttaaaagagtctccggtcacacgagctacaggtttgtagcagagctacagtcaaaaaggccgtttggtcggattcattgcagaccaccggatgacaaacgtcacaccaatcacgccctcggacgttacacgcggtggaataccggaagcgaaagtttactcaaaagttcttgactacaaaacctcgcaccccgtctcacacttcatcatcatcaccatcatccttttcgtcatggtgagaccgtcttcggatggaaactcgcacaagaagaagaaacacaagaagatacatccgagagctcctccaaaggacgtcccgggatttctgcggacggtggggagtctctaccccaagggatacctcaccgagtcaggaaatctaccaaagaaatacaagggtacttattgttgccagctcttctccagagtcaagttcgggaaagaagtgtctcaaaagacaaggctgagaaccgtgagcgtcggatttcgggcagcaacgaccgatgagaaacgcgacacttttcagtccaagatcgatgaggcggtgtatcacctctctcgcgaacgagttctggcgtctctcttcgcgaactttgtgttcttggaacgtcttcaaaacggatcagcccttccagagcccgacagtgccttttacaggtcatgcttgtcatcatgcatcgaaagcagcggaggagggagtcgcaacgacgacttcgatcgtttttccgacacaacgggactgacaaggctcgtgcctcccagaaaactgaaccttaaccaacagcgagagcacgaggcacaacgcatggcaacggcaacgtcgacgcgtgcaacacaccacgcggaaaagaggagaatttcgatcacgaggtggtttctgtgcttgcggatatccaggggcgacctcgtgtacaagaagtatgctaccaagctatacgatctagcgaagaaaatcatcacggagttcgacggcacacccgagtacgcagaagacctccgacaaaaggcacaatcaatagaccctggcacggacatcgacaccatcctcgacttcgctcggtaagaaaaggagttctccgatcgtcaggatgggaagtgcgcgtcgacgatcaaacacctgtactggatgttcaacacgtacgtcgccgactccagacgcatgtacgaggagaccgtatcccgagctcattcgtatttccccggtgaagacaaggagtgcaggaacaagaggtacgaattcgtgaagaacgagctcggagaagagttcacctacgctccccccaaagacaccgccgttctacccatttgctcaacgggttcggtgttcatctacatcgacatgaagacgcttaagtcatgggggcttctgcactccaacgatgcttggtggtacaaggacgtcctccgaccgttctccaaagaggccaatatcaagtgtctcgcgaacaaagagaactccaggtacgcgtcaagcgagcatggatacctctcgagtttgctaggaagtggtccggacaagtgcccctggatgattggtgagagttttttgacggacggtgtgcagatcaagcttctgcttgtgacactggaacatggaagaaaagctttccccgggtccacccagctgaacgaggcggggtacaacaaacttccccgggctgacgtgcaactagaaagtctgctgagagagggaagaggagtgtacaatatatccagcctcttggattctccaagcatcagggaagacgttgtcgtgatgtccgcggacccgggacaggcgaaggtgatcaacgtttcttcggccacggccagaacttgggcgaggcaggaccctggtgttattcttaacagttcgacgtgtgtgttcggggatgactatcgtcgcgatactcttgcctcacgttcagacaagtacgagactttcaggcgcaaggaccagccttacggagtggctatcgatcgtctacgcaacgagaagaaaagaacttcctgcctcgcgacgttcatccggtactgtaaaagttggtgtgcaaacggtgcggcactgttgcttgagacgcttcaggaagcaaggaagttcttgcgttttgatcgattcagagctacgcagaagacactcgccaagatagcggacaagtacatgggacatgtaggagacccctgcagggtcatgttgttcggtaaagcgtcttttcgtgcgcagaaagggagggcatccgccccaaggaaagctttgatcagagagatggccagcaggggagtagtgttgatggtggaagagtacaacacttccaagaagtgcccggggtgtggggaggacacggtcgaggacaaagaacggagaatccggagttgcaaaaactttaagatcggatcaccggaagagtcctgtagacttcaccccctgacaccagagtttgaaatggatcgcgacgacgtagggtcgactaacatcggtatgcgtggtttcggcaaattgctgggtcaggagtggttttaaggatttttttcggattttcacttgcggatgatactttatagttggttttggttttcctaaagttgacaatagtgactgaaatcacggagaattccctccaccttcctcagaatatctttttgatttatcgaaggcctagccgtttttatcagagaagcgactccgacatgacctgtggaagcatccacgaccaggttgtccatgatttacgtttgagagatgaaagacattttttattggcagttttgtacgcgccagtgttgaaggcaaacgagtctgtcgcccccagcaacgcgtgtggcactggtatcggagcgtgctacaaacgtaaacccggtcgcggaatttaaatacccctccacattcccgtggcccgtacctcatcgagaaagctcgtggtaccatcttgctccaaggccgatggcccgtcgctactgctctgccgccgaaccccgcccaaatggcgcctattgtggaaaaatgctgccctggcgcccccgcttggcaacccgacaaaaaatggaacgattgccctcctgctagcacctggctactgttctgccacctagcgcacgagggcacaattgcctacaatttcgacgacccgaccatctgtgtcagggtactacccaaggccggcggggcgcacatataccaatgccacagaaactgccataaatcggcaagaacgatgttaacttacggacagaagcggtcaagaatgcgtttactccaaccgcgtccccaactcgcaactgggcgctacatcaccggcgtctcgatcgcttacttgctcttttcggcggttgtggtcgctttgcccccttcggagggtcagcatattcgatggtaacctccgctcctacctcgatgtctgcacacgctacgatagagcattcataccaccatccatactccacaccccccgccctctcgtaccaccatggcttcattcgtcctccacccccatgtattaccaatttagcattcggcgcgaacgagtggttgagtagtcgcaacaagctgatttccatgaacgctcgacaggcggggatcgtgccgcgcatggttttgctcggatcgatcacgagcgctcctagaccatccgcatgcatgatgtaacccatgcacgtatatccaccacctttcttttcgtaccccgcgggcacatctacatccgggagaactaccgtcaagagagtatcgccttcggcaaaagcgaccttggtgccgagacccttgcagtggattaggctattgatttccttgagcgcgtcgtgcgaaaatagatctttttccatcacgtcgtgtacctgattgatttgcaaagggaatcagcggcgtttgtttggatgacgcgcatcgtatgagggcactgctttctgcaacaacatgtgaagcaccgactacatgcgcttaccgttaaagcgggccgctgtaccggcggttgctgctgtgtgctgcgccgcaggtggtcacgtgcgggtgggctagccttcttcagttggtcgcgtagtttgtctctgtcttgctgtactctcgcgagtcgccgctccaacttttctgtgtctgccttcgcttgtgccgctgcattgatttccgcctgctgctctcgtctcttggcctcgagctgcatattcccgggacacacaaggtcaagtcaaaacagcgcgtgtgtgcgtgttgactaccgtctatatagaaatgaaaatgccatgtgtgacaacaccaactcacagttgcaagcttgcgtcgcagctcgtcgttctcctctttcgccttgtctgctgcctctctctccctttcacgcacaagcttctccgattcttcctttcttttcttctctgcttgtgcaaccctctctgcatcctgtgagaaatgcgaaaactacagcatgcggtagcggtcaaagggtagacgcgcgaatgggcagctgtcgtggtttttttgttgcgcagaggagtgcatctgttttcgatttaaaacagaatttacagcgcctcagctactgctgtacatacaaatcgggaacatgtggatcccacactccccacctcgcgtccctgaacgcttgctgcttcggctgctgatacgaggacacttagcctgctgatcccttgctccgctccggtcgctggctcaacatcgctcgccgccgccgatcctgcaccgggcgatgcgctggactccatagcggtcacccccgctgcaacgaatgctgctgctgcgacgtctactgctgttgcaggtgctcgtggctgagggacgactggtcgctctgctgtacctttagatggaccagccattccgttcttcttgtgctggccacagtgagtccgagcgaggccaggaaagccatagctggctgtctttctacactcttcgcactttttgagcaaattggtcataccctccgcgacgtggtcggcacagcacctcttcttgccatccgccttgaaaccatacgaagggtacttgttgcaacccgtgtgactacacttttgggaatgtatgaggtgaaacaccccttccttcgcctcatccttgcactgcttgcatttcccgtcgattctaccctgtgtgtctgcaatgaaagcgccgttgccatctgaagggaacacgtcaaagttgaaaaaaggggcaagcaggagagatgccacaccctttttcagatgttttgtacttctgctgtcgtggaaacaaaaatgcgagactcgcacgcgtcactgtgttgtagtacagctgacgtccagccagagctctagagcgccaatagcataccgccttgaagcttgacgtgtcgagggctccatctacagtcttctccagatgcggcccaacagcacaaacagtacacacagcagcgtgctctcggtcggagctcggttttggaaacgatctctcacctttccttgcatacacccctctccctcgtccgcaactacattttcgtggcatgttgtgagctgacctcgggtcgactgtgctcaggttccctccctctctcctccgccctactgctgtctactattggccccggggcacgctttttgtactattggcccatatgcggggatggggtgtactattggccctggggcacagtgataagtgtactattggcccgcgttttttcggacggaagatcaagcagcgcacctcgagttgcgcacaagagcagaggaaacacacacaacgccgccgtgcctctgctgctgctccgctgctgatctgttgctctgctgctctgctgccctgctccgctgctctgctgctctgctgctccgctgctgctctgctgctccgctgctgctctgctgctctgctgccctgctgctcggctgcccttctgccctgctgctgccgaagcgctgccgccgctgctgctactctactggtgtgctgctgccgaagcgctgccgccgctgctgctcctctactggtgtgttggtgtactggtgtgctggtgtactggtgtgctggcgtactgatgtgctgctgctgctgccgctgctgtgctgctgtgctgccaagcgctgccgcgttgcaggtgagctcgatgttgcacgagagagagccgtgatgcgcgtgaatgaagcaaggagtaaaaagggtgttgtctacagcgccgtttcgtctccgtgaaggaaaggagaagctgggccacaatacggtttgcttttcggcgcaattgaccagcaccggtaaggcacgagccgagctttcagccgttgtgctgtgcgagcgtcaaggttttgagtgtgtttgatttaaaaaactgcttcagcaacaaagacagccggtgcacactgctgcaacaagatgctagagttcaaactcggcatcaagagtaccatcgtctaccagccgcgccacacacttctgtcgcattcccttgtcgtgaggtacttccgtaccgatgctcgagtgtgccaaaaaagaatggccggccagtggacgaacgagtcaccgccgctcggcggccaagccctgctgatttgcaacacggtcacaattaacatcgcaacatcaatccagagcgccaaatcctctgcctgtaaaactatcgaaacgcttcacgttgtcatggcccatccgccgaagcctcgcccaccggcaccgccacgcacgtaatcgaaccactgacagccgtagtttaacgcctctggacagtaataaattaacccgtaagaaatgaacaaaaccatccaaaattggtaggtctcgttgaatccggagggtctatattgtcgaaagtaactacttccggacagttattgccgtacccaaatacgacactcatcaacaaacaacgattttctaaagcttaaacaaggttaggggttctcgcgaaaactaatcggggctgactttctttcgaaatctgccgctcctctcgctgactgtcgatattagtcgctatcatgctattgaggagagtacctccattttatgtacacttttctatcgatgtagcctgtgatgatcaaacttccatttaacgactgatgtcgatcctcgtggaaacccctgtggaggcccttaaagagcgattcatggggatcgttggttgcgcgatgtagagctcgttgtagttttttcgtagcgtgttgaatttgacgaccctgtacagcagtgttgtgatgtcggccttcttcttcctcttcttttttttcctcgtctttgattttgtggcggtggttgccatggtgaaggtgaattgtgaccgatgtggacgatcaacacactccagtgtttaccgataaaattgaaatcaaacgtcttttttgcaacattttatttctcgccaatcgaacgcacttctagaaaaagctcttgattgccgaatttagtacacttgtcattcactagttgacaacacccctgatcctttccgcgaaccaatctttgtcgagttcgtcgaaacaccccaccgactccaactattctttacatgatgtcaaggtgtcaatctctgactgaaaattgatacccgctccacccctttgaccactcgtctcaataggttccggacgtttcgcaggagctcgcggctgcacaggtgactggcactcagccagacgaggcagtggcggcatctgcatctgcgtaggccgtggtcgagacggtgacgcctgtgcaagagacggagcatgagcagcctgttccggccagagaggccttggtgaaggtgacggggcggtgcaggcagctggagaggccgatgcaggcgaagtgacgtcagtgtctagcgcgttggctgtggtagcacaagagccgggcgaagcacagcgactacagaaaagccgcggctcgcacgacatgctcgggcatgcaccagcagcaacggcactccagtgtttaccgataaaattgaaatcaaacgtcttttttctagaacattttaggatagtactgtctactatgcttttttgcaacattttatttctcgccaatcgaacgcacttctagaaaaagctcttgattgccgaattaagtacatttttcattcactagtcgacaacaccatattttttggagctaaatttacgcagtacgttttacacgaaacatttggatatgtgaggtgacgacccgacgatctgtgtcagagtgagggagcgcaacgaagccggtggcccaaaaacgcatccgccgacgccatcaggcaaatagctaaaacagatggcggccgagaagcaagagtccgagacactcacgcgacagcacaacgacaacacgctgtggcgcaacggcgtgctgatgaaaaagttttttttaaaggcgggcgacggcatcgtccgtagctacgggtggaagaaggcgcccgaagagcaataactactcccaagccccgccaggcccaagcgcaccaaggttgcgtagctcatcccccaagcccccatcacccccactcgttccagcgtggcggcgcaccccgaaaccagtgtgtccgacctggcacagctgaaacatgtggccaagcataccctccccgcagcctaccccgccccgccgatttcaaaaacgacacccgccccggttgaaaacaatgctagaatcgtgtgcagtcgttaccccaccccctccaccccctgttccccccgtgcacagtcgcctaaaagtgcgcgacatggtccgatgactggttgcgcctgtgcacgccgtcgctactgctctgccgcctagcgcctccccccagcccgctggaccccgccccaatggcgcctattgtggaaaaatgctgccctggcgcccccgcttggcaacccgacaaaagaatggaaagattcctctacccactactgctctgccatctagcgcccgcccaccccgctcatcagatgccagcaaccatggctagtttcggttcgcagtctatcatttcatcagggcaatcgtaaccccatgcacggtacttgcaataaatctgaaaccgggcgtcctccttgtccgcgtcgacggcacggaggtccgcttcaacctctctatgtgtcttttccggagtcttaggaagtttccagccacttggcttcgtcagtgtcatcgtcttgatctttcccacgctttcgacactaacacttcgaatattagcctgctccgaccgaatgtggatccatttgcgatcccatgggttgagatccggcagggacaccgaactttcagacgatgaaatgaagtccttaaaaaccctgtcgagaacctccgtaggttgagaaggttgtggttttttatatcctccccgcttgcgcttggacttgaccgatgtcgtcatctcgtgtgcgatgtggtcaggtcgcctggcccctctgatccattcttcataatcgtaccagtcgatgagccagaagtcaaatagttcaacatcctcgtctttcattgttgaccagcgaagtccgtctgcgtagctcgaaagaaggttccactgatgttgcgtcttgaatacggcgtcgaagcgagagtcccatgtgtctncttggacttgaccgatgtcgtcatctcgtgtgcgatgtggtcaggtcgcctggcccctctgatccattcttcataatcgtaccagtcgatgagccagaagtcaaatagttcaacatcctcgtctttcattgttgaccagcgaagtccgtctgcgtagctcgaaagaaggttccactgatgttgcgtcttgaatacggcgtcgaagcgagagtcccatgtgtcttgcgaaaaatacttcgcatcaggaaataacattctcataggtacgagatcgttgtggaggttttccagcgcgtttgttgcctcttcttcagttggtttccagttggtgatttgtgatgccatgttttttgtaggaagtgtgagacggaatgcgcgttttaaagttcataacttttgagtaaactttcgtttgctgacgtcggggctcgactcatcctcgacactgagagagatccgatgtgacgatgagatgctccagctcggatgcaaatgcgagcgtctttcggatcacatctttcgcgctcccctttttcgatgttgtgtcaacgcggatagtagaactatccatgctttcgatgaggtccatgtttgtttgtttagttgaactttgagaacatatttttgggagctaaatttacgcagtacgttttacacgaaacatttggatatgtgccgagaaactggcagaggaaaagtgtccaaagtgtaatagagtaggaacgctttgtgggtgggattagtgggttacatttggttgccaccgccccgaccatcccggctatcgctagaataaacctgtctttacgaagttgactttgaattgtttgtaccccatttttgtccggatacgtttgaatcttccgccaataaccaattccaaactattgatttcatctagcaactcgttagatacgtcttttttgctctcaaggtgccggcgagccagcattctcccgaccaagcgtattactacaaaaagaacgatcaaaacgccgaagacaatgccagattttttcaacatgatgctgtcccgtatttataaataaaaacattttattttaatatatccagtcattttgtgacctcggcacccgctgatcaacccgctgccaactggtgcactcctcctactgtgcccacccgccattttgtgacctcggcacggttgaaaacaatgctagaatcgtgtgcagtcgttaccccaccccctccaccccctgttccccccgtgcacagtcgcctaaaagtgcgcgacatggtccgatgactggtgctgcgcctgtgcacgccgtcgctactgctctgccgcctagcgcctccccctctgccccgtctgggctgttcgcgaggcctctttttgcgacgagcttgtgtgccacacacatgagaaatcaagtcaccgatgcctctgacagtctactctagggcagcatccgccacacatgttgtatttgcacttcatcgcagacagggagccacaaccacatgtccttcccgtgccctgagaggacggcgtactattcccgaccatactcctcttcagcgctctcttttcgcgtgagaccagaatgctacgagcact

SEQ ID NO: 287 - DNA, 21020 bp, unidentified
  misc_feature 1..21020: note = Fanzor polypeptide
  variation 7199..7256: note = n is any nucleotide
  variation 19432: note = n is any nucleotide
  source 1..21020: mol_type = other DNA
atgttaggcacaactcgggaccatacgtcaagctctcgcaatgggacggagtcaaaagcaaacgaccagggccgcatggtgagaatagttccaatcggcacagccttgagggcgctaggccgtttctacggatacgcgttgctttctcgcactgtgcctgaccgcccccaacaattcgtgggtcgatagtggcctcataagttgaaagttgacgttgtggcacattcccgtgttctgcacggggtctaaatcgggaaccccctttgcttgcagttctactactgtacgttcgtgcgatgctgtatgcactgctgtaatcgagatctgaggggctctcgactgagcacacaatccacgacgtaccttttgttttcgcaatctctgcccccctacccccacctcctgtcgatagacgatggcattgccccgtcttggatccctgctgttgccctacgggtatcgtgaccgctgggagcatcggcaggggagccggcttgcagctgaggcggcgggggtggaggctgtgggggctgccaggctgagatggaggagggaaaaaggcgagcggctgctgtactctctcctgtgttggcattattgtccttgagaggaagttaagctgttggttagtgtcaatggtgtcctcattcatacgcgggtcaagtggatgtcgtggtccagagcgccgagggagctaccgctttgttgagcgcctgcaggattaaggttcgagcagttgcgtcccttcctcttgtgtatatattttacagctagagggcaacaaaaatcgccaccgattagttggagctgaagcaatacagaagaagttactctctgcctttccgtcggggtcatctgttgctggtgcctcctcagtgggctgcgaagtaccgcgagaccggtgaaagcttctaaaaggctgtgccgtgcgggtgttcacagcaggctcgactcgactatgctgagacagcgctcctttggacaagtgggtgtctgtgcgcgcttttatttcaacagtgcgttattcctgttgtctgtcgctcttgtttgcagccatgcgtctatggaactatttgtccccttttcgtgttgcattgctatcgcatgtgtcacgcctagtcgcgcgtccacttcagcccctctccccgccttcgtttggtggttggtggcctctctctttttgacaaaagagtccggtaccatccggctccctgaacgccacaatatgccatttcgtcgttgttttgtttctcatccctgtggcatccgcccacttctcattcttctgctgcccccatccccatgttctcaccaccccgttcctgctgttgatggtagatgacggcgctgggtttggcgaaaagggtgttgctaatgcgggtatcgttagcgccacgggaagagcagaggagctggtcgctcaggaggcttaagaaggatgccgagggcaacgtcaaaaaggcttcatgtagggagaagcacctggaggtgaaaagtaccgtcatacttgggaatatattgcattttaaagtggcgacaccagcagcgttttctgcacatctctctgtagcagaagccgcagcaacagacacaggcgcgtaaatggcaacaatcctttgagagagacgaactgaaaacactttggctaccccacaaccgcttacaccctccccgaaatccccacatctttctccctgcctgttcaagttgcgaccgagagcaaaggggggctctgtgggacatgaggaggagtaggccgacgccgccgtcgccgtcgccgactccttgagcatggattaagggcaaattccgcaggagcggcaccaggaacagcgacgtcagctacagcacctgctcgaagaggagcttcagctgaaactgtttgtgcggcaacacgaggggcagcggctccgggagcagttgattgtgtttgagcaactgcagcggcaccggcagacacaggtgcgtgaagggaaaacatcatttgagagagggagagttagagacgaaatgaaaacgcgtcggctgtacatttttgttgagtcgtcatccaaaacgagactccacgaagttccaacattatcacgtcatttctgaaaccgctatcgtcgcggggttctaattgttcccttcgtgatcgcccgagtcgatggcgtactttttgttttgagtcacggagacatttccgacgggaaaatagacagttttaatggaatgtaggtttagaagtcgggggacactgcaaatgtgccaaagaaaatggccgaaccgattacaaggactacgtgttcgttagcacgggatagtgtttggtcaaatcatctacattctgaaatatgtcctgctcaggttgagaccgagggcggtgggagctcggttgaattgaggaggaggccgccggcagagcctcagctgcagtcggagagggcgaggttggggccggtgatgcccaagcagcgccagcgtaccagagggcggacgaagggcagcatgcaggagaagctctcgcggaggcccagtcaggagcgtggcctacgggagggcttgtaaaggtgggtttcgtgtgtactgaagtagccaggaggcatgattgtgtatcctgaagtagtccggcatgcttcacgcgcccggatacacggccaaaaactcgtggaggtatgttgtgtatcctgacgaaacctggcctctctccccgtggccggatacaaggcaaaagagtcgtgatgggaagttttgtggatcctgaaacaatctggcattgctccccgctcccggatacccgatatgaagcgcgcagttcttggtgagatgtgtttttgcacacaaccgttttgaagattaccccgcttccttccccggcaccgccccccccaacgctgccgtctgcagatccatagcccgttcgtgcggaggccgaggcagaagggcgctcggcaacaagagcgagagtagcatgatgtattggagactgcggcacttgcatgctgagcttgtgaggaggaacggatacacggcgaaccaaatgggggactttcactggacgccatggaagacgccgcaggtagcacgagtagagcggagacaattcgcgtgctatccgtcggcacccgctttggtagttgtggtgttttgtgtgatttgtgtgttttgttttcttgcagtaaaacgcaaggtagaccacatcgaccatcgacgggcggataccgcaagaacgattgtagctgttgatgttggcgcctgcgttgatgagcaccaccatgcctgttcagaatcctttgctcgcggccacattgagcggtgtaccggacacacctcccactttgaagaagttgataagagcttcgatgtccgcgccagccttgaccaacgccttggttacagcaaggtgcttaccacagactaaaggtgtagagtggtatgcccgtgctcggtcttggtcgaaatatcagcaccccattgcagaagaactcgtatcaaatgcaagtaacccctgtacgcggcgaacatgagtggggtccagtcattgtcaccacgtgcgcggctaatactggctgaccctgtcgagaggagattaatcgtaagctcgacggaaccactggatgccgcatggtgtagcttgctcagagcagatggtatgttgaggatgtgtgttcgaaaacacgctcgtccaaacaaagtttatggtcaacaagtgtttgatcgaggccgttatctcgaaaagccaccaaatgcttttagcctggtacaaaatgagagtgggaatggcacggtatggtaaagcgtcacacaactcagctgaagaatttcctgagcgagaccgcgagcccgctacataatggcgccggtggtagtagaagtctgtcccgtgaccgacaggaacagtatgtcgttccaggcgttttgcgatgattgacgcattgtgagtttgtgtctatgtgcgagcggggttttgtctaagtgacaatgagtctcttttgtggagagcggcttgttcaagcacacaggtcgattttagaagttattcaaatcacatccatccggcacgcagtacccgctacaccgctagcctgactcttgtcctcggtgggggccacgcgccttgaaacatccccggcctttcaccgctgccgtcggagcgtgatgaatcgccgacagcgggtgctgaaagacgccgcaaactaggccgcctttcaaaggcatatttcaccgttcacgacatgaaacacccccatcttcttcgtcccgctcgactcacagcgatggaacattacttgcactcgtcaggacacgaaccaacggatgcagggctggaatcgttccccgagctctttgcagctgttggaggtgatcgtaatcacactaagggggaactcttgtgctgatgtggacgtcaaatgatgcgctgggcgcggcgttggttacggtgggtgcggccacgatgtatttcatcaaacgatttggggaagatggctagcgatggccgcgttgcaaagttgttaccggataatggaggcaattgttgcgcgcgatttccccgaccagaagtttattaacaggagcttccgctcggcggccctgcagttttctggcgacaggcaggtcccggacaggctcgatccgtaaagactggttgatgcggtgatcgcaacccgtacgtgatgtctgctgtagtccatcttggcgcggatcgggccatgatggttcgggactggcagcgggggctgagaaacacatcccttcgtcggttggcagagagtcagttcgtggatgtggtccaggcgttggtactgaatttgtcggcaaaggagatggggacgacggactaatttggctgtgctcctaccgaacatgtggcctcggaggcatacctttggcaacgtttctgattggtagggaggggtgtatcgtgtcccccctcgaccgcagcggcaatcaagtatcgcagacgttgtggggaatgaagcagcctttccgcgatttcagtcgtagcgcgtgatagggagaattcggccaagcgtcggggggttcttctttggcgcaagcgtggtgtcaatggtgatgctggtgaagtccctccgccaggaatagtcggagtgttgcaagaatctggtaggatttgttaaaacgaaagtgtttcaattgactcaggagcagccgctgtctgtccaagtgagacaattcttcagaccgccgccagttgcgttcactgagggtctagaccgcactctgcgtcatgttgacgagggaaagggactactgaacattctcgcgataatctgaagacatgcgccgcaggaggaatgtgatgagaagggggaaatccccggtgtttttgtgtcccggccgatcgttgtacagagatcatacacagaaatgcgtagtacaagacacctaaaacgaacaggtgacgccagacgccaatagatgggacgtgaaacacacacaccgcgttgcaattgctattgctgtttccgtctgacaaaacacaactctgcaggctaaaaaaacggtcgatgaaacttttttgtgggatgacaaaacactcggacagcgaccatcgaacaattgtcctttcccgtcaaaatggtccggagaaccacgagaaagtggacgcacacggagcacattgcttttctctgcggcgtgcagatgtgggagaggaactgggccgtggcctcgctagtgccggccgacccgctttgtggtccaaacaagaacgtcctcaaaatcgacaaaggagagcgattgacggatagattttcgaggagaattgacatttacaccgtggaccgcacgaaccacacgtttttgccgattacacctccctcaatcatgcgtttacgaaggaaatacgacgaacccctgcttgtcctccaagacactcaagcatcctagcgctcagaaatttaccttttggtttcattaccacgccccgtctgtatctacgttcgctttctcatgcccttggtcaccaacttgacgggtttgaagcggtagatctcgcgtgaatcgctgactatgaagcctaagcccttcttgttcttgagcagcgtctccactttgcggcaggctttcgacgcggctatgacattaaaagaaagttgcgtctttccctccttgagccatcctaaaacccactgcccgttgtacgcggaatcagagctgtccttaactcttgtgtagaatatatcaggaaactcccccttctcgtttggcttcacaagattgtacgggaatttgacgccctcttggaaaaacttcttctggaaggttctaaacctcgtctgcaatacagaaagcgacatgggggccaaaacatgcggttgttggtatgcgattgttggtaaatgtcacaagttgacaaatggatgaacgggtgcggaagcgacagatcggaccgagccgctctctacatacgattggaagctcgcgtttctgaccgaaattcacgctaacatgttttctgaaatgcgtaagctgtcttctcaccacagtttcgccttggaagtggtgaaccatctcctcccaaacttcatccgagtaacacgtcttgctcttatccttccgcgcattgagaagagcaggaagaaatcctgcgtgacagcgaacagggagaaacgcaacacatgtatgaatgaaatgacgtttggtgctccgatataaaaaccttccattcttactttggccactttcctcctcttcctcgtcgcctgcgttgcctgtgaaacgggcggcaacgagattagacaaccaatacatcgccaagtgagaaaaaaaacaagagaaggcgcaacgtgcgtccaaaaaaaaaactttcatgcgtaccgtggccgctccccccgccttcttcgtcctcgtcgccctcctcctcttgatcgtctaccgcgttgcctgtgcaaagggcaagacaaccaactattattcgacaaccaatacatcgccaaaagagaaagttatgtcaaggaggggcgccaggtgcatccaagaaaaaattagtccatgcttaccgtggccgcattcctcccctgcgtccgcgtcggcttgctcctcttcttcatcacctgcgatggctgtgacaacggtggcaacgtggtcacgcaaccaacattttgccaaatgaggaagcatttcaagtcgcttccccccgcttctacgtccattgtgccctcctgcaatgtagagaactacccccccccccnnnnnnnnnnnnnnnnnnnnnnnnnnnnnnnnnnnnnnnnnnnnnnnnnnnnnnnnnnctgcaatgtagagaactcccccccccccctcgccaccatcacgcgtgtccccggtgccttctggagacgaagagctggcaggaacaatgcgtgtgtcttcgtcggtgcatggcacaaggaagggcggcaccgtggttggacaaccaacacatcgccaaatgagaaaaagtgctaagctctcaccggtcttccttgacacacgcctagcggtagtcagacgagtagcaccaacagcagtagcagcagcagcacgctttggcctctttgacggccctgttacacgaaacaacaaatcgaacaacacaggaacaaacactcagaagatgccaagccgtcttcgtttcttccccggtggccatcgcgtccttctttcaagttcccgagcgcgtaccgcactcacctacgtccccatccgctcctcctgtcatcttcccctgcaccctctttcgcgagcattccggtagtgaaggggtttcacctgcgtattgatgtgcaaacacctcgccaaatgagaagatatttcgcgtattgctgcgatttgttggtgagcaggtgaatcgcgccatgtgagacaacaaatccacacataccgaactttcgtgccttaccgtggccatttcccttgtctccagcgttacgcgagcaagcaactataggggtcaatgctgtcgtcgaccggccttgccacagcaatgatggagttgtcaccaggggctgaggctagcatggcgttggtcgccgaggcgcgccgctggatgtccttgatgcgatcggcgaattcgatcccgtcgcgcccggagaattggttgacggactgcagttggtccctgcaggttctgcaaatgtcgatctcgttcagtgcaatggtttttttggccatgaccgaaacgaaaaagcccttttctcttcgtccgatgcgtactcaaaccaaaagggttcttccgaccgttgctttttggcgggtccttggtccaaaagaaagccctggtacgccctgccttcctccgtgctctgtaagcgatcgcagcgctgttcgatctcatcgcaaagacttgtgtcaccaccgagcaccctggtgatggtttgggctgattgacgcctgaattccttcgcagcgttcgaaggcagtagccaaatgatttctacgagagttgaagcgtcgcaaataggggtgacagggcccttgtcgttgatcctgacgtattcaatgcgttcagaaagtggaatcgtactctgtgcattttgtccaggcctttccatgccatcccttttttccttttcaaggacacgtgtgagcatttttgcagcatattcggcagacgcctcgggacacagcatgcggttgacatcgataatggaccctttcccagtgttctcgtcgatgcgcacggaaccatggattcccacggtcctcagcgccttttccaacctagcagttttcgtttcagcgtgagcgacatggtccgataactgatgttgcgcctgtgcacgcagacactgacaaacgcgctcgacgtggtttctgagcgattgtttaaatgcctctcccgacgtgtcccgccacgtgtcccaacctttcccagatatgttgttcaatatatagtcacatacttcgctcggaacgacagatgtgattctgccgtgtacctgacgcttcgaaatttttggaccactgaaatcattgttgtaaagttaagcatgttgacaacttaaatgttttttacaataagaaaaaaatgactcgcccgatatctcctgaaatatacgatgcattcaaaaagtgcgacgcgcaatggatgcagaggcggcgaaaactggacacatcttcagtgttctacacgatcacaaagtgctgtactcgagagagaggagtttctcatgttttgaaaatggaagccgaagaatattcgtcgcaggcggtacacttggccagaaagaagcttccgatcggggctttcaaagaggtgaaccgttttttgcatcgagggccacatgaaccacgcatatttgccattgatggttcgaaggtgcatgtacacccgtctttcatcaaggctggttacaaaacacgaacaaacgacaagccagtgccgcgtcctgctaaaagacctctggtcatgctttcgtcgatggtcgatgtgagaacgaaatcatgtatagactttgagcttacgaaacacttcgacgaacgaagggcagctgtttcgatgctccgtagtgtgcggaaaagtgacacgctgttgtttgacaggggatattactccaaagacctactccgcagtgtccatgactccggtgcatttggcgtctggcgactcaggataatgcgttcaagggtactaggtctttctttaactcgcaccacacggaggtagcgtgtctcattcttggtgttagggtgcgcctcttgaaatatttcatcaaaggtaagacgtatgtctgcctgacgaacgatccgtccttatctcgacgagacatcaagactatgtacgcatggagatggagagtggaggaatccttcaagcgattgaaatcaaatctcaagctcgagaaagctcacgcaaaaacacccgctctttatatccaggaggtggaagccagggtgttgttagacacgatcactctgagaatgcaaagcagtacgaaggagtcgtcatatctgtatacccttgatacacacgtcacacacattctccgtaacgttaaaagagtctccggtcacacgagctacaggtttgtagcagagctacagtcaaaaaggccgtttggtcggattcattgcagaccaccggatgacaaacgtcacaccaatcacgccctcggacgttacacgcggtggaataccggaagcgaaagtttactcaaaagttcttgactacaaaacctcgcaccccgtctcacacttcatcatcatcaccatcatccttttcgtcatggtgagaccgtcttcggatggaaactcgcacaagaagaagaaacacaagaagatacatccgagagctcctccaaaggacgtcccgggatttctgcggacggtggggagtctctaccccaagggatacctcaccgagtcaggaaatctaccaaagaaatacaagggtacttattgttgccagctcttctccagagtcaagttcgggaaagaagtgtctcaaaagacaaggctgagaaccgtgagcgtcggatttcgggcagcaacgaccgatgagaaacgcgacacttttcagtccaagatcgatgaggcggtgtatcacctctctcgcgaacgagttctggcgtctctcttcgcgaactttgtgttcttggaacgtcttcaaaacggatcagcccttccagagcccgacagtgccttttacaggtcatgcttgtcatcatgcatcgaaagcagcggaggagggagtcgcaacgacgacttcgatcgtttttccgacacaacgggactgacaaggctcgtgcctcccagaaaactgaaccttaaccaacagcgagagcacgaggcacaacgcatggcaacggcaacgtcgacgcgtgcaacacaccacgcggaaaagaggagaatttcgatcacgaggtggtttctgtgcttgcggatatccaggggcgacctcgtgtacaagaagtatgctaccaagctatacgatctagcgaagaaaatcatcacggagttcgacggcacacccgagtacgcagaagacctccgacaaaaggcacaatcaatagaccctggcacggacatcgacaccatcctcgacttcgctcggtaagaaaaggagttctccgatcgtcaggatgggaagtgcgcgtcgacgatcaaacacctgtactggatgttcaacacgtacgtcgccgactccagacgcatgtacgaggagaccgtatcccgagctcattcgtatttccccggtgaagacaaggagtgcaggaacaagaggtacgaattcgtgaagaacgagctcggagaagagttcacctacgctccccccaaagacaccgccgttctacccatttgctcaacgggttcggtgttcatctacatcgacatgaagacgcttaagtcatgggggcttctgcactccaacgatgcttggtggtacaaggacgtcctccgaccgttctccaaagaggccaatatcaagtgtctcgcgaacaaagagaactccaggtacgcgtcaagcgagcatggatacctctcgagtttgctaggaagtggtccggacaagtgcccctggatgattggtgagagttttttgacggacggtgtgcagatcaagcttctgcttgtgacactggaacatggaagaaaagctttccccgggtccacccagctgaacgaggcggggtacaacaaacttccccgggctgacgtgcaactagaaagtctgctgagagagggaagaggagtgtacaatatatccagcctcttggattctccaagcatcagggaagacgttgtcgtgatgtccgcggacccgggacaggcgaaggtgatcaacgtttcttcggccacggccagaacttgggcgaggcaggaccctggtgttattcttaacagttcgacgtgtgtgttcggggatgactatcgtcgcgatactcttgcctcacgttcagacaagtacgagactttcaggcgcaaggaccagccttacggagtggctatcgatcgtctacgcaacgagaagaaaagaacttcctgcctcgcgacgttcatccggtactgtaaaagttggtgtgcaaacggtgcggcactgttgcttgagacgcttcaggaagcaaggaagttcttgcgttttgatcgattcagagctacgcagaagacactcgccaagatagcggacaagtacatgggacatgtaggagacccctgcagggtcatgttgttcggtaaagcgtcttttcgtgcgcagaaagggagggcatccgccccaaggaaagctttgatcagagagatggccagcaggggagtagtgttgatggtggaagagtacaacacttccaagaagtgcccggggtgtggggaggacacggtcgaggacaaagaacggagaatccggagttgcaaaaactttaagatcggatcaccggaagagtcctgtagacttcaccccctgacaccagagtttgaaatggatcgcgacgacgtagggtcgactaacatcggtatgcgtggtttcggcaaattgctgggtcaggagtggttttaaggatttttttcggattttcacttgcggatgatactttatagttggttttggttttcctaaagttgacaatagtgactgaaatcacggagaattccctccaccttcctcagaatatctttttgatttatcgaaggcctagccgtttttatcagagaagcgactccgacatgacctgtggaagcatccacgaccaggttgtccatgatttacgtttgagagatgaaagacattttttattggcagttttgtacgcgccagtgttgaaggcaaacgagtctgtcgcccccagcaacgcgtgtggcactggtatcggagcgtgctacaaacgtaaacccggtcgcggaatttaaatacccctccacattcccgtggcccgtacctcatcgagaaagctcgtggtaccatcttgctccaaggccgatggcccgtcgctactgctctgccgccgaaccccgcccaaatggcgcctattgtggaaaaatgctgccctggcgcccccgcttggcaacccgacaaaaaatggaacgattgccctcctgctagcacctggctactgttctgccacctagcgcacgagggcacaattgcctacaatttcgacgacccgaccatctgtgtcagggtactacccaaggccggcggggcgcacatataccaatgccacagaaactgccataaatcggcaagaacgatgttaacttacggacagaagcggtcaagaatgcgtttactccaaccgcgtccccaactcgcaactgggcgctacatcaccggcgtctcgatcgcttacttgctcttttcggcggttgtggtcgctttgcccccttcggagggtcagcatattcgatggtaacctccgctcctacctcgatgtctgcacacgctacgatagagcattcataccaccatccatactccacaccccccgccctctcgtaccaccatggcttcattcgtcctccacccccatgtattaccaatttagcattcggcgcgaacgagtggttgagtagtcgcaacaagctgatttccatgaacgctcgacaggcggggatcgtgccgcgcatggttttgctcggatcgatcacgagcgctcctagaccatccgcatgcatgatgtaacccatgcacgtatatccaccacctttcttttcgtaccccgcgggcacatctacatccgggagaactaccgtcaagagagtatcgccttcggcaaaagcgaccttggtgccgagacccttgcagtggattaggctattgatttccttgagcgcgtcgtgcgaaaatagatctttttccatcacgtcgtgtacctgattgatttgcaaagggaatcagcggcgtttgtttggatgacgcgcatcgtatgagggcactgctttctgcaacaacatgtgaagcaccgactacatgcgcttaccgttaaagcgggccgctgtaccggcggttgctgctgtgtgctgcgccgcaggtggtcacgtgcgggtgggctagccttcttcagttggtcgcgtagtttgtctctgtcttgctgtactctcgcgagtcgccgctccaacttttctgtgtctgccttcgcttgtgccgctgcattgatttccgcctgctgctctcgtctcttggcctcgagctgcatattcccgggacacacaaggtcaagtcaaaacagcgcgtgtgtgcgtgttgactaccgtctatatagaaatgaaaatgccatgtgtgacaacaccaactcacagttgcaagcttgcgtcgcagctcgtcgttctcctctttcgccttgtctgctgcctctctctccctttcacgcacaagcttctccgattcttcctttcttttcttctctgcttgtgcaaccctctctgcatcctgtgagaaatgcgaaaactacagcatgcggtagcggtcaaagggtagacgcgcgaatgggcagctgtcgtggtttttttgttgcgcagaggagtgcatctgttttcgatttaaaacagaatttacagcgcctcagctactgctgtacatacaaatcgggaacatgtggatcccacactccccacctcgcgtccctgaacgcttgctgcttcggctgctgatacgaggacacttagcctgctgatcccttgctccgctccggtcgctggctcaacatcgctcgccgccgccgatcctgcaccgggcgatgcgctggactccatagcggtcacccccgctgcaacgaatgctgctgctgcgacgtctactgctgttgcaggtgctcgtggctgagggacgactggtcgctctgctgtacctttagatggaccagccattccgttcttcttgtgctggccacagtgagtccgagcgaggccaggaaagccatagctggctgtctttctacactcttcgcactttttgagcaaattggtcataccctccgcgacgtggtcggcacagcacctcttcttgccatccgccttgaaaccatacgaagggtacttgttgcaacccgtgtgactacacttttgggaatgtatgaggtgaaacaccccttccttcgcctcatccttgcactgcttgcatttcccgtcgattctaccctgtgtgtctgcaatgaaagcgccgttgccatctgaagggaacacgtcaaagttgaaaaaaggggcaagcaggagagatgccacaccctttttcagatgttttgtacttctgctgtcgtggaaacaaaaatgcgagactcgcacgcgtcactgtgttgtagtacagctgacgtccagccagagctctagagcgccaatagcataccgccttgaagcttgacgtgtcgagggctccatctacagtcttctccagatgcggcccaacagcacaaacagtacacacagcagcgtgctctcggtcggagctcggttttggaaacgatctctcacctttccttgcatacacccctctccctcgtccgcaactacattttcgtggcatgttgtgagctgacctcgggtcgactgtgctcaggttccctccctctctcctccgccctactgctgtctactattggccccggggcacgctttttgtactattggcccatatgcggggatggggtgtactattggccctggggcacagtgataagtgtactattggcccgcgttttttcggacggaagatcaagcagcgcacctcgagttgcgcacaagagcagaggaaacacacacaacgccgccgtgcctctgctgctgctccgctgctgatctgttgctctgctgctctgctgccctgctccgctgctctgctgctctgctgctccgctgctgctctgctgctccgctgctgctctgctgctctgctgccctgctgctcggctgcccttctgccctgctgctgccgaagcgctgccgccgctgctgctactctactggtgtgctgctgccgaagcgctgccgccgctgctgctcctctactggtgtgttggtgtactggtgtgctggtgtactggtgtgctggcgtactgatgtgctgctgctgctgccgctgctgtgctgctgtgctgccaagcgctgccgcgttgcaggtgagctcgatgttgcacgagagagagccgtgatgcgcgtgaatgaagcaaggagtaaaaagggtgttgtctacagcgccgtttcgtctccgtgaaggaaaggagaagctgggccacaatacggtttgcttttcggcgcaattgaccagcaccggtaaggcacgagccgagctttcagccgttgtgctgtgcgagcgtcaaggttttgagtgtgtttgatttaaaaaactgcttcagcaacaaagacagccggtgcacactgctgcaacaagatgctagagttcaaactcggcatcaagagtaccatcgtctaccagccgcgccacacacttctgtcgcattcccttgtcgtgaggtacttccgtaccgatgctcgagtgtgccaaaaaagaatggccggccagtggacgaacgagtcaccgccgctcggcggccaagccctgctgatttgcaacacggtcacaattaacatcgcaacatcaatccagagcgccaaatcctctgcctgtaaaactatcgaaacgcttcacgttgtcatggcccatccgccgaagcctcgcccaccggcaccgccacgcacgtaatcgaaccactgacagccgtagtttaacgcctctggacagtaataaattaacccgtaagaaatgaacaaaaccatccaaaattggtaggtctcgttgaatccggagggtctatattgtcgaaagtaactacttccggacagttattgccgtacccaaatacgacactcatcaacaaacaacgattttctaaagcttaaacaaggttaggggttctcgcgaaaactaatcggggctgactttctttcgaaatctgccgctcctctcgctgactgtcgatattagtcgctatcatgctattgaggagagtacctccattttatgtacacttttctatcgatgtagcctgtgatgatcaaacttccatttaacgactgatgtcgatcctcgtggaaacccctgtggaggcccttaaagagcgattcatggggatcgttggttgcgcgatgtagagctcgttgtagttttttcgtagcgtgttgaatttgacgaccctgtacagcagtgttgtgatgtcggccttcttcttcctcttcttttttttcctcgtctttgattttgtggcggtggttgccatggtgaaggtgaattgtgaccgatgtggacgatcaacacactccagtgtttaccgataaaattgaaatcaaacgtcttttttgcaacattttatttctcgccaatcgaacgcacttctagaaaaagctcttgattgccgaatttagtacacttgtcattcactagttgacaacacccctgatcctttccgcgaaccaatctttgtcgagttcgtcgaaacaccccaccgactccaactattctttacatgatgtcaaggtgtcaatctctgactgaaaattgatacccgctccacccctttgaccactcgtctcaataggttccggacgtttcgcaggagctcgcggctgcacaggtgactggcactcagccagacgaggcagtggcggcatctgcatctgcgtaggccgtggtcgagacggtgacgcctgtgcaagagacggagcatgagcagcctgttccggccagagaggccttggtgaaggtgacggggcggtgcaggcagctggagaggccgatgcaggcgaagtgacgtcagtgtctagcgcgttggctgtggtagcacaagagccgggcgaagcacagcgactacagaaaagccgcggctcgcacgacatgctcgggcatgcaccagcagcaacggcactccagtgtttaccgataaaattgaaatcaaacgtcttttttctagaacattttaggatagtactgtctactatgcttttttgcaacattttatttctcgccaatcgaacgcacttctagaaaaagctcttgattgccgaattaagtacatttttcattcactagtcgacaacaccatattttttggagctaaatttacgcagtacgttttacacgaaacatttggatatgtgaggtgacgacccgacgatctgtgtcagagtgagggagcgcaacgaagccggtggcccaaaaacgcatccgccgacgccatcaggcaaatagctaaaacagatggcggccgagaagcaagagtccgagacactcacgcgacagcacaacgacaacacgctgtggcgcaacggcgtgctgatgaaaaagttttttttaaaggcgggcgacggcatcgtccgtagctacgggtggaagaaggcgcccgaagagcaataactactcccaagccccgccaggcccaagcgcaccaaggttgcgtagctcatcccccaagcccccatcacccccactcgttccagcgtggcggcgcaccccgaaaccagtgtgtccgacctggcacagctgaaacatgtggccaagcataccctccccgcagcctaccccgccccgccgatttcaaaaacgacacccgccccggttgaaaacaatgctagaatcgtgtgcagtcgttaccccaccccctccaccccctgttccccccgtgcacagtcgcctaaaagtgcgcgacatggtccgatgactggttgcgcctgtgcacgccgtcgctactgctctgccgcctagcgcctccccccagcccgctggaccccgccccaatggcgcctattgtggaaaaatgctgccctggcgcccccgcttggcaacccgacaaaagaatggaaagattcctctacccactactgctctgccatctagcgcccgcccaccccgctcatcagatgccagcaaccatggctagtttcggttcgcagtctatcatttcatcagggcaatcgtaaccccatgcacggtacttgcaataaatctgaaaccgggcgtcctccttgtccgcgtcgacggcacggaggtccgcttcaacctctctatgtgtcttttccggagtcttaggaagtttccagccacttggcttcgtcagtgtcatcgtcttgatctttcccacgctttcgacactaacacttcgaatattagcctgctccgaccgaatgtggatccatttgcgatcccatgggttgagatccggcagggacaccgaactttcagacgatgaaatgaagtccttaaaaaccctgtcgagaacctccgtaggttgagaaggttgtggttttttatatcctccccgcttgcgcttggacttgaccgatgtcgtcatctcgtgtgcgatgtggtcaggtcgcctggcccctctgatccattcttcataatcgtaccagtcgatgagccagaagtcaaatagttcaacatcctcgtctttcattgttgaccagcgaagtccgtctgcgtagctcgaaagaaggttccactgatgttgcgtcttgaatacggcgtcgaagcgagagtcccatgtgtctncttggacttgaccgatgtcgtcatctcgtgtgcgatgtggtcaggtcgcctggcccctctgatccattcttcataatcgtaccagtcgatgagccagaagtcaaatagttcaacatcctcgtctttcattgttgaccagcgaagtccgtctgcgtagctcgaaagaaggttccactgatgttgcgtcttgaatacggcgtcgaagcgagagtcccatgtgtcttgcgaaaaatacttcgcatcaggaaataacattctcataggtacgagatcgttgtggaggttttccagcgcgtttgttgcctcttcttcagttggtttccagttggtgatttgtgatgccatgttttttgtaggaagtgtgagacggaatgcgcgttttaaagttcataacttttgagtaaactttcgtttgctgacgtcggggctcgactcatcctcgacactgagagagatccgatgtgacgatgagatgctccagctcggatgcaaatgcgagcgtctttcggatcacatctttcgcgctcccctttttcgatgttgtgtcaacgcggatagtagaactatccatgctttcgatgaggtccatgtttgtttgtttagttgaactttgagaacatatttttgggagctaaatttacgcagtacgttttacacgaaacatttggatatgtgccgagaaactggcagaggaaaagtgtccaaagtgtaatagagtaggaacgctttgtgggtgggattagtgggttacatttggttgccaccgccccgaccatcccggctatcgctagaataaacctgtctttacgaagttgactttgaattgtttgtaccccatttttgtccggatacgtttgaatcttccgccaataaccaattccaaactattgatttcatctagcaactcgttagatacgtcttttttgctctcaaggtgccggcgagccagcattctcccgaccaagcgtattactacaaaaagaacgatcaaaacgccgaagacaatgccagattttttcaacatgatgctgtcccgtatttataaataaaaacattttattttaatatatccagtcattttgtgacctcggcacccgctgatcaacccgctgccaactggtgcactcctcctactgtgcccacccgccattttgtgacctcggcacggttgaaaacaatgctagaatcgtgtgcagtcgttaccccaccccctccaccccctgttccccccgtgcacagtcgcctaaaagtgcgcgacatggtccgatgactggtgctgcgcctgtgcacgccgtcgctactgctctgccgcctagcgcctccccctctgccccgtctgggctgttcgcgaggcctctttttgcgacgagcttgtgtgccacacacatgagaaatcaagtcaccgatgcctctgacagtctactctagggcagcatccgccacacatgttgtatttgcacttcatcgcagacagggagccacaaccacatgtccttcccgtgccctgagaggacggcgtactattcccgaccatactcctcttcagcgctctcttttcgcgtgagaccagaatgctacgagcactgtt

SEQ ID NO: 288 - DNA, 20737 bp, Ectocarpus sp.
  variation 1..6027: note = n is any nucleotide
  variation 19035: note = n is any nucleotide
  source 1..20737: mol_type = other DNA
nnnnnnnnnnnnnnnnnnnnnnnnnnnnnnnnnnnnnnnnnnnnnnnnnnnnnnnnnnnnnnnnnnnnnnnnnnnnnnnnnnnnnnnnnnnnnnnnnnnnnnnnnnnnnnnnnnnnnnnnnnnnnnnnnnnnnnnnnnnnnnnnnnnnnnnnnnnnnnnnnnnnnnnnnnnnnnnnnnnnnnnnnnnnnnnnnnnnnnnnnnnnnnnnnnnnnnnnnnnnnnnnnnnnnnnnnnnnnnnnnnnnnnnnnnnnnnnnnnnnnnnnnnnnnnnnnnnnnnnnnnnnnnnnnnnnnnnnnnnnnnnnnnnnnnnnnnnnnnnnnnnnnnnnnnnnnnnnnnnnnnnnnnnnnnnnnnnnnnnnnnnnnnnnnnnnnnnnnnnnnnnnnnnnnnnnnnnnnnnnnnnnnnnnnnnnnnnnnnnnnnnnnnnnnnnnnnnnnnnnnnnnnnnnnnnnnnnnnnnnnnnnnnnnnnnnnnnnnnnnnnnnnnnnnnnnnnnnnnnnnnnnnnnnnnnnnnnnnnnnnnnnnnnnnnnnnnnnnnnnnnnnnnnnnnnnnnnnnnnnnnnnnnnnnnnnnnnnnnnnnnnnnnnnnnnnnnnnnnnnnnnnnnnnnnnnnnnnnnnnnnnnnnnnnnnnnnnnnnnnnnnnnnnnnnnnnnnnnnnnnnnnnnnnnnnnnnnnnnnnnnnnnnnnnnnnnnnnnnnnnnnnnnnnnnnnnnnnnnnnnnnnnnnnnnnnnnnnnnnnnnnnnnnnnnnnnnnnnnnnnnnnnnnnnnnnnnnnnnnnnnnnnnnnnnnnnnnnnnnnnnnnnnnnnnnnnnnnnnnnnnnnnnnnnnnnnnnnnnnnnnnnnnnnnnnnnnnnnnnnnnnnnnnnnnnnnnnnnnnnnnnnnnnnnnnnnnnnnnnnnnnnnnnnnnnnnnnnnnnnnnnnnnnnnnnnnnnnnnnnnnnnnnnnnnnnnnnnnnnnnnnnnnnnnnnnnnnnnnnnnnnnnnnnnnnnnnnnnnnnnnnnnnnnnnnnnnnnnnnnnnnnnnnnnnnnnnnnnnnnnnnnnnnnnnnnnnnnnnnnnnnnnnnnnnnnnnnnnnnnnnnnnnnnnnnnnnnnnnnnnnnnnnnnnnnnnnnnnnnnnnnnnnnnnnnnnnnnnnnnnnnnnnnnnnnnnnnnnnnnnnnnnnnnnnnnnnnnnnnnnnnnnnnnnnnnnnnnnnnnnnnnnnnnnnnnnnnnnnnnnnnnnnnnnnnnnnnnnnnnnnnnnnnnnnnnnnnnnnnnnnnnnnnnnnnnnnnnnnnnnnnnnnnnnnnnnnnnnnnnnnnnnnnnnnnnnnnnnnnnnnnnnnnnnnnnnnnnnnnnnnnnnnnnnnnnnnnnnnnnnnnnnnnnnnnnnnnnnnnnnnnnnnnnnnnnnnnnnnnnnnnnnnnnnnnnnnnnnnnnnnnnnnnnnnnnnnnnnnnnnnnnnnnnnnnnnnnnnnnnnnnnnnnnnnnnnnnnnnnnnnnnnnnnnnnnnnnnnnnnnnnnnnnnnnnnnnnnnnnnnnnnnnnnnnnnnnnnnnnnnnnnnnnnnnnnnnnnnnnnnnnnnnnnnnnnnnnnnnnnnnnnnnnnnnnnnnnnnnnnnnnnnnnnnnnnnnnnnnnnnnnnnnnnnnnnnnnnnnnnnnnnnnnnnnnnnnnnnnnnnnnnnnnnnnnnnnnnnnnnnnnnnnnnnnnnnnnnnnnnnnnnnnnnnnnnnnnnnnnnnnnnnnnnnnnnnnnnnnnnnnnnnnnnnnnnnnnnnnnnnnnnnnnnnnnnnnnnnnnnnnnnnnnnnnnnnnnnnnnnnnnnnnnnnnnnnnnnnnnnnnnnnnnnnnnnnnnnnnnnnnnnnnnnnnnnnnnnnnnnnnnnnnnnnnnnnnnnnnnnnnnnnnnnnnnnnnnnnnnnnnnnnnnnnnnnnnnnnnnnnnnnnnnnnnnnnnnnnnnnnnnnnnnnnnnnnnnnnnnnnnnnnnnnnnnnnnnnnnnnnnnnnnnnnnnnnnnnnnnnnnnnnnnnnnnnnnnnnnnnnnnnnnnnnnnnnnnnnnnnnnnnnnnnnnnnnnnnnnnnnnnnnnnnnnnnnnnnnnnnnnnnnnnnnnnnnnnnnnnnnnnnnnnnnnnnnnnnnnnnnnnnnnnnnnnnnnnnnnnnnnnnnnnnnnnnnnnnnnnnnnnnnnnnnnnnnnnnnnnnnnnnnnnnnnnnnnnnnnnnnnnnnnnnnnnnnnnnnnnnnnnnnnnnnnnnnnnnnnnnnnnnnnnnnnnnnnnnnnnnnnnnnnnnnnnnnnnnnnnnnnnnnnnnnnnnnnnnnnnnnnnnnnnnnnnnnnnnnnnnnnnnnnnnnnnnnnnnnnnnnnnnnnnnnnnnnnnnnnnnnnnnnnnnnnnnnnnnnnnnnnnnnnnnnnnnnnnnnnnnnnnnnnnnnnnnnnnnnnnnnnnnnnnnnnnnnnnnnnnnnnnnnnnnnnnnnnnnnnnnnnnnnnnnnnnnnnnnnnnnnnnnnnnnnnnnnnnnnnnnnnnnnnnnnnnnnnnnnnnnnnnnnnnnnnnnnnnnnnnnnnnnnnnnnnnnnnnnnnnnnnnnnnnnnnnnnnnnnnnnnnnnnnnnnnnnnnnnnnnnnnnnnnnnnnnnnnnnnnnnnnnnnnnnnnnnnnnnnnnnnnnnnnnnnnnnnnnnnnnnnnnnnnnnnnnnnnnnnnnnnnnnnnnnnnnnnnnnnnnnnnnnnnnnnnnnnnnnnnnnnnnnnnnnnnnnnnnnnnnnnnnnnnnnnnnnnnnnnnnnnnnnnnnnnnnnnnnnnnnnnnnnnnnnnnnnnnnnnnnnnnnnnnnnnnnnnnnnnnnnnnnnnnnnnnnnnnnnnnnnnnnnnnnnnnnnnnnnnnnnnnnnnnnnnnnnnnnnnnnnnnnnnnnnnnnnnnnnnnnnnnnnnnnnnnnnnnnnnnnnnnnnnnnnnnnnnnnnnnnnnnnnnnnnnnnnnnnnnnnnnnnnnnnnnnnnnnnnnnnnnnnnnnnnnnnnnnnnnnnnnnnnnnnnnnnnnnnnnnnnnnnnnnnnnnnnnnnnnnnnnnnnnnnnnnnnnnnnnnnnnnnnnnnnnnnnnnnnnnnnnnnnnnnnnnnnnnnnnnnnnnnnnnnnnnnnnnnnnnnnnnnnnnnnnnnnnnnnnnnnnnnnnnnnnnnnnnnnnnnnnnnnnnnnnnnnnnnnnnnnnnnnnnnnnnnnnnnnnnnnnnnnnnnnnnnnnnnnnnnnnnnnnnnnnnnnnnnnnnnnnnnnnnnnnnnnnnnnnnnnnnnnnnnnnnnnnnnnnnnnnnnnnnnnnnnnnnnnnnnnnnnnnnnnnnnnnnnnnnnnnnnnnnnnnnnnnnnnnnnnnnnnnnnnnnnnnnnnnnnnnnnnnnnnnnnnnnnnnnnnnnnnnnnnnnnnnnnnnnnnnnnnnnnnnnnnnnnnnnnnnnnnnnnnnnnnnnnnnnnnnnnnnnnnnnnnnnnnnnnnnnnnnnnnnnnnnnnnnnnnnnnnnnnnnnnnnnnnnnnnnnnnnnnnnnnnnnnnnnnnnnnnnnnnnnnnnnnnnnnnnnnnnnnnnnnnnnnnnnnnnnnnnnnnnnnnnnnnnnnnnnnnnnnnnnnnnnnnnnnnnnnnnnnnnnnnnnnnnnnnnnnnnnnnnnnnnnnnnnnnnnnnnnnnnnnnnnnnnnnnnnnnnnnnnnnnnnnnnnnnnnnnnnnnnnnnnnnnnnnnnnnnnnnnnnnnnnnnnnnnnnnnnnnnnnnnnnnnnnnnnnnnnnnnnnnnnnnnnnnnnnnnnnnnnnnnnnnnnnnnnnnnnnnnnnnnnnnnnnnnnnnnnnnnnnnnnnnnnnnnnnnnnnnnnnnnnnnnnnnnnnnnnnnnnnnnnnnnnnnnnnnnnnnnnnnnnnnnnnnnnnnnnnnnnnnnnnnnnnnnnnnnnnnnnnnnnnnnnnnnnnnnnnnnnnnnnnnnnnnnnnnnnnnnnnnnnnnnnnnnnnnnnnnnnnnnnnnnnnnnnnnnnnnnnnnnnnnnnnnnnnnnnnnnnnnnnnnnnnnnnnnnnnnnnnnnnnnnnnnnnnnnnnnnnnnnnnnnnnnnnnnnnnnnnnnnnnnnnnnnnnnnnnnnnnnnnnnnnnnnnnnnnnnnnnnnnnnnnnnnnnnnnnnnnnnnnnnnnnnnnnnnnnnnnnnnnnnnnnnnnnnnnnnnnnnnnnnnnnnnnnnnnnnnnnnnnnnnnnnnnnnnnnnnnnnnnnnnnnnnnnnnnnnnnnnnnnnnnnnnnnnnnnnnnnnnnnnnnnnnnnnnnnnnnnnnnnnnnnnnnnnnnnnnnnnnnnnnnnnnnnnnnnnnnnnnnnnnnnnnnnnnnnnnnnnnnnnnnnnnnnnnnnnnnnnnnnnnnnnnnnnnnnnnnnnnnnnnnnnnnnnnnnnnnnnnnnnnnnnnnnnnnnnnnnnnnnnnnnnnnnnnnnnnnnnnnnnnnnnnnnnnnnnnnnnnnnnnnnnnnnnnnnnnnnnnnnnnnnnnnnnnnnnnnnnnnnnnnnnnnnnnnnnnnnnnnnnnnnnnnnnnnnnnnnnnnnnnnnnnnnnnnnnnnnnnnnnnnnnnnnnnnnnnnnnnnnnnnnnnnnnnnnnnnnnnnnnnnnnnnnnnnnnnnnnnnnnnnnnnnnnnnnnnnnnnnnnnnnnnnnnnnnnnnnnnnnnnnnnnnnnnnnnnnnnnnnnnnnnnnnnnnnnnnnnnnnnnnnnnnnnnnnnnnnnnnnnnnnnnnnnnnnnnnnnnnnnnnnnnnnnnnnnnnnnnnnnnnnnnnnnnnnnnnnnnnnnnnnnnnnnnnnnnnnnnnnnnnnnnnnnnnnnnnnnnnnnnnnnnnnnnnnnnnnnnnnnnnnnnnnnnnnnnnnnnnnnnnnnnnnnnnnnnnnnnnnnnnnnnnnnnnnnnnnnnnnnnnnnnnnnnnnnnnnnnnnnnnnnnnnnnnnnnnnnnnnnnnnnnnnnnnnnnnnnnnnnnnnnnnnnnnnnnnnnnnnnnnnnnnnnnnnnnnnnnnnnnnnnnnnnnnnnnnnnnnnnnnnnnnnnnnnnnnnnnnnnnnnnnnnnnnnnnnnnnnnnnnnnnnnnnnnnnnnnnnnnnnnnnnnnnnnnnnnnnnnnnnnnnnnnnnnnnnnnnnnnnnnnnnnnnnnnnnnnnnnnnnnnnnnnnnnnnnnnnnnnnnnnnnnnnnnnnnnnnnnnnnnnnnnnnnnnnnnnnnnnnnnnnnnnnnnnnnnnnnnnnnnnnnnnnnnnnnnnnnnnnnnnnnnnnnnnnnnnnnnnnnnnnnnnnnnnnnnnnnnnnnnnnnnnnnnnnnnnnnnnnnnnnnnnnnnnnnnnnnnnnnnnnnnnnnnnnnnnnnnnnnnnnnnnnnnnnnnnnnnnnnnnnnnnnnnnnnnnnnnnnnnnnnnnnnnnnnnnnnnnnnnnnnnnnnnnnnnnnnnnnnnnnnnnnnnnnnnnnnnnnnnnnnnnnnnnnnnnnnnnnnnnnnnnnnnnnnnnnnnnnnnnnnnnnnnnnnnnnnnnnnnnnnnnnnnnnnnnnnnnnnnnnnnnnnnnnnnnnnnnnnnnnnnnnnnnnnnnnnnnnnnnnnnnnnnnnnnnnnnnnnnnnnnnnnnnnnnnnnnnnnnnnnnnnnnnnnnnnnnnnnnnnnnnnnnnnnnnnnnnnnnnnnnnnnnnnnnnnnnnnnnnnnnnnnnnnnnnnnnnnnnnnnnnnnnnnnnnnnnnnnnnnnnnnnnnnnnnnnnnnnnnnnnnnnnnnnnnnnnnnnnnnnnnnnnnnnnnnnnnnnnnnnnnnnnnnnnnnnnnnnnnnnnnnnnnnnnnnnnnnnnnnnnnnnnnnnnnnnnnnnnnnnnnnnnnnnnnnnnnnnnnnnnnnnnnnnnnnnnnnnnnnnnnnnnnnnnnnnnnnnnnnnnnnnnnnnnnnnnnnnnnnnnnnnnnnnnnnnnnnnnnnnnnnnnnnnnnnnnnnnnnnnnnnnnnnnnnnnnnnnnnnnnnnnnnnnnnnnnnnnnnnnnnnnnnnnnnnnnnnnnnnnnnnnnnnnnnnnnnnnnnnnnnnnnnttcgcaccatgcatgtccgaatgacgtctccgatgcagcgggaaaataggctgtccacccccctttcaccgccatccgctgtcacctccacaccaatctgtcaagtcaatgcgcgtgcgacgagggtaaaaacgagcaaacacagatgaaaacatgtatttggaagaaataggtaagtgggagcgatgggacagagagagagagagagagagagagagagagagagagagagagatgtgcatgtacaacgttatatattcaagacttgttcgtaccatccatgcccgaacgacgtccccgatgcagcgggagaaggccacgacgattcgaagcaacgccaggatcgcacacgcgaacaggagcgttgaaagcaaagaagaggcggtgtctccggccccgcgaacacccccgcccgcggcatagtcgatggcgccgtcgagcagcccaaccgtgaacgttcgggtttcccactcctcggcggcgacaccttcctcctctacgccaagcttggagattcggggcccccattgctcgacggcgacaccttcctgctcgcacttctcgacggcgacacctgcctcctctacgtcatcggtcacctattgaagagttgtttgaaaaaaacgaagacaatgtgagggaaaatgcccgggctggctatcttccctaaaacaaagttgtacacgaatacacaacactctcttcatttcatttcgaggagacaggactcaccggaagcagttcctcgagtgatgcgagagcctcgaagtgcgcgtgtccgtcgaaaaagataggggcctccgcgttgtgcaccaggtcgttgaacgaaagaatctcgtccttgatgtcggagctgtgctcatcgaagacgtcgcggccgtgcgagttgctgacggtggcgtcgcgaatgcactgcagggcatccttgacatcacccgcgagctcgccattggtggcttcgatgatggcaggaatcggcactccgtcacggaccatcgatcgttggagcaaggagatggggccgcagctgttgctagagccactgttggacatggccacaaacatcttgccatccagagtgtaatatacacgttgcactctcttcgccgccgccgccgccgccgccgccgccgctgctgccgctgttgctgctgctgctgctgctgcccccgccggtgtctgcgcccgcgctcgtgtacgggaacgcctcttcgccttcgccctctctttcctctgcctgttcctcgtcttcgctgccatgcttcacctgacacatggacgtaacaaaagaggaggggttcagattacgacgacagatctgcaacagatcaatcttgctttggaaccatcctatcttcaggcataggagaaacagaaagcgatcaagtgtcgtggtctatcgcgcgccaaataaagattctggagggggttccgtgggtgcaagattcgggccggggtcccgtggatggaaatttcacagtggggcggtaggtggagtacaagtgtgggtgggggtgtcctatgtcatactccgtatatgattgtgcgtgggaacggagataacacacaacaaccctcttgcacaaaataagtcgcgcgacttatcgataagtcgcgcgacttcaaaatgacgtattggcccgaaaatgccacccagaggtcagaaatttaaaatctttatgcagtagatgttggcaaggggttttacttgagtttagtgtaggaatcgggcattttcatttatcttgtaggtaatgccgggactgtgagagggaatcgtccaaatcgatttataccatctgtacgatgatcctgtaccgtttgcgccgtggttcgtggtcgcgctggtcgaagaaaaagaagagggggatcagaggcagagagtctgttttgtcattgcgatgactttggtacacaacagcttacatctgtcggtagacaccagtacatttgctgtcttgcatcccgtctggagtacatattatatttcaagttcaccttcttctcgggagacggtgccattgctgtctaaaacgtcgacgtccgtctcctcatattcgctttcggtaaccgaatccgagacgccaggatccgtcttcgagtcttcgccgacggtaaccggatctgcgaacagcgatgaatttttttaggaaacgtcacatggtacacgaccggccctcttgtgtgtgctgaacagcagcgcctgcgtcaaagcaagcaccgatctggatgacgccagagccacccgaactgtattctttgtgcgggcgtcatctcaaatacaagatacgggcgtgcttcagggacccgggacgggcgacttacattatatgttcgtgtagtggattatgccatccttacgaaggctactgtggtagtactcatgtgtggttttgagctatgtaagtgcgcaagtgcttggccgtccatcggtcatttggatcttcggggtatctccggcagtagaatctttggccacgcgtcacgcgtcccgtgctgtctgtgttcccgagttccgaatgtgtcttgcgactgttgctcgcgtgcctcggcgtttgtgatacaccgtggtgcccactctcttccgttgcttgtgtctacgagggcgaccaatagtaaacgacttaaccatctcttcacattatcaaccgggacagccgtggttatccagcagcactcggctcggatcaaatcagcattataaagctaccgagccctcaccttccagtagttgaggatcttcatcatttgacgcgttggccgccatggatcttgatggaatgcggtggtctggagaaacgaggagtcagtgtaaggtgcaaggtggtgaaagcgtcgagatgagttaccagttagaggatcttcgtcgtttgacacgttggcccatgtagatcattgttgtaaacttaagcatgttggaaacttaaatgttttctatgataacatacaaaaatggctcgcccgatgtcacccgaaatatacgatgcattcagaaaatgcgaccaacaatggatacagagacggagaaaaatggatacatcttcgctgttcttcacgctcacgaggtgctgtgttcaaggtagaggtgttagccatgtccttaaaatggaagacgaggcttactcgtcgcaggcagtacactcggccaggaaaaagcttccgatcggggcctttaaagaggtgaatcggttcttacaccgaggaccacacgagccacgagtattcgccgtagatggatcgaaggtgcacgtgcacccctctttcatcaattctggttacaagacacgaacaaacgaccaaccagtatcgcgtcctgccaaaagacctctcgtcatgctctcttcgatggtagatgtcaaaaccaaagcgtgtatcgactttgagctcacgaagcatttcaatgaaagaagagcagcgacttcgatgctccgaagtgtacggaaaggtgacacgctgttgttcgatagaggatactattccaaagacttacttcgcagtgttcacgactctcatgcatttggcgtttggcggctcaagatagacgctttcaaaggcaccaggtctttctttaactcgtgtcgcacggaggccgcgtgccttattctcggtatcgaggcgcgtcttttgaaatattttatcgacggtaaaacatacgtttgcctcacgaacgacccgtcgctatctcgaagggatatcaagactatgtacgcctcgaggtggcgggtcgaagagtcgttcaaacgattaaaatcaaatctcaagctcgaaaaagctcacgcaaaaacaccggctttgtacatccaggaggtggaggccagagtgttgttagacacgatcactctgagaatgcaaagcagtacgaaggagtcgtcatatctctatactctcgacacgcatgtcacacacatccttcgtaacgtgaaaagagtctctagtcccacgagatacaagtttctacgagtagcagagctagagtcaaaaacgccgttcggtcggatgcactacagaccatcgggtgagaaacgtcttaccaatcatgtcctcggacgttacatgcggtggaataccgaaagcgaaagtttactcaaaagtttttgactgtgaaacctcgcatcccgtctcacaattcatcatcatctccatcatcctcttcatcatggtgagaccatcttcggatggaaactcgcacaagaagaagaaacacaagaagatacctccgagggcacctccaaagaacatcccgggctttctgcagacggtgaggggcctgtacccgaatcaatacctcacggcctcaggaaatctacccaaaagttgcaagggtacttactgctgccagctcttctcgagagtcaggttcggggagaaagtgtctcaaaaggagcggataagaaccgtgagcgtcggatttcgggcggcaacgaccgatgaggaacgcgacacatttcagtccaaggtcaatgatgcggtcgatcatctctcccgtgaacgagttctggcgtctctcttcgcaaactttgtgtttatggaacgtcttcaaaacgggtcagcccttccggagcccgacagggcttttttcaagtcgtgcttgtcatcatgcatcgaaagcagaggaggggggaatctcaacgccgacttcgaccgtttttccgagataacgggtttgacacgactcgtgcctcccaaaaaactgggccttgaccaacagcgagagcacgaggcacaacgcatggcaacggcaacgtcgacgcgtgcaacacaccacacggaaaagaggaggatttcgatcacgatgtgctttctgcgagggcggatatctcaaggagaccttgattacaagaagtacaagacgaagctctacaacctggcggagaagatcatcacaaacttcgacggcacacccgaagacacacaaaagcttcgaagaacgtcacgagcgttagacccttgacagacaccgacatcattatcgacttcgcacggagggagaaggacttctctgatcgagactgtggagacggcaaaatcgcaaaaacgatcaaacacctgtactggatgttcaacacctacgtcgccgagtcaagaagaatgtacgaggaggccgtgtcccgagcccacttgttcgctcccggtgaagacaaggcgtgcagaaagaagagggacgagttcgtgaagcacgagctgggcgagaagttcacctacgctccacccaaagacactgccgtgctacccatttgctcaacgggggcagtgttcatccacatcgacatgaagacgctcaagtcatgggggcttctgcactccaacgatgcttggtggtacaaggacgtcctccgacctttttccaaagaggcaaatatcaagtgtctcgtgaacaaggagaacgccaggtacgcgtcaagcgagcatggctacctctcgagtctgctaggaagtggtccggacaagtgcccctggatgattggcgagagtttcttgacggacggtgtacagatcaagcttctgcttgtgacactagaccacggaaggaaagctttttccgggtccagcgagctgaacgaggcggggtacaacaaactgccccgggctaacgctcagctagaaagcctcttgaaagagggaagaggggtgtacaacatatccagccttttggagtcgacaagcatcagggaagacgtcgtcgtgatgtccgcggacccgggccaggccaaggtgatcaacgtttcttcggctacggctagcacttgggcgaagcaagaccctggcgtcatcctcaaaacttcgacgtgtgtgttcggggacgattatcgtcgtgacactcttgcatcacgttcagacgagtacgagacgttcaggcgcaaggaccagccgtacggagtagccatcgatcgtcttagcaacgagaagaaaagaacttcctgcctcgcaacgttcatccagtactgcaaaagttggtgtgcaaatggtccggcgttattcctagagactttgcagacaggaaggaagttcatgaggtttgatcgtttcagagctacgcagaagacacttgccaagatagcggacaggtacatgggacacgtagaagacacttgcaggatcatgttgttcggtaaagcgtcttttcgtgcgcagaaagggagggcatctgccccaaggaaagctttgattagagagatggccagcagaggcgtggtgttgatggtgaaggagtacaatacttccaagaagtgcccggggtgtggagaggacacggtcgaggacaaagaacggagaatccggagttgcaaaaactttaagatcggatcaccggaagagtcctgtagacttcaccgcctgacaccagagtttgaaatggatcgcgacaacgtagggtcgactaacatcggtatgcgtggtttcggccaattgctcggtcaggtgtggttttaaggattttttccggattttcacttgcggatgatactttatagttggtttttctaaagttgacaatagtgatgtagatcaacggtggtggccagaagaggggtattgtagtgtcacaagcgtcgagatgagtagcgcagaacacgaggtcggtgcgttgatgcccatggttcattgctgcgcaattaaacatctgcacaagcacttaccactcgcgtcgacgcgctgaagctggtgctagttgcggtctcttgggtaggaggagagggggaggaatggagtggtgtggtggtcgaaagtgtgtgtggggaggcgggggtggatcatcggagttgcttcatatctgcactgtggccaacagccaatcagcgcatatcggaaaaagcaaataacgcattagactaaccgacatttatgttcttgattcgtgaacaatgtcccgttgcctgcacaaccacatcggaaaaagcaatcagtcgacaatgtttgcatcagccgatgcaaaggagcaacgcatactcagcacttgatttcacagatgaactgatttttcgcacgacgaacgaccgctgacgcaccgtgagccgctacagcgcagctgtggatcctgcacccgacagcagaaagcagtccccgcatgtacgtatatatatgtataccaaccttttcaacactccccttgtttttgtgctgttttcgatgctattccgtgtagacgtgcgtgcttttcaagtagtcttgcacagttcgagcacggttggcggtgtcgcaaaaacagttattcaggagggtttaccttgtcagtaacgcaaccaaccgcatgatgtatgccattacgtcgacagccaatgctaatggccatgaaccaaacgggtacacgtcttggaaaatgtacaaggagacatctgacgtacaggctgtcgtgaattaatttgagttggtgcccgtggtcgaaacaaatattcacaaaaaaaacgacagctgcgcaagcgtgtcaactgcttgtgaggaaaatctgggcatacccacgccgaagtctactttctctcgtacctaactcatcgccgaatgcatgcatactcacgaaacttcgcaggcgcatgcacacgacccgtacagcagtattgaaaaaaaaattaggtcaatccgatgatttggcgacattttattgcccttatttccaaaatatccgaagtggcaatcgaactcgggtcgggcatttctttgccgcgcagaacagcatcacacgccgccagcggcgctcacagcacgcaccgtggtcatacgaaccgaacgcaaaaaacccgaggtcaatcggagcacgtggtgtcgagaaaatgcccaaaaagctctctggctgaaaatgcctccatattgttttcgacagtcccgccacctgacagtcccgtgaccgtcgcgtgcctgcgtctgtgtcacacgctcgttctgcctcacacgacaacggaagcgagcggcgcagcagcgggatcggttaccagggtgcccgggggactctgtgcgacaggaaggtgtgtttgcgggtgtctgcgcgtgtagacgtgtgcacaggtagacgtgtgcgcgcgagatgtgtgtgctgcgcaccagctgccgcgccgcgcgcattctgggtttttggtcacgctcgtatgtgtcacacaactcgcccgcgcgctgcgtgaacgctggcaaatcgtccccgtaggtgtcccggtgccttcccgtgcaggaagttttattttagacgcgcctatcgtgcttgctgttttctcccccctgcgtgcgcacgtgacgtattgtacgtcgaataacacgggggtgtaaaattacaccccaccctcccctccccaaaaaaaacaaattatgtgggtttcacgcgtacccactgatcaaataatacggattggtgggtgtgggggtgttctgtctgtgtgtcggcagtaaatcacttgaaattagagacccccctggcgcgcgtaccacgtttaggcccgtatctcggccccaattatgggttgaccataaaaaaaatatacagcagtgcgcctgacctggcggaacaacacaccaaattacaagttaatcctcgaagatcctgaattttaaagctcgaaacaagctgtacagcagtgttcacgggtaaagtgtacgcataactctgcaccatttctagtgttcggccttgaaattttgcacgatggtgcccctgactcgtgcgcctgtgcacaaaaaatcagaaatgaaatcggagcatgtggaggcgctggcggccgatttcagtgctgtacagcagcagataacaccttacgctgccacagtcgcccctgtttttcttttttcgccttgatattttggcacgcttgccatctgttcacaggaccaccgttgtgtgtgtttatggtggaagatatgtacagctgcgcaagcgtgtcaaccgtttttataagggacataattattattaatttgcaaatcacactcacgtgtccatctacgaacttctgttattcattttcacacacatcacacacacgccgtctttctgaacttggtaaagcttgtctcgccttcatctttaaaaaacgtattctcggacctaaaccacttctcgccgtcccggagctgaccaactttgcgctttttcaccaaatcacgaaacatgagttttccatcccccccgtacttgtgtagagacgtgcgaatgtcatctatgaacaccatcctcgctgcgttaagtctcttgccgtatggatggttaaccttctccgacgctccccccgtgcaagccgagtcaactacgccacctagcacgacgttgcctattgtgtgggcagctgtgtttgcagaggcagctgcatagctactccttaacgtggcactcgacacctggagataggagctaaagtcgtcgatattactgctattgacttggcccgaattcagggcgtgtgtggcccaaaacgtacggcacacatggggagagaagttttcaattcctagccagtacgccccaatctttttgaaacgcgaccgagtgtcgtttggggtccacccttcccccttcgaattgacaaacagcctcctgttgccgtcgcgcatgtctacgtcgcagaagcggtggcccacacaggctacaaaatgtatcatcatgctttggtctgctgacatttcaaagtgactaacgggaagagccccactcgacgctgaggcggtagccgtcttccaagttcggtccttgaaagtgtgcctgaagtgggtgccgtccggaacaagagcgaactcgttcatcgttgcctcccgcatgacctgggacctctgaaaacagttgcttagcgcgagtaagacgcagagattggctacgtcggagtatagcacacccttattcttagcgtgctcgtacaggagctcggcctcctgattggaaattttaagaaacgcggaggggtgttccatgctaaccccgagttcctcaccgatcaggctcttcagggggtgccaaacgccgaaacagacgcctttgagcatgtcgtacatcatctccaccgccttggggtccgtgggatccaacatacgcccgccatccaccttcttgttgaggccggcggggtccaggttggtgctgacggtgtttgccattttgagccttttcctcgttttccaaagctggctgtcgaagtgcgccatgatctccgtcagtttcgccgacactagcgtcgaagagcgttgggccgccctgcggtgtgttgcaagcagccttcgccgcgacgcctgctctctctccatacgtcaaatgtatggaacccaacacggagccgtccatgcggccgacagagtccacgggtcgctgtcggattatgtccagactcccaaccacaggtccgcactcgatcccatactttgttttttcggtgtacgcccgaaacagtgtagctatcctctcggcgtcacccggggccgagcgggttgccttaaaaagaccgtacgcgtctcctacgtggaacccctcaatgtacttgtcttggcacgcccgctccaacattatgtaggctatgtttctgtgcggtacgtttatcgcacgaaacacgcccctccagtctgtctcccagccgcggatagcgccgtccaagtggcagggggggcaaagccacctctcctcgagcacgcgacgctccatcacgttcaggggcaagacgaccgattcgaaagctgtggggcgcccgatgatgacggtcgcgaaccacataagcccgattgcagaagaacatgacgcatacacactcgaagagctggtctcccctcgcttcccagatattgtggcaaaatctcgctgcaggaagaaccgctgcctcgaatcgtcgtcgtcgaaatccatgttcatgaactgtagtatactcttcgatttgtccacagagtacgggagcccgtgaaacaccgaactagccgagccgacccgttggagtcttgtgagggcttctcggcgctgctctagttgcgtcctgccctcgggcgtcgcgcggtcgatgtctctgtagtggtggctcgccttgttcagtttgattcgattttcgagtaggctcgggaagagctgggcgtagacgtgaaaaccgatcagggtcaggttgtctctcagagactcttgccacgcgagcttctcggtttgaggtaaccgatcgtatgaagtgccactaaaatttctggcgccgtagaactgccgcacctggccgtcggtgggttcaagaaatatttttctgggtgagacgggacacttgaagctgctggtggtctccttggtcgcgcgcttgacctcgtttgcgttgaaattcggttttttcagggtggtgatttgtttcttcaccttcgagatacttgaaactttaatgcgcttgggtgcggtagaaacaggagccatggttgaggtcgggggagtgagcttggatggggcatgaagccacacaaaagttgttcgttcagaatgcaggggggccacgcgtacgagaccgattttgcacgaggggtgtaggggttgttcaaggtgtgttcacagacagatttgttggttttaatttactctcgtgaagcgcactaccgacctcactttcctcgaatctgcgccaaaccaaaccatggctgagatgtggcacgaacacttcctgtcggacattatcggtgaaataacacttcacgaccggcgcacctgtttgttggatgaagggcagttcattgatcgcttgatccgatacaatgctgttgaagactacaacatatgcatcgaaaagcaggagattatttgggcggtgatagtatactatgaagcgtatgatgtcgctggttggatggatgccaagggatacactgcaacaggggacagttatgaagacgctgcgtcgtgtgtcccctacgacgcagccaggtgggaccagtggttgcgatcccgtttgatgctgcctccttcttcaagtcttccggaaaatcacgtagagaatgtcgcctgcgggatggtcagtatggggtacattaaaatccccctgaattcgggttatccgacctacgtctggttgctcgatggacacacgcaggacgatttttgcgagccgtacagttgcatacagttcttcactgagcatttccactcgggaaactacaccgaattgtggtcttttacgctgatagaagagtgtctcgagtttcatctagacgaatgtatgcgggctggtacagctatctacatggtccgggcgttatcggaacgttctcctgtggtcgcgcaacagtacattggaaaggttctcgctaagttgctggggaaaatatatcgaaagacagggccaggaagcagctggcggcaactaggattcagtgtgcgttccgggtgtatagtagcacgaagagagtgaatgtcctccggtcgcaccctgacaatctcttttccgagttcagtgtgttgaggaagaggaagctcgaaatagacacggtttggggccgtagtgcagtgaatcgggtggtgttcatacgcatacgcgtgcttatgtgctggggtgacgtttgctgggcggcggtaaacacgcatgcgcgtgcttatgcgctggggtgacgtttgctgggcggcggtaaacatgctggttcgactgaaatgaaaaaaaaaacactccatacattttcaaaaaaatggcgccgcactgggatcctagccaactgctcaggaaaaggggcaatgcatcgccacgagtacgagtttgctttcaatatttggccaacgtcaccactagacacagaagagtcatatcgggacatcacgggtttttttctcggccccgtctggtcaccgggtcgttgtttttgtgatcgcccgtagggcacaaatgtgtgcggtgtgaggaatacatgcctcgtgtccgagttcagcctgggcacactgctggcacgatgcgcgggggtcagcagcaacccgtacacacatcacacatacatacagagtacgcacgcacgcacgcacgcacgtgaaaaaaatcgtgttaatgaccgcggggacgccacaatacgttggaggtgctgatgaaggttatcaccagcagcaacacaccnaaaaaaaacgaggtcaaacggagcccgtagcggcgaggaaccgccgttttggtattccccccgcatctccgccgaaacggcaaatttgtttttccggaactggaagtttgcgctctgcacgaattttgcctctcacatcccacatcccacctccctctttctccccctcgacacagctcggacatcgtaatccacggcagcgtagcgtaacaggacttagctgagaggcatctggagagctgtgaggaagcgaggtatgcggtgttgtctctctttccgctctcgggcacgttctcagtttgtttcaaccatggcaggcggtggggcgtaccacgtcgcgcatttgagagcttagctggcgaccgcgcgctcatgaaacgcccccgcggcgcgcgagaccggtcgctttcgcctcctatgatgtgtatgtggctttgtgcgcgcctcctctttatgttttgagcggcgctgtgatgttgagttgatcgcttttgcctgactgtattttcgtagtctgctacgcaaaataacacccccaaatgttcgaatttggtttttttggcgccaaaacactcccacttcatgcaaatacagacttaggtacccgtacccaccccctacatcccaaataatgcatgtgggtggtttgggggtgcacgcagctttggatttaacctgagaccagcgctgacagcagactttcagctgtttacagcagtaccccggcccaaaagtctagacatttggctgcacagctccccgccaccttcgaatctgaggatgaaactttgcacgaggctccccctcgccgatgcgcattcgaagagttttttttatcgaaatcggagcacttctcgatttttagagcccccaacagtgtactctcagcagcactatgtacgcgtttcgctgcctcactacgcccaacacgtgtgtctcgcccccaaactcggtgggcatgcgtattggggccacagctgtccatggctgccccagtggtcaccatctgcgcgcacgtttgttgatgcatgtctacccacccccttgcccgcactgccaggcaccgcccagcactgccgtgtattacccgccattgctatcaccaccccctccctccccattcgcattttttgagctaacctgtcacactttcaacatctagtctagtgctggtgccacgatacaacagccttcattgcatccggccccctgacgacaccaccaggcaccgccccagcaccgccgtgtattacccgcgatcgcgtatcatgcccccccccccctctcttttcgcattttttaactcgcctacggcaggtgccgcacgagacgcaaacgagagaggcgaggagttcctgaatcgtgtttcatgcagcttttgcaggggcgttgaatcggaacgtgtatcggcaactttttcgtagttgatacgccccgtagtttttcttgtgcagtccaataggaaggttagagggggtgttgaatcggacagtgtatcggacaggttttggtgccgatacatcctatagggatcgaatcggcaacgaatcggcgcatagtgttttcaagacattgtatctgattcgagtccgattcgggaggtcgcaattccgtttatacagcaggtatctctaccagatctacgaaatggaggaagctggcgggtctcattctacgcaggcgtgcatggcacatgcgggga

SEQ ID NO: 289 - DNA, 2541 bp, unidentified
  misc_feature 1..2541: note = Fanzor polypeptide
  source 1..2541: mol_type = other DNA
agccaataacaatttgaaggtgttgttgggtacatgcactccccgattccttcctactatcacttttcatttcgctctgccaagcgaactcgtccagtctacagtctacggctcctttacatcccgaaagcacaagcgctgtgtcggggaagggtgcgccaggcaagcgcaagcgtcaaccctttaaagacgtggaaagcgacacaaacggcactgaagtcgcatgcacggacaaggggacgaggatggcctcgatgaggacgacgttgattatgaggacgcccaaccaggaacgacactccccggcaagatgcccgacgtcgccgagcggatgaaggacagcaagaaccacagcttcgtaactgtgaagatgtcgctaggttccttcttgacaagcgaggggaagctgttgctgtcgtttgaaagcatcctcgtggacttgaacattggattgctagatgcctacgcgctactgaacatccacatgctacggttgtgtggcgaaggactccccattcctcgatttgagcagaacttcgttcgccagtgcttgacagccgtgatgatcaacgacggcaacgtgcgcatcgatcccgaatttcagcgatccttggagctttacaactcattgagggaccctactgcgcctcgcggacgccgcaccggtatcaagagcggacggcaacagtgcgcagcgcggggaattgtgaccgctatcgagaatgccctcgaaatgaattacttcggcgattcaacatggcgctacgggtccagtacggtgtagacagaaacacagcttacacattggtggcacgcattatagccccagagttcgagcggacaccacctggcatcactgatcgtcagcgcctcgacaacatagtcaaagagtggcgtggagaggtccctagacgtcggagcgggcttgacgactacatggcccactcgctggtgcctctgacatatcgattcctgcaaattctcgagaaacataacgatgaatttgagcaacgagttgctaaagctcgagtggcaggggcgtctgattttgaagtgaggctgatccaggctgaagttatgaagacgttcactatcctaccgactaagcaagggtttggcattagtcaccttacgatggattcgattgggctccaggaactattagtccgcaacaatattgctgtccctccgtacgggccgaagtggaatgaggtgagagccgtttgctggagacggttctttcgcaatgacacggtggagagactacagagtctggtcatcgtcggcttgcacgagagatctcgacggacggcaagtcggcgagtgtcaaagtccgcaagccgaagcgtgaacctaccaggcccaatgcaaaatacttccaagctgccgagtttgactccagatgggggttggacccggggaaatgcaacctcttagtcgccacaaaccaggatgacgagacggttgtgtgctctggtaaaagtatcgtgaagatgcctacattaccaagagcagccagaagcatttgagatggatacggaatcgtccagacattgaagctgtatttgagagtatgccgacgaagaggagcatgatgctagagcggtggtgggagtacgtcacatttatgacgcagcacttgtacctcctgatgacgttcatgcagcacaaaccgtaccgtcgcaatcgacttcgcaggtgcttcttcaaaaagaagaagctacgtgagctctgccggcaacttgcgcgtcccggaaagcgagttgttgtcgggtgtggcaactggagtaactgcgatccaaatggagcaatcaaagggccgccatcgacacccgtgaaacagtttgcactggagttgtcgaagacgccgaactgttcgatcatctttattgacgagttccggaccagcaaagtgcacttcgagtgccaacgagagctgtccaagcagtttccgtatcgaaaggccgccgcccacgtacgcgcagtccaccaaagaagggcagcgtacccggtttacagtgtactccaatgcagaaacaatggttgttatggtatgaccgtgaacagggacgtggacgcttcgaagaatatgctgcacctgctcgattgcgaactcaacggcgagcctcgtccagtcgcctacacacgtcaagcgaacatataactttgcatttctagtgttgccatgtgcctatctggagttgcatgacgatagccggctcaggcattagccctttcggactctgtagactaagtacctataggacgcccttcgggggataatgggttaaggaaagcgtggtgacacaaagagaaccaaaataaagagttcggctgcaagcagccgatgctggagtagtagtctacggcctggagaaagaacacgtcgcatggaggtattgtatctcttggcaaacgccaattaattgttagctcgacccgttctctcttgggtgacggtaagcatgagccgtgtcgtggggaattacatgaccacgaaggaggagtacctgacgcagaactacgagggtgcgtcgacgc

SEQ ID NO: 290 - DNA, 21128 bp, unidentified
  misc_feature 1..21128: note = Fanzor polypeptide
  variation 8533..8582: note = n is any nucleotide
  variation 13981..14030: note = n is any nucleotide
  variation 14833..18163: note = n is any nucleotide
  source 1..21128: mol_type = other DNA
gctggtagattgagctggccatggacggagatgatgacgtgttcatccaggagagtgagagcactaggagcacgatctgtccggtcacgcagatggagatggtggagccgctcaggaagtacgtgactgtttactggtgctggtggcgatatggatatttaacaatggtgtgcagtccgagatgtggccactcgtactcgaaacagggtatccagtcgcacttgcagcacagcaagaagtgcccagtcgcaggtatgcgtcgatggattgaggattgctgtgagttatgtatgaagtgctgacgactgtgtgcaggctgcccccagaaattggcgttcaacaacttggaacgcgatgtcgagatggaggtcattatttcgcgcatccaacacacttcagagcagcagcggtcgcaggctgcggccccggtggatcagggtgatgacgatgaggaagaggaatatgtcgtcgagtaacgttaccgctcggcacgtagtacaagcggtttctcaagcagcgttcgacaaccttttcggtatttgattgcattttggaaactcgatatcgacttttatttttgctgctctaacagcacattcgctatgcgcgcactattacccccgtagcaccctcgatgagtgttgcatgaatttacgtgatgttagcttagcatcaatggtattgcttcacaatgcgattgtattggtgaagctggattgctcctctgtcagtgaggagttggcttctgtgtgctgagcagggaatgagccgttgagcctcaaaacccaggcgaaaagtcttcttgcgagctgttcaacattgctgtaaaaaagtcaaactgcccggatgaagtctgtcgaagccccaatttgaaaatatcgactatcaccgcggctgaataatgccgagtgaccaactgtaagaatgtcagcttcgaaggcagagcagcttgaaggaacccttctcaaggccgctgcctccttgtactatatcccgcttcccgtctatcattaatgctttcggtgattattttttcgggtgactcagtagagttgcttgttgcttttactgagacggcgccgtcctaaaaatcatctcaggcgttgagtacgcctggtgacattagcgcacatgctatcggtaagccgagcaacgataccgctcggctagacccgagcggtatcattgtccatttcccctaaagagctcatgtatcagtatagcgacggaaattttgaataggctccatggcaaaaaaacaacaactaaccactaaaatgtctaccccttgaagtctgccttttaccttccatcttcacgatctgcaccacatcagtgtgggggtttcagcagtttgcgcttgctcttctcttcggtggtcggtcgttaaagcagcaggcgaggagaatgtggtccctcctccatccggagaaattccacttgcccagtcctccaccagcgagctcgtccccacccgcccccagtatgttgtcgcgctcgcaagtgtgccaacagcggaaagcatcgctctcgccaccattcggatgtacattgcatcacgacgcgtcataccgatgcctacagaactcaaagtacgctgcccaagaaacgccgtccgcgactaacgacacccccgcagcacgatcgactccatcgtccacgcccaccccaaacaagacgagtcgaagtcaggtaaaccctatcggtggacccccatgcgtttcgtggtggaaatgctgaaacgaggtcttagcatcacacaaaaccaatcgctcaaggaatcgcaaagcttatgggggtcgatcgtcgagtattggccgcatggagcaggacatactgtgtagactacaaactacaattgtagactactggttttctcgcgacgaagctgcacctcagaagctcattgatttgctcgacggcgcagagacctcaatagatatcgctctgttcatcttgacgcatcctgaaccgacagacgctatcatccgggcctcccagcgtgctatcgttgatcgggcacaagtctccgagaaaagctcagctatgatgatcgaaaacggggtcaacgtatttcacgcaaaggccccaaactcatgcactggaagatggtctgttgccttgcaaaacaactggaaaggtgagatacccgcggtactgttcatctgtagcccacacacacacaggacagggttctgcaacttgagcttttgcgcttttgcacaatcgccacaataaacggagctgttctgcgtggcggcttggagcttcggccgagtggctggctcaagagtttgtctgcagtgagaacgagagagaaatgtagaggagatgaaggtgctccgaggttttcgggatcccgagttttggatcacccggtgctacactgctttcgtccggaccggtaagaaggacatcaaggccatctgcgaggagcaccccggctggaatcgacggacggtcgcgcattactacgccatgtacgaaaatggagagagtttgcagccaaggtgtggcattgtggcaccggtcgagcattctgaaggcgcgtgcagaaggctgcaccattcgcatgatcgtcgacgagcgaagcgcgctccaaaagaaaaaaaacatgacttgggtacgcaagtgcggggatccaggtcgagactggacgcgtggccagcttcatggtccacaacaagtggaccatcgtcaacggcgagttcatgttagaaggcacgggcaactacagcgcggttgcgttcgatagagcccgccatgcacagacctttgagacgcgcacgggtcaggcgcaccttgattcgatcaagcgcgagttcgagcagctctgggaagaaggacgggtgcttcaatgggcctcgaggcgtactgcttgcttcatgtacttgggggaggacgaggacgtttatgtgtaggatatggttgaacgtgcaagccagtaagtaactttgttggtgcccactttgacttgggcttacattggccgtgcaggagtgccatcgtagttacaataggagctcgaggatcatgatgagtcctctcagtccttaccagccaaaaaaggcaaactgcacctagcgcattgagctggcaacggcagccccatcgacggcggctccagctacaacgggatctccgtcacttgactcgtcccttcagtccactgctgcttcttcgtcgctcgacaatttgatcgcgtctgctggatcgggtttgttcattgatccgagttcagtagtggtaaacggcgagctgctaccagcgagatcaagtcgacgtaccgcaactgggtggggcctcgcgccgtctcccccgacgccgcgtgctaccgtgaagcactcatcatggacgcatgcccgaccaacttcgaccagaacgaggttaccaacacgtgctgggccgagtgcccgatcgcctacccggtcgagtgcggcatggaatgcatccgtcagaacgatgactgtgcgatggaggtgctcaacaaggtcggtgctgttgctagcacgtctagtcatcgctaccgttggtgcgtctcagaaactgtggcagctttcaaagggtgcgacgcgcgcattcgactgcgctaacatgatgatcggtacgatgagatccatcatccgttacgtgcgtaacatcaagaccacgggcccgcgggcctcgacggacaagattttcaacatcttgcaccagtcgaacaacatcgtgacggacctgccgatggccatttacatttgcatgggttgggacttgccgaggcctcttgatgtctcgggtcgtgtgcttacgacgatgaactggatcttgctaaacgccatcgggtacaaggacgacctcgtgtctagctggagcaagttcaaggctttcttgatcggcgccaacttcacggaggccgccaacaagatcaacgagacggagatcgggacgctgagtgacgccctgaaggccaaccccacctgcggctacgacttgcgagtgatgacggaccgcacgtgacgaggaaacgcagcataatgcgggtcaagatgagaacgtgatacttgccctcatgctgtccacgtcgtgcacacggacggatgctgagtctgtcggtgttgatgcactttcagtcgtcgaccgtaatcgcttccagtttttgagggacgcgaacatttttcttgagtcagggaagaagctagtgttttacctggtgcgtcttcgttatcgagctccgattctccggcagaacgaccagtcggaagtgaaacaattgatgcagagcatgatctggtattcgatcaccggcgcgaagatcgacggtggcaagttgcacgatgccgagtggaccaagaagctggttttcttgaatcctgccaacgaaacactgtcgcagctgtgggaaagtggagagagaagcaccagctcggagcacgaacgttttgcacttattggctggcctgcttccgccgacatagtgaacgcagtcgcattgtttggagaagtgtcctgtgtgcctgtcattcttgcacagtgctacaacgctccgaatgcttctcagcgccgaacttgatgaaaatggatgccatttcgctcaaactctcaaaatcttcgagaagagcaatgcatctgttgagtttgtacccctttgccgggagctaggtgctgccatcgttgacttgggtgacactacactgatccaggcgtttttcaagaagtatgttgcccagctgaaagacaaggacagacagttatttctccaatggcttccagctctcgtgcgcgcatttggatgggcatacgttagtgctgccacactgaatgccatcgacgtgcaatcaactgaaattcgctcggatcgagctttggaactcgcaaacacacggttacctgtcgattggaacagatacagaacggatcaggttttggatcaggtttttagatactccaggatagacttcaggatgtgaacatgggagttggtgcatgtgctgctgctaatgcgggtcggtggtaggtctcagtttgcagcaggcaatggcagacacaagtgctcagtcaccggcgcgaggtggagtgcgcgttattgggtcacaggaacgaggtgctgggtcgctgaaacgacgagctgagtcgctggggcgaggtgctgagcaagagccactggagcaagagtcactgtcaccgaagcaagacgacgagggagatgctaagttgccaaagaagcatcgtcaagagcgcacgacgtgctactttcaaggttacaagtacacgcgttcatggacttcatcaaagaaggccgtgtatcgttgttcgacattccgacgcacaaagtgcaaggggactatggaattccgcatctcgacaatgggctactccaatgcgcgaccgcatacatgccaggtcgcgcaggttgctagtggactgtccgatgtcaacgaggatatgaaggccatggcagacagcttggctattgctgacgtcgctcgaccggttagagaaatatggcaggagctgcgcagcatcttctacggcaatgacaacaatgtcatgcttgggttgtctgagtcacaagtggtcaaccgcgtttacagagcaagatctcttcactacagtggcaacgtgcacggatcggtggagattccaccactctcgcttgcactcaatgagtcggtgtcatttttccaatttcactttgtttcagcaaaccgccacgatgtgaacagtccaacacgtttgctagggtgggctcatccagcgctggtgaacttgtttcgctaccacaacgtgtcgctctttatcgatggcacctttcggtgcgttccacgcaattttcagcaatatgtggttttcatggttcatgactgtgcgtcaggcctgtacatccccgtgttttatatcctaagtacatcgcgcagtgctgatgcatattgggatatgatgcactttattctccaagctactgaccagcaactaagtccagccgaagtcgtatgcgactttgaatcggctttagtggaagcggtgcaaacccagttccgtgacgccattgtcttgggttgtctattccacctgaagcaggcgctgcggcgtgcgatgaagcggtatgctatacctgatgcagaatgcagtatagcgatgacaagaggcgtcatcgatatgttgacagtggccaatccggatcaagtgaagtcgcatgggattgcttgggctcagacggaaatcaagcaacgctgtgagaagcaaggaactgcgtactcaaacgcaaagaggcaggagttttgggtgtactttaagcgtacttggattgacggatactcggtggggctttggaacgtgtacggtcttgataatgagcttgttgcgcgcacgaataacccgctcgagcgcttcaatcgcattctcaacacgcgcttccccactccacacccttccatggccacgttcgtgaccgtgatcaagcaactttcagccgagtacgttcagcagctgggtgatatacctcgtgaccgtagcaagcgcgtaacgcgagagaccattgagctgcccattgccatcgatctacccaaggcgttcgaggatgcgaccacatttgacactgattctgcgccagcgtcggcagctacgacttcagatggcgatgcgccactgcatcatgaaggtgcctgccagcacggtgctgctgctgtagtgttgtagtagtctagctatctatcaactagctagtcgctttgcattaatttgccaatgccctttgcctgcagtcatgagtgtgttcttcacgtgttgccttcaaatcggccggcccgatccaaaacctgatccgttctgtatctgttccaaattcaaatctaccttttcaatcgtcgctgactttttgaaggtgtcaccgatgagcacgagattcctggggttaaggctctacctagtggacacatcgttcgagttcaagtcggtactcttggggactcgccatttcgcgcctcagtatgggggaccagatggcggaatacgcggaccactttaccggtggattggtgacgtcctggggggggctttggtttgagtcgccataaccttttcggggctacaacagtgatgtcaaatggatgatgagggacggtctaaagttgtagcgggagtagtgcgtgccgcacttcatgcatgcggcaaccaatactgttttcggcatcgtcggtgacaacagctcgtccaagaacccagccatgaccgacatccttcgacgcatcatcaaaacgatgtacaaaacgcagcacgtcgaaggaatgggcactctattaagcgagttatgcagcgttatgaacccggagggtgtgcatccacgctagctcttaaacttccgcacgcatcgattcctgggcctcacgcgcgtcgtccgacgcattcttctactctgggatccattggtgcaatggtacgaggagcgggccacaaaagcccgacgtgagaacgtgatgccgccggagtccttcccactagctcgggaaaagatggaactcattcaggtgctctcactgctggagccgatctcgaaactaaatcagattggacaggccgagtcgggggaccaatgcaacgtgcttcttggactctacaagctccgaatatccttgttggacatcaccacagccttgaaggactgaagacggagaatcggttcttccgaccggatgagctgtacgatctcgcatcgacaacccgttcgctacttcacaaagggtttcgtcgggttttcttccggcggtacaccgatcgtgataccatgaacgtctgctcctttgcctttgagatgcaactatttcttcaccccaacttcaagcatccatatggagcgctgataaaggtgttaccaaggtcaatatacaggcaggtgcctccaagcaggtagctgaccgacactacacgaagattcgacgcattatcattgacagcggctgacgccgagccgacgtcgactgatatcgttgccccaccgtcagctactgggttatcagaggacttcgtggagctcttcacggagacagcgaacgaggtggcaccaccacatagactgcggtgcacgagcaacgcatcgacgatgagctcgaccgctggctgacaacgcctacttcgcttcaagcgattcaacccggtgcgtttgactcagttctgagcttctggaagcgccagcaagagctggacaacttcctgcttcttcccttggttgcgcgcgtgctgttctcaatgccctcatcatcggcccaaattgaactcgactttgggatggcaggcaggatggcgacccccaccgcagctcgatggcgccttacaacgtggacatggccacatttctgagatagatttgaatttggaacagatacggaacggatcaggttttggatcgggccggccgatttgaaggcaacacgtgaagaacacactcatgacagcaggcaaagggcattggcaaattaatgcaaagctactagctagttgatagatagctagactactacaacactacagcagcagcaccgtgctggcaggcaccttnnnnnnnnnnnnnnnnnnnnnnnnnnnnnnnnnnnnnnnnnnnnnnnnnnctttgaccaataaaacgagattttgtttgccaataaaaaaagcaatttgcagagcgaaccaagttctcgccctagctcggttcgaatgaaaagtaagcgaaccaagcccccccccctccggttcaggtaaaaaagaaaagaaaagaagggtgaaaccgtggttccagttcagttcgtcctaggggtgggaaattcacgaagtgtaggaaagtgtaatagacttgcgaggagagctgctggtctttctactcagtccacaaatggaaagttctgtccgtgcagctctctcaagtctaacctaaagctctacactgccagtcatactgtacaccactcgtacaattgcctctctcacattgatggtcgcacgctcttcaattgttttcgtgaacccagcagccgcagtcaacggcaattcgaagatgtcgttgggtacgccccgaggcttcactgctccagcaagttctcacttttcctttcgcaccgtcaagcgcagtcactggtctccaacctccatcgcctgttagtagcgttgtatcaagccctatgtcggggaagggtgcgccaggaaagcgcaagcgcaagtgacacccatttgatgacgggaagagcgatagaaatggcactgaaggcgcatgcccgaactcggagggcgatgatgacctcgatgaggatgacgtagattatgaggacgcccaaccagtaacgacacgtccaagcaagaggcctgacgtcgcggagcgcatgaagggcaacaagaataccagcctcgtatatgtgaagatgtcactaggttccttcttgacaggcgaggagaaactgttgctgtcattcgatggcattctcgtggacttgagcattggattgttaaatgcctacgcgctgctgaacatccacatgatacggtgtgtgacaaaggacttcccattcctcgatttgagcagaacttcgtttgccaatgcttgacagacgtaatgtttaacgacagcaacgtgcacatagacgctgaactacatatatcgttggagctatacaatttgttgagaggctctaacgcttctcacgggcgtcgcgctggtatcaagaacgggtggcaacaggcgcagctcgggagatgatgaccgctatccagcatgcactcaaaaatgagtttccttcgccggtttaataaggtgctgcgggtatggtgtagacagaagcactggtagcacacattattgccccagagttcgagcggactacaccagacattcctgatcgtcagcgcctcgacaacgtagtcaacgagtggcgtggagaagtccctcagcgtcggagtgagctggtcaacttcacgtggtgcttctgacttatcgactcctgcaaatgattgaggagcgtaacgacagagttgagcaaagcgtttgcgctgtttaagcgacaggggcgtctgattttgaagttagactaatccaagctgaagttatgaagacgttcactgttctaccaacaaagcaaggatttggaattagtcacctcacgatagatttgattggtttccgggaactattagtccgcaacgacattgctgttcctctgtacagatcgaagtggaatgaggtgagatacatttattggagacggttcttccgtattgacaaagtggagactatagagtttggtcatctcagattcacacgagagatctcgacggacggcaagtcggtgaacatcaagattcggaagcccgaacgtgggccttccgagcccaatgcaaatgacctccaagctgccgacattggctctagatgggggttggatgcgagtaaatgcaacctcttggtcaccacaaaccaggacgacgaaacggttgtgtgctctggcaaagagtatcgcgaagacgcttgcattacgaagagcagccagaagcatttgagatggatacgggatcgtccggacactggagctgcctttgcgagcatgccgacgaagaggagcatgttgctaaagcggtggcgggagtacgtctcatttatgacgcagcacctgcatctgctagtgacccccatgcagcacaaatcgtaccgtcgccatcgacttcgaaggagcttcgttaaaaagaagaagctatgtgagctctaccagaaacttgtatgtcacggagagcgaatttttatcgtcattgacaaccggagtaacggcgatccaaatggagcgatcaaagggaagccatcggcactcgtgcagaaattggcgctggagttgtcaaagacgtcgaactgtacggtcatcattattgccgagttccggatcagcaaagtgcactttggttaccaacaagaactgtccaagcaatacccgtatcgaaaggccgctgtccacgtacgcgcagtccacgaaagacgagccacgtacccagtttacggcttactccatttcagaaacaaaggttgttctggtatgagtgtgaacagggacgtgaatgcttcgaagaatatgctgcgcctgctcgattgtgaactcaacgagactcgcccagtcacctacacgcatcaagcaaacagatagataacaatacatttctagtgtcgctgtgtgcctatctaggggtgaggaagattacattgtgatagccggctcagaaattagcccttttggactctgtaggctacgtacctataggacacccttaggagaataaagggttaaacaaaggctcaatgaagcctggttgatttctgcatgaaatatttttcaaaacggtgatgcccctcctgtggatgaatatacttgtctttccgacagatagctcagcacgattgttgtctgctcgctttgcaggccattttgaccaattttaacacgtaaagccttaattgtgtccaattaaaatggttaaatgtaggtttgacattctgacaccttccgacaaatatgtgtctgaagtatttccaaaatatcaatatcttcatgcaaacaacaactgtaaaacgtatttttcaaatataccagccattcgtacaatgaggagtggccctaatgtaggaacactgaagaggatgaggtcgttggttggatgtccaccgttggtgtacactttaccagaagagtaacgtagccatggatcgtgcgtgatgcgtggcacatgcacaggacgcaaggaacaccggttcaacgtgagtagaaaagtgcttggcgcttacctggtacggtactactcgcagcttaaagcgctagttcctgcagtgccgatcatcatcctgcttagtatctgcgggcatctcgtcaactgcattgcttgagtggtctgtagctggcggctccacctgctcaagaccaagaacaaactcaagacaacgtgcacatgttgccgagaagatggccaccttttggctgtgattgatgggcttatcgcctcgaacaaggtcatggctgcatcgtcgaggcggtactactaaataataagggtccacacgcaacaacggaagaaggacaactgcaagagccatcagatcaagaaccaaatcccaagcacagaaaaaagctgcgaacctgtcggccacatggcttgcgtggtacaagaggataccacgcgtgtgggactcaaccgatagaagtcggagtgtcgccacgtggtcgcctccatgaagctctccctcgacgatagcttcgtcgtgaatgtcacagcggaagaattcaagaaccaagtcctcaacaccggccgcgcggaaattggactgctggagtttctaaagctagcggcgtcaacgaagggagccgggagtatcctgcgtgcgctgcacccgctgcatatgtccggtatattggacgagcaaatcatggtctacaggcaccaactcgtcataggcagcaccgaagaccctgcacatatcgacgcgcaagacatgctcggcattgtaggtcatgtgtgagaacggtgaagttaattcattccaatatatgtattcattcgacataacatcgctgcttaacaagacaacatattcatgtgtacacatccacgcgcgcaggtcacctaatcaaagcgtaggctgcacaccgcacgatcgcaccgcgctcactcacccaccacatgcacagatcctcagcaatactgcacggttcaaagcactgatcccgacccaatcttgatcataaacaccggccaaaacgtggctgttgacgaagctagtattgcgtgtcgttcgcaatacgctcgccatattatagttttctatccccaaaaccagacagggaaatatcacttcaagctgtatgcttgttgctgctcgacatcatggtatgtcgtgagtttcaaattgcactgtgcaagtgaacaaatagaccgtttggacggcgtggttccaagtccagaggtattacagcttgttgatctgacagcgaagtcctttgaaatttgttcccacgtaattgaagttgtggagtctttgaaaggatctaatcgcgttgtcaataccgataatatctacacctcctgcctgctactagaatcactaaggtcgattggcatgtatggtcgtggtacagtgcgcacatccagcaaacacttcccccacttcacaatgatccgaaaagctgatggaaagcctagaggctacatgaaacaaggcgtgtgcttagagtaacatatcgtagcggccagttggatagatggctctattgtgaatacagtctctaatgttgacgcctactcttcctctacggtatatcgtcgcataaaggaggaacatgttgcgtttaacgtcccggcctgcctcggtgaatacaacgcggggatgcagggagtcaaccgtcatgatcagcttcgcggtcggatttcgcttgccgatggtcactcatttcagaagtggcataaaaaattagcaatggctatgattgatatcgcgagatgtaatgcgtatgtatgcgataacttggcacgtgatacaagcgagatggatgttgcacagcctcgcaataatgcaagggcaagcgcccgtgacggtcaccgggcgtttgtcattccacttgtgcgagaattattcaatggagattggaagaagtccattgacagtgatgacgtaattgtgtacacttcgaacacaaaacccatgaccactgctgccaatttgaccagaaatacgaatgagttagaaacgccagcacatacatgtgtagcaaacgaatcgtggcttgtgttacaaggaaggagtcgggcaatgcacaaacggactgtttgtaaattcgagggcagggatgccacccagaaaacggattactgcgagacacatcgagttgcactctacaagcgtacctatcctatcgaccacagaaacccgcacctgtgtcagcagcaagattggacgtgctggcaaaagtatcatttgttctacttgccaaaacaggtctatacagttgannnnnnnnnnnnnnnnnnnnnnnnnnnnnnnnnnnnnnnnnnnnnnnnnntcggcaacacagcaatagtaatagaccaacgcgataggagggtgtcttgtaccagtgttgagcctttcccataaatcgaacctcctcatccgtaaaattaacacaggacagagcgcgaccttcaagctctccaagtctgtcctgaataccccgttgtttttgcgcgcggcgggcgcgggccttgccgttcgttctcgaggtgctgctcccgttccagcaaactttcattggctctttgggtacggcgcttcttgctgcggtcttcagtgtcggccattgccttcccacgttgttattggtcgtcagccctctacaaaacaaacagttggataaaacctacatcatacgccgccatgctaccccgactacaccaatttgaatacgctcccatcagtatagtcactacaatttatccatacagtcatgctctgtagtagcaaaatccccatctatgctgcccgagcgtcaagtacccaaatcgattcaccggtaaaactatcccgtcgcattatggtttttgaggcattttgctcgatggttcgcgatagggttaacacgctgatggcgcatttcttgaagcctgtcggcggcagtaccgacagcacaaactgcgtgtcgtggtcggtccaacggcactggcgaattccagttcaacgtgcttcgtgtcggcccactgcttcgtgcagctcggacagtgcgtgtgttgctgatgtccttgcagcatatgtgactcgcaatcccttcctcatcaacatggcttgcgcaccttgcagggcagagccgccgtctttccccgagctcannnnnnnnnnnnnnnnnnnnnnnnnnnnnnnnnnnnnnnnnnnnnnnnnnnnnnnnnnnnnnnnnnnnnnnnnnnnnnnnnnnnnnnnnnnnnnnnnnnnnnnnnnnnnnnnnnnnnnnnnnnnnnnnnnnnnnnnnnnnnnnnnnnnnnnnnnnnnnnnnnnnnnnnnnnnnnnnnnnnnnnnnnnnnnnnnnnnnnnnnnnnnnnnnnnnnnnnnnnnnnnnnnnnnnnnnnnnnnnnnnnnnnnnnnnnnnnnnnnnnnnnnnnnnnnnnnnnnnnnnnnnnnnnnnnnnnnnnnnnnnnnnnnnnnnnnnnnnnnnnnnnnnnnnnnnnnnnnnnnnnnnnnnnnnnnnnnnnnnnnnnnnnnnnnnnnnnnnnnnnnnnnnnnnnnnnnnnnnnnnnnnnnnnnnnnnnnnnnnnnnnnnnnnnnnnnnnnnnnnnnnnnnnnnnnnnnnnnnnnnnnnnnnnnnnnnnnnnnnnnnnnnnnnnnnnnnnnnnnnnnnnnnnnnnnnnnnnnnnnnnnnnnnnnnnnnnnnnnnnnnnnnnnnnnnnnnnnnnnnnnnnnnnnnnnnnnnnnnnnnnnnnnnnnnnnnnnnnnnnnnnnnnnnnnnnnnnnnnnnnnnnnnnnnnnnnnnnnnnnnnnnnnnnnnnnnnnnnnnnnnnnnnnnnnnnnnnnnnnnnnnnnnnnnnnnnnnnnnnnnnnnnnnnnnnnnnnnnnnnnnnnnnnnnnnnnnnnnnnnnnnnnnnnnnnnnnnnnnnnnnnnnnnnnnnnnnnnnnnnnnnnnnnnnnnnnnnnnnnnnnnnnnnnnnnnnnnnnnnnnnnnnnnnnnnnnnnnnnnnnnnnnnnnnnnnnnnnnnnnnnnnnnnnnnnnnnnnnnnnnnnnnnnnnnnnnnnnnnnnnnnnnnnnnnnnnnnnnnnnnnnnnnnnnnnnnnnnnnnnnnnnnnnnnnnnnnnnnnnnnnnnnnnnnnnnnnnnnnnnnnnnnnnnnnnnnnnnnnnnnnnnnnnnnnnnnnnnnnnnnnnnnnnnnnnnnnnnnnnnnnnnnnnnnnnnnnnnnnnnnnnnnnnnnnnnnnnnnnnnnnnnnnnnnnnnnnnnnnnnnnnnnnnnnnnnnnnnnnnnnnnnnnnnnnnnnnnnnnnnnnnnnnnnnnnnnnnnnnnnnnnnnnnnnnnnnnnnnnnnnnnnnnnnnnnnnnnnnnnnnnnnnnnnnnnnnnnnnnnnnnnnnnnnnnnnnnnnnnnnnnnnnnnnnnnnnnnnnnnnnnnnnnnnnnnnnnnnnnnnnnnnnnnnnnnnnnnnnnnnnnnnnnnnnnnnnnnnnnnnnnnnnnnnnnnnnnnnnnnnnnnnnnnnnnnnnnnnnnnnnnnnnnnnnnnnnnnnnnnnnnnnnnnnnnnnnnnnnnnnnnnnnnnnnnnnnnnnnnnnnnnnnnnnnnnnnnnnnnnnnnnnnnnnnnnnnnnnnnnnnnnnnnnnnnnnnnnnnnnnnnnnnnnnnnnnnnnnnnnnnnnnnnnnnnnnnnnnnnnnnnnnnnnnnnnnnnnnnnnnnnnnnnnnnnnnnnnnnnnnnnnnnnnnnnnnnnnnnnnnnnnnnnnnnnnnnnnnnnnnnnnnnnnnnnnnnnnnnnnnnnnnnnnnnnnnnnnnnnnnnnnnnnnnnnnnnnnnnnnnnnnnnnnnnnnnnnnnnnnnnnnnnnnnnnnnnnnnnnnnnnnnnnnnnnnnnnnnnnnnnnnnnnnnnnnnnnnnnnnnnnnnnnnnnnnnnnnnnnnnnnnnnnnnnnnnnnnnnnnnnnnnnnnnnnnnnnnnnnnnnnnnnnnnnnnnnnnnnnnnnnnnnnnnnnnnnnnnnnnnnnnnnnnnnnnnnnnnnnnnnnnnnnnnnnnnnnnnnnnnnnnnnnnnnnnnnnnnnnnnnnnnnnnnnnnnnnnnnnnnnnnnnnnnnnnnnnnnnnnnnnnnnnnnnnnnnnnnnnnnnnnnnnnnnnnnnnnnnnnnnnnnnnnnnnnnnnnnnnnnnnnnnnnnnnnnnnnnnnnnnnnnnnnnnnnnnnnnnnnnnnnnnnnnnnnnnnnnnnnnnnnnnnnnnnnnnnnnnnnnnnnnnnnnnnnnnnnnnnnnnnnnnnnnnnnnnnnnnnnnnnnnnnnnnnnnnnnnnnnnnnnnnnnnnnnnnnnnnnnnnnnnnnnnnnnnnnnnnnnnnnnnnnnnnnnnnnnnnnnnnnnnnnnnnnnnnnnnnnnnnnnnnnnnnnnnnnnnnnnnnnnnnnnnnnnnnnnnnnnnnnnnnnnnnnnnnnnnnnnnnnnnnnnnnnnnnnnnnnnnnnnnnnnnnnnnnnnnnnnnnnnnnnnnnnnnnnnnnnnnnnnnnnnnnnnnnnnnnnnnnnnnnnnnnnnnnnnnnnnnnnnnnnnnnnnnnnnnnnnnnnnnnnnnnnnnnnnnnnnnnnnnnnnnnnnnnnnnnnnnnnnnnnnnnnnnnnnnnnnnnnnnnnnnnnnnnnnnnnnnnnnnnnnnnnnnnnnnnnnnnnnnnnnnnnnnnnnnnnnnnnnnnnnnnnnnnnnnnnnnnnnnnnnnnnnnnnnnnnnnnnnnnnnnnnnnnnnnnnnnnnnnnnnnnnnnnnnnnnnnnnnnnnnnnnnnnnnnnnnnnnnnnnnnnnnnnnnnnnnnnnnnnnnnnnnnnnnnnnnnnnnnnnnnnnnnnnnnnnnnnnnnnnnnnnnnnnnnnnnnnnnnnnnnnnnnnnnnnnnnnnnnnnnnnnnnnnnnnnnnnnnnnnnnnnnnnnnnnnnnnnnnnnnnnnnnnnnnnnnnnnnnnnnnnnnnnnnnnnnnnnnnnnnnnnnnnnnnnnnnnnnnnnnnnnnnnnnnnnnnnnnnnnnnnnnnnnnnnnnnnnnnnnnnnnnnnnnnnnnnnnnnnnnnnnnnnnnnnnnnnnnnnnnnnnnnnnnnnnnnnnnnnnnnnnnnnnnnnnnnnnnnnnnnnnnnnnnnnnnnnnnnnnnnnnnnnnnnnnnnnnnnnnnnnnnnnnnnnnnnnnnnnnnnnnnnnnnnnnnnnnnnnnnnnnnnnnnnnnnnnnnnnnnnnnnnnnnnnnnnnnnnnnnnnnnnnnnnnnnnnnnnnnnnnnnnnnnnnnnnnnnnnnnnnnnnnnnnnnnnnnnnnnnnnnnnnnnnnnnnnnnnnnnnnnnnnnnnnnnnnnnnnnnnnnnnnnnnnnnnnnnnnnnnnnnnnnnnnnnnnnnnnnnnnnnnnnnnnnnnnnnnnnnnnnnnnnnnnnnnnnnnnnnnnnnnnnnnnnnnnnnnnnnnnnnnnnnnnnnnnnnnnnnnnnnnnnnnnnnnnnnnnnnnnnnnnnnnnnnnnnnnnnnnnnncaacctggacgtcgtcaaactcgccgcctttagtctccttcaagatgtcgaggaaggaatggtcgttggcgccgtactcccagcagatcacaccggccagcaccatcgcagcagcaacgtacgacagcacctcaatgacacgtccgttgtcggcgctgaaggacgaagcgatattcacgaccaccgagaagagcaggaggaaagggcccgtgacaacgacggggccgctgaggttgaccaccgcctccttggtcatgatgttcggatgcgcggcgatagccacgaggaagtctccgatgctgtagcagatgtcgaaagtgatgatggtgtgtaagcggccccacttctcgtcggccaggtagacaccgaagagcggcgtaatgtagcagatcgatgtccatgtgctcttcaaggctctggcggacacgaggctccagccgatcttctgcatgaagttcttgaggccttggttgataccgtagtagctcaggcgctcggacagctccatcatgaggatgaagacgcagacttggaacagcacgctcttgtacttgcgcgggcgagcgtccaagacgctagcgtatgcgccgctgggcgagtcgagggccggggacttgatcttcgacgtggtgttcggcctgaatcacgacgtcgctcaactccctgaattcacaatgaagaactattataaatgttatgaaatgaagcaagccagcttaaacttacttacatctactggcgcgagctctttctgttctgcatacgcgattcgacagctcgacgcgtaggctttctcttgcggttcgagcggcgtgcacttccaatactgtcgcgcatcacaccactagcgacaggagaaacgtcgactggcgagggcgtcggagtcggctgagttggaaggtccgtcaaatcgggaatgaggtctccttcacccagcaccactgtatcagcgctacttactatagaatccaggctagacatgccctcctccagccgcatatcaccatcactatccggatctaaatcatcttctgcaacatctgtcagaaatgtggtgctggcaatatctcctatgagtacagagtccgtgccatccacatgaatactgccgtctgtttctggatccgagctctctgcgcgcgaggatcttcacagctatccgtgtgagtgcttggtaaaacacggtctgcagctgtgcgtctgcgacgtggccgaacaaactggcgacggcgactatcagcaccagggcatggtaggcctgcatggatgcaggcagccacaatgtggcagcacatgccacgcattcaactgtagacacacgtaaatgccctgctgcgagtgtcgactacccatcccccttctggcatcccttcagtttgcatccgacgtgcattcatggatttgatggagcgcatcagctcctttcgctcatcggctgtctacgtaccggctctttgattgacgacgtaaagatccgcggataagtcgccgaccggagggatgcgccgtacgaatagccaaccacgactgttcataaatcgataaagctcgagcaatcggtcggaagcggcagcgaccgtgtcaaatggcacgtctcggttcagaaaagcgagccgggcaccgttaagattgtcgaccaactctcggggtgtagccaggccttccggacactgcaacttcagtgttcaatgatattgctccaaagggttatttgaagcggcatatccaccaggtgtgtagaacgcctgccagcgggaaaaccgggtcgagtttacccaaaaccttttcacatgatctgtgagtttacgtactgaagaaccgagacgaaacctgtcccgtcgctccaaaacgcaggcctttacagaaggaaatgcatcttgagtcgcataatgcatgtcgtacaaatccgcaaacacaactcgcgtatcttccgtgctcacacggaatttgcgagcatgtttccacacattctgcgtcacgtgaaaccagcacatcaaaatggttgtgcctggaagctcggccgaacaggcgttgaactgcgctttgcaagcatctggcatcatgaactgcggcgaaaatggtgcattacacgcatccaaacacacgcgcttcatgaagctgatgctccatccgacgtcaattgcgcgctcttgagatgtgcaaaagtaagcgagtaaaaagaactggccgcaccgatctgagtatccaaaggcaaacacgttgtagccgttgaccgccatactgtgggtgctgtcaacatgaaaaatcgtagtgcaatccgaccgattctgcactgcaatgtagtcacggacgagacgtggacacgtcatgccaacacgataaaaagaatcctcagatccgtttccgagatgtgagacgctgctcgcggtacctggcagatcactttgttgcgcgtcacacagtatcatcatgtcgcgctctggcagcgactgtagatctagctgatcgtacagattcccatcgcaaagctgaatcatcggcgccatggaatctcgtgggttaccccgcctccaggttttgacaaaatcagtcacttgagtgtctttcggagcaggatctgtgatcacacctgcctcgaccatggcgctgagagttgtaaacaacttggtggctgttattttgactccactactttagcttctcgataataaacgtcttcattgcaggggaaatcttgccctccgttggagttggcgggtcgtttctgtgcatgacatgctcgacttgctgaaacacctcacaggtgctagaggacagacagatcttcaacttgtaccgacacggacatgatgccgtctctgtcgatgtagcgtcgtcgtcgggggcagtgagtctggcacgacaccgctgagaccggcacagtaccatttgagaccgcatttgatgaatgcagcaagctagatcgaagtccttatcaaatatatgatccacagtacaccccact

SEQ ID NO: 291 - DNA, 8019 bp, unidentified
  misc_feature 1..8019: note = Fanzor polypeptide
  variation 1527..1793: note = n is any nucleotide
  source 1..8019: mol_type = other DNA
ctagctctcgtagagtttgcgctgaagaaagctcacgcacggtgctctggccacgccgatgcattcgtatcttcgggtaagatcatcacacttttaaagcttgcgctggcgtgtggaaaccctcaaatatttgccggtctatcaaccatactgaacaagatcgatggcaatcttctccacacagtgattaatgcgctctcgaaatacgtcaatgactcgagtttacctgaacagcgtgctacgctggcctcacttgcagcgagacgtcgtgaatggctattcgctgagatcgaagacacgaagcaaccactggacttgacgaagcgcgagatctaggcaatgctagccgacaacacaatcggctccgcgaagtacttttcaatcgtcgctgactttttgaaggtgtcatcgatgagcacgagattcctggggttaaggctctacctagtggacacatcgttcgagttcaagtcggtactcttggggactcgccatttcgcgcctcagtatgggggaccagatggcggaatacgaggaccactttaccggtggattggtgacgtcctggggggggggctttggtttgagtcgccataaccttttcggggctacaagcgacgaggcagtgatgtcaaatggatgatgagggacggtctaaagttgtagcgggagtggtgcgtgccgcacttcatgcatgcggcaaccaatactgttttcggcatcgtcggtgacaacagctcgtccaagaacccagccatgaccgacatccttcgacgcatcaccaaaacgatgtacaaaacgcagcacgtcgaaggaaagggcactctattaagcgagttatgcagcgttatgaacccggagggtgtgcatccacgctagctcttaaacttccgcacgcatcgattcctgggactcacgcgcgtcgtccgacgcattcttctactctgggatccattggtgcaatggtacgaggagcgggccacaaaagcccgacgtgagaacgtgatgccgccggagtccttcccactagctcgggaaaagatggaactcattcaggtgctctcactgctggagccgatctcgaaactaaatcagattggacaggccgagtcggggggaccaatgcaacgtgcttcttggactctacaagctccgaatatccttgttggacatcaccacagccttgaaggactgaagacggagaatcggttcttccgaccggatgagctgtacaatctcgcatcgacaacccgttcgctacttcacaaagggtttcgtcgggttttcttccggcggtacaccgatcgtgataccatgaacgtctgctcctttgcctttaagatgcaactatttcttcaccccaacttcaagcatccatatggagcgctgacaactatttcttcaccccaacttcaagcatccatatggagcgctgataaaggtgttaccaaggtcaatatacaggcaggtaggtagctgaccgacactacacgaagattcgacgcattatcattgacagcgtccgcnnnnnnnnnnnnnnnnnnnnnnnnnnnnnnnnnnnnnnnnnnnnnnnnnnnnnnnnnnnnnnnnnnnnnnnnnnnnnnnnnnnnnnnnnnnnnnnnnnnnnnnnnnnnnnnnnnnnnnnnnnnnnnnnnnnnnnnnnnnnnnnnnnnnnnnnnnnnnnnnnnnnnnnnnnnnnnnnnnnnnnnnnnnnnnnnnnnnnnnnnnnnnnnnnnnnnnnnnnnnnnnnnnnnnnnnnnnnnnnnnnnnnnnnnnnnnnnnnnnnnnnnnnntcctgcttcttcccttggttgcgcgcgtgctgttctcaatgccctcatcatcggcccaaattgaacgcgactttgggatggcaggcaggatggtgacccccaccgcagctcgatggcgccttacaacgtggacatggccacatttctgagctgcagcagaacttacgtgggtatcacccagtacccaaagttgtcgtcgagcacagcaaaggatcaagtaccgtcaaacgccatggtgagcatggagcgagagttggacgacgagttcggatcgttgatgaacaaaggcatcgagttgggactctccgacgacgaaaacgacggtattaccgaaatgtagcgggagcgggctggggcggacgaaaacgtgagagaacgggagcacgtgtggaagtggaaacgggctatagctgccgtggtagagttctagccatgcatgtgcacgaaatgagtgtctttacttttcatcaacacgttctgaccgttgttggtgttagcttcgctatgcagcttatgtaaatagtattttgttttcacctatgctttcgtgctggtcgtttgattactagcaactctgtaacacgcattgcagcgcgtacacggatcgcctcctgtgtttcaagctagattcgctcgatttgggatcgatctcgcagtattcgcgaccgtgggcacacaggcgggttgctggaccgggtggcagctgctgaaacccgcgtagttggtgtcctggctgccgctgcttcttttctgcggtttgctccagcggctcgtgataatgcggtggtggagcctcgcgtgcttgcagttgcttctgtagggcccatcgctgctcctgttgaggaagttggcgtcggcgcgaacgttgggacgatggccgtggacttgtcttgacttgatacagatattcacatcggtgttcttgaggacatcactgtattatgctggtcctgtggtacgaactcggagtgccatcagttcacggggttttgtctcggcagtcttcttggccaccacgatggctgggcgaaaccgttcgcctgggtggttgttagccctctcttgctcctgatcctgacgcatgcgaatcgcgatgtcgtgttgatctagcccgccgttgatcagctctactacgcgaacctctgtacgagcggttgttgcctcttgcactacttcaaatttgcaaatgtcgtggcgctcttacgcagcacgcttgtgctcctcctctaccaggttgtgttgcttgaccctggaagactgcaatgtgactcgcaaaacgcctggtgaggagatcaaaagagatcatctttgaccaataaaacgagatcttgtttgccaataaaaaaagcaatttgcagagcgaaccaagttctcgccctagctcggttcgaatgaaaagtaagcgaaccaagcccccccccccctccggttcaggtaaaaaagaaaagaagggtgaaaccgtggttccagttcagttcgtcctaggggtgggaaattcacgaagtgtaggaaagtgtaatagacttgcgaggagagctgctggtctttctactcagtccacaaatggaaagttctgtccgtgcagctctctcaagtctaacctaaagctctacactgccagtcatactgtacaccactcgtacaattgcctctctcacattgatggtcgcacgctcttcaattgttttcgtgaacccagcagccgcagtcaacggcaattcgaagatgtcgttgggtacgccccgaggcttcactgctccagcaagttctcacttttcctttcgcaccgtcaagcgcagtcactggtctccaacctccatcgcctgttagtagcgttgtatcaagccctatgtcggggaagggtgcgccaggaaagcgcaagcgcaagtgacacccatttgatgacgggaagagcgatagaaatggcactgaaggcgcatgcccgaactcggagggcgatgatgacctcgatgaggatgacgtagattatgaggacgcccaaccagtaacgacacgtccaagcaagaggcctgacgtcgcggagcgcatgaagggcaacaagaataccagcctcgtatatgtgaagatgtcactaggttccttcttgacaggcgaggagaaactgttgctgtcattcgatggcattctcgtagacttgagcattggattgttaaatgcctacgcgctgctgaacatccacatgatacggtgtgtgacaaaggacttcccattcctcgatttgagcagaacttcgtttgccaatgcttgacagacgtaatgtttaacgacagcaacgtgcacatagacgctgaactacatatatcgttggagctatacaatttgttgagaggctctaacgcttctcacgggcgtcgcgctggtatcaagaacgggtggcaacaggcgcagctcgggagatgatgaccgctatccagcatgcactcaaaaatgagtttccttcgccggtttaataaggtgctgcgggtatggtgtagacagaagcactggtagcacacattattgccccagagtttgagcggactccacccgacattcctgatcgtcagcgcctcgacaacgtagtcaacgagtggcgtggagaagtccctcagcgtcggagtgagctggtcaacttcacggcccaccgactggtgcttctgacttatcgactcctgcaaatgattgaggagcgtaacgacagagttgagcaaagcgtttgcgctgtttaagtgacaggggcgtctgattttgaagttagactaatccaagctgaagttatgaagacgttcactgttctaccaacaaagcaaggatttggaattagtcacctcacgatagatttgattggttaccgggaactattagtccgcaacgacattgctgttcctccgtacagatcgaagtggaatgaggtgagatacatttattggagacggttcttccgtattgacaaagtggagactatagagtttggtcatctcagattcacacgagagatctcgacggacggcaagtcggtgaacatcaagattcggaagcccgaacgtgggccttccgagcccaatgcaaatgacctccaagctgccgacattggctctagatgggggttggatgcgagtaaatgcaacctcttggtcaccacaaaccaggacgacgaaacggttgtgtgctctggcaaagagtatcgcgaagacgcttacattacgaagagcagccagaagcaattgagatggatacgggatcgtccggacactggagctgcctttgcgagcatgccgacgaagaggagcatgttgctaaagcggtggcgggagtacgtcccatttatgacgcagcacctgcatctgctagtgacccccatgcagcacaaatcgtacagtcgccatcgacttcgaaggagcttctttaaaaagaagaagctatgtgagctctaccagaaacttgtatgtcacggagagcgaatttttatcgtcattgacaaccggagtaacggcgatccaaatggagcgatcaaagggaagccatcggcactcgtgcagaaattggcgctggagttgtcaaagacgtcgaactgtacggtcatcattattgccgagttccggatcagcaaagtgcactttggttaccaacaagaactgtccaagcaatacccgtatcgaaaggccgctgtccacgtacgcgcagtccacgaaagacgagccacgtacccagtttacggcttactccatttcagaaacaaaggttgttctggtatgagtgtgaacagggacgtgaatgcttcgaagaatatgctgcgcctgctcgattgtgaactcaacgagactcgcccagtcacctacacgcatcaagcaaacagatagataacaatacctttctagtgtcgctgtgtgcctatctaggggtgaggaagattacattgtgatagccggctcagaaattagcccttttggactctgtaggctacgtacctataggacacccttaggagaataatgggttaaacaaaggctcaatgaagcctggttgatttctgcatgaaatatttttcaaaacggtgatgtcctcctgtggatgaatatacttgtctttccgacagatagctcagcacgattgttgtctgctcgctttgcagaccattttgaccaattttaacacgtaaagccttaattgtgtccaattaaaatggttaaatgtaggtttgacattctgacaccttccgacaaatatgtgtctgaagtatttccaaaatatcaatatcttcatgcaaacaacaactgtaaaacgtatttttcaaatataccagccattcgtacaatgaggagtggccctaatgtaggaacactgaagaggatgaggtcgttggttggatgtccaccgttggtgtacactttaccagaagagtaacgtagccatggatcgtgcgtgatgcgtgggacataagcaaaataaacaaaggctgtgcttatgtcttcaatatgccacgggaagaccgcaaggtagcctgagtgctgtgcagctggaataaagagatcgcgcctcacgttgtggacgtcgcgacgctggaccatccgacgcgggagcggcttgaacgcttgcaggagctcctgtttagcacatgcacaggacgcaaggaacaccggttcaacgtgagtagaaaagtgcttggcgcttacctggtacggtactactcgcagcttaaagcgctagttcctgcagtgccgatcatcatcctgcttagtatctgcgggcatctcgtcaactgcattgcttgagtggtctgtagctggcggctccacctgctcaagaccaagaacaaactcaagacaaggcgcacacgttgccgagaagatggccaccttttggctgtgattgatgggcttatcgcctcgaacaaggtcatggctgcatcgtcgaggcggtactactaaataataagggtccacacgcaacaacggaagaaggacaactgcaagagccatcagatcaagaaccaaatcccaagcacagaaaaaagctgcgaacctgtcggccacatggcttgcgtggtacaagaggataccacgcgtgtgggactcaaccgatagaagtcggagtgtcgccacgtggtcgcctccatgaagctctccctcgacgatggcttcgttgtgaatgtcacagcggaagaattcaagaaccaagtcctcaacaccggccgcgcggaaattggactgctggagtttctaaagctagcggcgtcaacgaagggagccgggagtatcctgcgtgcgctgcacccgctgcatattccggtatattggacgagcaaatcatggtctacaggcaccaactcgtcataggaagcaccgaagaccctgcacatatcgacgcgcaagacatgctcggcattgtaggttatgtgtgagaacggtgaagttaattcattccaatatatgtattcattcgacataacatcgctgcttaacaagacaacatattcatgtgtacacatccacgcgcgcaggtcacctaatcaaagcgtaggctgcacaccgcacgatcgcaccgcgctcactcacccaccacatgcacagatcctcagcaatactgcacggtttaaagcactgatcccgacccaatcttgatcataaacaccggccaaaacgtggctgttgacgaagctagtattgcgtgtcgttcgcaatacgctcgccatattatagtgttctatccccaaaaccagacagggaaatatcacttcaagctgtatgcttgttgctgctcgacatcatggtatgtcgtgagtttcaaattgcactgtgcaagtgaacaaatagaccgtttggacggcgtggttccaagtccagaggtattacagcttgttgatctgacagcgaagtcctttgaaatttgttcccacgtaattgaagttgtggagtctttgaaaggatctaatcgcgttgtcaataccgataatatctacacctcctgcctgctactagaatcactaaggtcgattggcatgtatggtcgtggtacagtgctcacatccagcaaacacttcccccacttcacaatgatccgaaaagctgatggaaagcctagaggctacatgaaacatggcgtgtgcttagagtaacatatcgtagcggccagttggatagatggctctattgtgaatacagtctctaatgttgacgcctcctcttcctctacggtatatcgtcgcataaaggaggaacatgttgcg

SEQ ID NO: 292 - DNA, 18862 bp, unidentified
  misc_feature 1..18862: note = Fanzor polypeptide
  source 1..18862: mol_type = other DNA
ctatcggtggacccccatgcgtttcgtggtggaaatgctgaaacgaggtcttagcatcacacaaacccaatcgctcaaggacatcgcaaagattatgggggtcgaccgtcgagtatttggccgcatggagcaggacatactgagtagactacaaactacagttgtagactactggttttctcgcgacgaagctgcacctcagaagctcattgatttgctcgacggcgcagagacctcagtagatatcgctatgttcatcttgacgcatcctgaaccgacagacgctatcatccgggcctcccagcgtgctatcgttgatcgggcacaagtctccgagaaaagctcagctatgatgatcgaaaacggggtcaacgtatttcacgcaaaggccccaaactcatgcactggaagatggtctgttgccttgcaaaacaactggaaaggtgagatacccgcggtactgttcatctgtagcccacatacacacacaggacagggttctgcaacttgagcttttgcgcttttgcacaatcgccacaataaacggagctgttctgcgtggcggcttggagcttcggccgagtggctggctcaagagtttgtctgcagtgagaacgagagagaaatgtagaggagatgaaggtgctccgaggttttcgggatcccgagttttggagttttggatcgcccggtgctacactgctttcgtccggaccggtaagaaggacatcaaggccatctgcgaggagcacccgggctggaatcgacggacggtcgcgcattactacgccatgtacgaaaatggagagagtttgcagcccaggtgtggcattgtggcaccggtcgagcattctgaaggcgcgtgcagaaggctgcaccattcgcatgatcgtcgacgagcgaagcgcgctccaaaagaaaaaaaacatgacttgggtacgcaagtgcggggatcccggtcaagactggacgcgtggccagcttcatggtccacaacaagtggaccatcgtcaacggcgagttcatgttagaaggcacgggcaactacagcgcggttgcgttcgatagagcccgccatgcacagacctttgagacgcgcacgggtcaggcgcaccttgattcgatcaagcgcgagttcgagcagctctgggaagaaggacgggtgcttcaatgggcctcgaggcgtactgcttgcttcatgtacttgggggaggacgaggatgaaacgaaaatgtacccccccccggggagagcaggacgaggacgaggacgtttatgtgtaggatatggttgaacgtgcaagccagtaagtaactttgttggtgcccactttgacttgggcttacattggccgtgcaggagtgccatcgtagttacaatagagctcgaggatcatgatgagtcctctcagtccttaccagccaaaaaaggcaaactgcacctagcgcattgagctggcaacggcagccccatcgacggcggctccagctacaacgggatctccgtcacttgactcgtcccttcagtccactgttgcttcttcgtcgctcgacaatttgatcgcgtctgctggatcgggttcgttcattgatccgagttcagtagtggtaaacggcgagctgctaccagcgagatcaagtcgacgtaccgcaactgggtggggcctcgcgccgtctcccccgacgccgcgtgctaccgtgaagcactcatcatggacgcatgcccgaccaacttcgaccagaacgaggttaccaacacgtgctgggccgagtgcccgatcgcctacccggtcgagtgcggcatggaatgcatccgtcagaacgatgactgtgctatggaggtgcttaacaaggtcggtgctgttgctagcacgtctagtcatcgctaccgttggtgcgtctcagaaactgtggcagctttcaaagggtgcgacgcgcgcattcgactgcgctaacatgatgatcggtacgatgagatccatcatccgttacgtgcgtaacatcaagaccacggacccgcaggcctcgacggacaaaattctcaacatcctgtaccagtcgaacaacatcgtgacggacctgccgatggccatttacatttgcatgggctgggacttgccgaggcctctcgatgtctcgggtcgtgtgcttacgacgatgaactggatcttgctaaacgccatcgggtacaaggacgacctcgtgtctagctggagcaagttcaaggctttcttgatcggcgccaacttcacggaggccgccaacaagatcaacgagacggagatcaggacgctgagtgacgccctgaaggccaactccacctgcggctacgacttgcgagtgatgacggaccgcacgtgacgaggaaacgcagcataatgcgggtcaagatgagaacgtgatacttgccctcatgctgtccacatcgtgcacacggacggatgctgagtctgtcggtgttgatgcactttcagtcgtcgaccgtaatcgcttccagtttttgagggacgcgaacatttttcttgagtcagggaagaagctggtgttttacctggtgcgtcttcgttatcgagctccgattctccggcagaacgaccagtcggaagtgaaacaattgatgcagagcatgatctggtattcgatcaccggcgcgaagatcgacggtggcaagttgcacgatgccgagtggaccaagaagctggatttcttgaatcctgccaacgaaacactgtcgcagctgtgggaaagtggagagagaagcaccagctcggagcacgaacgttttgcacttattggctggcctgcttccgccgacataatgaacgcagtcgcattgtttggaaaagtgtcctgtgtgcctgtaattcttgcacagtgctacaacgctccgaatgcttctcagcgccgaacttgatgaaaatggatgccatttcgctcaaactctcaaaatcttcgagaagagcaatgcatctgttgagtttgtacccctttgccgggagctaggtactgccatcgttgacttgggtgacactacactgatccaggcgtttttcaagaagtatgttgcccagctgaaagacaaggacagacagttatttctccaatggcttccagctctcgtgcgcgcatttggatgggcatacgttagtgctgccacactgaatgccatcgacgtgcaatcaactgaaattcgctcggatcgagctttggaactcgcaaacacactccatgacaacgatgctgcacttctagctctcgtagagtttgcgctgaagaaagctcacgcacggtgctctggccacgccgatgcattcgtatcttcgggtaagatcatcacacttttaaagcttgcgctggcgtgtggaaaccctcaaatatttgccggtctatcaaccatactgaacaagatcgatggcaatcttctccacacagtgattaatgcgctctcgaaatacgtcaatgactcgagtttacctgaacaacgtgctacgctggcctcacttgcagcgagacgtcgtgaatggctattcgctgagatcgaagacacgaagcaaccactggacttgacgaagcgcgagatctaggcaatgctagccgacaacacaatcggctccgcgaagtacttttcaatcgtcgctgactttttgaaggtgtcaccgatgagcacgagattcctggggttaaggctctacctagtggacacatcgttcgagttcaagtcggtactcttggggactcgccatttcgcgcctcagtatgggggaccagatggcggaatacgcggaccactttaccggtggattggtgacgtcctgggggggggggggggggggctttggtttgagtcgccataaccttttcggggctacaacagtgatgtcaaatggatgatgagggacggtctaaagttgtagcgggagtagtgcgtgccgcacttcatgcatgcggcaaccaatactgttttcggcatcgtcggtgacaacagctcgtccaagaacccagccatgaccgacatccttcggcgcatcatcaaaacgatgtacaaaacgcagcacgtcgaaggaaagggcactctattaagcgagttatgcagcgttatggacccggagggtgtgcatccacgctagctcttaaacttccgcacgcatcgattcctgggactcacgcgcgtcgtccgacgcattcttctactctgggatccattggtgcaatggtacgaggagcgggccacaaaagcccgacgtgagaacgtgatgccgccggagtccttcccactagctcgggaaaagatggaatgctctcactgctggagccgatctcgaaactaaatcagattggacaggccgagtcggggggaccaatgcaacgtgcttcttggactctacaagctccgaatatccttgttggacatcaccacagccttgaaggactgaagacggagaatcggttcttccgaccggatgagctgtacgatctcgcatcgacaacccgttcgctacttcacaaagggtttcgtcgggttttcttccggcggtacaccgatcgtgataccatgaacgtctgctcctttgcctttgagatgcaactatttcttcaccccaacttcaagcatccatatggagcgctgataaaggtgttaccaaggtcaatatacaggcaggtgcctcccagcaggtagctgaccgacactacacgaagattcgacgcattatcattgacagcgtccgcagcatcatgacagcggctgacgccgagccgacgtcgactgatatcgttgccccaccgccagctactgggttatcagaggacttcgtggagctcttcacggagacagcgaacgaggtggcaccaccacatagactgcggtgcacgagcaacgcatcgacgatgagctcgaccgctggctgacaacgcctacttcgcttcaagcgattcaacccggtgcgtttgactcagttctgagcttctggaagcgccagcaagagctgggcaacttcctgcttcttcccttggttgcgcgcgtgctgttctcaatgccctcatcatcggcccaaattgaacgcgactttgggatggcaggcaggatggtgacccccaccgcagctcgatggcgccttacaacgtggacatggccacatttctgagctgcagcagaacttacgtgggtatcacccagtacccaaagttgtcgtcgagcacagcaaaggatcaagtaccgtcaaacgccatggtgagcatggagcgagagttggacgacgagttcggatcgttgatgaacaaaggcatcgagttgggactctccgacgacgaaaacgacggtattaccgaaatgtagcgggagcgggctggggcggacgaaaacgtgagagaacgggagcacgtgtggaagtggaaacgggctatagctgccgtggtagagttctagccatgcatgtgcacgaaatgagtgtctttacttttcatcaacacgttctgaccgtgtttggtgttagcttcgctatgcagcatatgtaaatagtatttcgctttcaccttgctttcgtgctggtcgtttgattactagcaactctgtaacacgcattgcagcgcgtacacggatcgcctcctgtgtttcaagctagattcgctcgatttgagatcgatctcgcagtattcgcgaccgtgggcacacaggcgggttgctggaccgggtggaagctgctgaaacccgcgtagttggtgtcctggctgccgctgcttcttttctgcggtttgctccagcggctcgtgataatgcggtggtggagcctcgcgtgcttgcagttgcttctgtagggcccatcgctgctcctgttgaggaagttggcgtcggcgcgaacgttgggacgatggccgtggacttgtctcgacttgatacagatattcacatcggtgttcttgaggacatcactgtattatgctggtcctgtggtacgaactcagagtgccatcagttcacggggttttgtctcggcagtcttcttggccaccacgatggctgggcgaaaccgttcgcctgggtggttgttagccctctcttgctcctgatcctgacgcatgcgaatcgcgatgtcgtgttgatctagcccgccgttgatcagctctactacgcgaacctctgtacgagcggttgttgcctcttgcactacttcaaatttgcaaatgtcgtggcgctcttacgcagcacgcttgtgctcctcctctaccaggttgtgttgcttgaccctggaagactgcaatgtgacttgcaaaacgcctggtgaggagatcaaaagagatcatctttgaccaataaaacgagatcttgtttgccaataaaaaaagcaatttgcagagcgaaccaagttctcgccctagctcggttcgaatgaaaagtaagcgaaccaagcccccccccccccccccctccggttcaggtaaaaaagaaaagaaaagaagggtgaaaccgtggttccagttcagttcgtcccaggggtgggaaattcacgaagtgtaggaaagtgtaatagacttgcgaggagagctgctggtctttctactcagtccacaaatggaaagttctgtccgtgcagctctctcaagtctaacctaaagctctacactgccagtcatactgtacaccactcgtacaattgcctctctcacattgatggtcgcacgctcttcaattgttttcgtgaacccagcagccgcagtcaacggcaattcgaagatgtcgttgggtacgccccgaggcttcactgctccagcaagttctcacttttcctttcgcaccgtcaagcgcagtcactgtctccaacctccatcgcctgttagtagcgttgtatcaagccctatgtcggggaagggtgcgccaggaaagcgcaagcgcaagtgacacccatttgatgacgggaagagcgatagaaatggcactgaaggtgcatgcccgaactcggagggcgatgatgacctcgatgaggatgacgtagattatgaggacgcccaaccagtaacgacacgtccaagcaagaggcctgacgtcgcggagtgcatgaagggcaacaagaataccagcctcgtatatgtgaagatgtcactaggttccttcttgacaggcgaggagaaactgttgctgtcattcgatggcattctcgtagacttgagcattggattgttaaatgcctacgcgctgctgaacatccacatgatgcggtgtgtgacaaaggacttcccattcctcgatttgagcagaacttcgtttgccaatgcttgacagacgtaatgtttaacgacagcaacgtgcacatagacgctgaactacatatatcgttggagctatacaatttgttgagaggctctaacgcttctcacgggcgtcgcgctggtatcaagaacgggtggcaacaggcgcagctcgggagatgatgaccgctatccagcatgcactcaaaaatgagtttccttcgccggtttaataaggtgctgcgggtatggtgtagacagaagcactggtagcacacattattgccccagagttcgagcggactccacccgacattcctgatcgtcagcgcctcgacaacgtagtcaacgagtggcgtggagaagtccctcagcgtcggagtgagctggtcaacttcacggcccaccgactggtgcttctgacttatcgactcctgcaaatgattgaggagcgtaacgacagagttgagcaaagcgtttgcgctgtttaagtgacaggggcgtctgattttgaagttagactaatccaagctgaagttatgaagacgttcactgttctaccaacaaagctaggatttggaattagtcacctcacgatagatttgattggtttccgggaactattagtccgcaacgacattgctgttcctccgtacagatcgaagtggaatgaggtgagatacatttattggagacggttcttccgtattgacaaagtggagactatagagtttggtcatcgcagattcacacgagagatctcggcggacggcaagtcggtgaacatcaagattcggaagcccgaacgtgggccttccgagcccaatgcaaatgacctccaagctgccgacattggctctagatgggggttggatgcgagtaaatgcaacctattggtcaccacaaaccaggacgacgaaacggttgtgtgctctggcaaagagtatcgcgaagacgcttacattacgaagagcagcaagaagcatttgagatggatacgggatcgtccgggcactggagctgcttttgcgagcatgccgacgaagaggagcatgttgctaaagcggtggcgggagtacgtcccatttatgacgcagcacctgcatctgctagtgacccccgtgcagcacaaatcgtaccgtcgccatcgacttcgaaggagcttctttaaaaagaagaagctatgtgagctctaccagaaacttgtatgtcacggagagcgaatttttatcgtcattgacaaccggagtaacggcgatccaaatggagcgatcaaagggaagccatcggcactcgtgcagaaattggcgctggagttgtcaaagacgtcgaactgtacggtcatcattattgccgagttccggatcagcaaagtgcactttggttaccaacaagaactgtccaagcaatacccgtatcgaaaggccgctgtccacgtacgcgcagtccacgaaagacgagccacgtacccagtttacggcttactccatttcagaaacaaaggttgttctggtatgagtgtgaacagggacgtgaatgcttcgaagaatatgctgcgcctgctcgattgtgaactcaacgagactcgcccagtcacctacacgcatcaagcaaacagatagataacaatacatttctagtgtcgctgtgtgcctatctaggggtgaggaagattacattgtgatagctggctcagaaattagcccttttggactctgtaggctacgtacctataggacacccttaggagaataatgggttaaagaaaggctcaatgaagcctggttgatttctgcatgaaatatttttcaaaacggtgatgtcctcctgtggatgaatatacttgtctttccgacagatagctcagcacgattgttgtctgctcgctttgcaggccattttgaccaattttaacacgtaaagccttaattgtgtccaattaaaatggttaaatgtaggtttgacattctgacaccttccgacaaatatgtgtctgaagtatttccaaaatatcaatatcttcatgcaaacaacaactgtaaaacgtatttttcaaatataccagccattcgtacaatgaggagtggccctaatgtaggaacactgaagaagatgaggtcgttggttggatgtccaccgttggtgtacactttaccagaagagtaacgtagccatggatcgtgcgtgatgcgtgggacataagcaaaataaacaaaggctgtgcttatgtcttcaatatgccacgggaagaccgcaaggtagcctgagtgctgtgcagctggaataaagagatcgcgcctcacgttgtggacgtcgcgacgctggaccatccgacgcgggagcggcttgaacgcttgcaggagctcctgtttagcacatgcacaggacgcaaggaacaccggttcaacgtgagtagaaaagtgcttagcgcttacctggtacggtactactcgcagcttaaagcgctagttcctgcagtgccgatcatcatcctgcttagtatctgcgggcatatcgtcaactgcattgcttgagtggtctgtagctggcggctccacctgctcaagaccaagaacaaactcaagacaaggcgcacacgttgccgagaagatggccaccttttggctgtgagtgatgggcttatcgcctcgaacaaggtcatggctgcatcgtcgaggcggtactactaaataataagggtccacacgcaacaacggaagaaggacaactgcaagagccatcagatcaagaaccaaatcccaagcacagaaaaaagctgcgaacctgtcggccacatggcttgcgtggtacaagaggataccacgcgtgtgggactcaaccgatagaagtcggagtgtcgccacgtggtcgcctccatgaagctctccctcgacgatagcttcgttatgaatgtcacagcggaagaattcaaaaaccaagtcctcaacaccagccgcgcggaaattggactgctggagtttctaaagctagcggcgtcaacgaagggagccgggagtatcctgcgtgcgctgcacccgctgcatacgtccggtatattggacgagcaaatcatggtctacaggcaccaactcgtcataggaagcaccgaagaccctgcacatatcgacgcgcaagacatgctcggcattgtaggtcatgtgtgagaacggtgaagttaattcattccaatatatgtattcattcgacataacatcgctgcttaacaagacaacatattcatgtgtacacatccacgcgcgcaggtcacctaatcaaagcgtaggctgcacaccgcacgatcgcaccgcgctcactcacccaccacatgcacagatcctcagcaatactgcacggttcaaagcactgatcccgacccaatcttgatcataaataccggccaaaacgtggctgttgacgaagctagtattgcgtgtcgttcgcaatacgctcgccatattatagttttctatccccaaaaccagacagggaaatatcacttcaagctgtatgcttgttgctgctcgacatcatggtatgtcgtgagtttcaaattgcactgtgcaagtgaacaaatagaccgtttggacggcgtggttccaagtccagaggtattacagcttgttgatctgacagcgaagtcctttgaaatttgttcccacgtaattgcagttgtggagtctttgaaaggatctaatcgcgttgtcaataccgataatatctacacctcctgcctgctactagaatcactaaggtcgattggcatgtatggtcgtggtacagtgcgcacatccagcaaacacttcccccacttcacaatgatccgaaaagctgatggaaagcctagaggctacatgaaacaaggcgtgtgcttagagtaacatatcgtagcggccagttggatagatggctctattgtgaatacagtctctaatgttgacgcctcctcttcctctacggtatatcgtcgcataaaggaggaacatgttgcgtttaacgtcccggcctgcctcggtgaatacaacgcggggatgcagggagtcaaccgtcatgatcagcttcgcggtcggatttcgcttgccgatggtcactcatttcagaagtggcataaaaaattagcaatggctatgattgatatcacgagatgtaatgcgtatgtatgcgataacttggcacgtgatacaagcgagatggatgttgcacagcctcgcaataatgcaagggcaagcgcccgtgacgatcaccgggcgtttgtcattccacttgtgcgagaattattcaatggagattggaagaagtgcattgacagtgatgacgtaattgtgtacacttcgaacacaaaacccatgaccactgctgccaatttgaccagaaatacgaatgagttagaaacgccagcacatacatgtgtagcaaaagaatcgtggattgtgttacaaggaaggagtcgggcaatgcgcaaatgcattgtttgtaagttcgagggcagggatgccacccagaaaacggattactgcgagacgcatcgagttgcactctgcaagcgtacctatcctactgaccacagaaaaccgcacttgtgtcagcagcaaaattggacgtgctggcaaaagtatcatttgttctacttgccaaaacaggtctatacagttgacggaaatctgagaaggtcgtctccaatttgtaaagcccagtgttcgttcttgaaggagcgtcgagaccaagataatactgaagagatcagcaaccacgactagcattcggctcatatatggtactgaaggtaaaagtaggcactcaatacattgtgtgcacttgaactacgactgaaaaccatccagttacttgtactcacagcatcctccctccttgtacattgaccagtgcaatgtgcgccgctttggtgcctttcgtctaattatagagctcatgcatggtgctgcatgttaccctcagcaccaatgtctcgatgctccctctctaggcggctccagaacctcgatgtcacgtagaattctgtcgccgggcccgtgatgtcgagatcgccttgcggtgaacccgaggcgttccacgagctgtcgctgtcgctagttcgcccctgcaacgggcgccgtctgaaattctgtgtccttgctgcctttcgccttgtagggttgcgccatcatctcgttctgtcggtgtctagcgtatggctgctgcatcgggcgccgttgtgccgcacatgtggatgatgtagcacaataatgtcgggataggcgccaagcgttatgttcttgttggtgtcgacgcgagtaacttgagagacacaatagcatgggcgcgccgtgtctgatcaggatttagatcccacgttgtgattggcagtcaacgctgacattttcctagagaggcgcaaaaattgttgatcaaaagtcggtgccgtatcttaacttcactataggctagattagtctgctaccttcttttggaaaaatatcttcatgtatcattctggtatcgatagggttaaaccactagtgctacgcgaaggctggaataggatacagataatccgatctacactagtgacaataaagaaacgtaagtacgactctgttgcaagcccacagcattcatctagagaacgggtgtagctctaaagtcatcgaagttcttggcgtcgaagtaagctttattgccttcgaactccgtgacacggcacgcttgcagagccactgttttgtattggtgcctcgtggctacagcgtcaacaaatccccccccccggagtgtgcagcacacctcgcttttggtgctatcaatcatcaaacaactgatctaatcgttctctggtctgtcgaccatcatcgccattgagtacctcatcgccaaatgcaaaacccttcgggtcggcaacacagcaatagtaatagaccaacgcgataggagggtgtcttgtaccagtgttgagcctttcccataaatcgaacctcctcatccgtaaaattaacacaggacagagcgcgaccttcaagctctccaagtctatcctgaataccccgttgtttttgcgcgcggcgggcgcgggccttgccgttcgttctcgaggtgctgctcccgttcctgcaaactttcattggctctttgggtacggcgcttcttgctgcggtcttcagtgtcggccattgccttcccacgttgttattggtcgtcagccctctacaaaacaaactgttggataaagcctaaatcatacggcgccatgctcccccgactacaccaatttgaatgcgctcccattagtatagtcactacaaattatccatacaatcatgtagcaaaatccccatctatgctgcccgagtgtccagtacccaaatcgattcaccggtaaaactatcccgtcgcattgagatttttgaggcattttgctcgatggttcgcgaaagggttaacacgctgatggcgcatttcttgaagcctgtcggcggcagtaccgacagcacaaactgcgtgtcgtggtcggtccaacggcactggcgaattccagttcaacgtgcttcgtgtcggcccactgcttcgtgcagctcggacagtgcgtgtgttgctgatgtccttgcagcatatgtgactcgcaatccgttcctcatcaacaagctcatcaacatggcttgtgcacattgcagggcagagccgccgtctttccccgcgctcactccgaaaaaaacaggccagtgcccaggagagccatcaacagggcggaaggagacgcagccagttcgcgcagttccagacgcagaagaaccccacgccacagcagcgttcgaggtctcctgctgtgagccgcatttgcctgccggcgccaacgttcgggctcagttgcgagcgctgaacgtacgactccttcgcgccattgcgaagaccctcgaggccaccatgccaccaacagacagcatgaagacccgcgcccgcgccgtgagctccgacaatgccaagcccacgatcgtgctcaacctgccgggcgtccgcctcgccgtgctcacgagcgcctacgactcgctcgtgcacctcgacgtcaccctcagctcggccgcgtcgctcttgctcgccacctatgtcgcccgcgtactggcctggaacgtcctcgcgttcgtgctcacgctcctggtgcagggggcggcgttcgggctcatcagcttttacaccttcatgggctgcgccatgctgtccatgaatgcctcacgcaacgcggcctccgttcaaaactactacatcgccaagccggtgactgctacagcctccacgctcccattgctccgcgttgacggcgggtttattgcgtccaagtccacccatgtcgacaagacagacgatgcggccgcttccaagagaaaggagcggcaggccccggctgcccgacgtcgtgtgctggcgcacctgaacaagaatcgcctcctggtcaatgtggtgcccggtgacatgcgccgccgcgtcgacatgaacctaggcgaagcgaacattcgtgtgggcaaggcgttcgtgcaggcggtgccggcaagcgcaaaccccgcgacgtctacgtcatgcgcgtggactgcggtgcccagtcggccggccaggagaagcacatgaaccccgtggtcatgtgggacgtgactgcaacctttgacgagttcaagcaactcgagcgcgagctgaagaaggaggtcaaggcgaaaaaggcgtcgcgcggagtgaaagtgccgcacgtgtcgagcggcgctgtgcttttcgtgcagcctgagctcacggaccatgtgctcaacgcccgccgcgcccgcctgcagacgttcatcgacatcgtgcgctcggacccagtgctttccacgatggggtgcttgcgcaagttctgccaggcctactaggctgcccagccccaatgcactctccgaccgaaggagagactgcaacacgggagagaaggtcgggtgctgccgcgctcgtgtgaagaatgaattcgtcgagccagtggctaccaagggagaagaggagatggagcttccatgtatgtgagagtgagtgaatgagacggacgctgtgggccgttgccgggccgccgcagcggaggcagcaacatcccgacggccgacggcgttcgtctgttcaaattataaacgcagttcgaccagcacggcggcgactctgaaggaggaggcgaggcccattgcgaggtcacaaagaggaataaaaagctgtaaatattattttggtgttgtgtagagatgcttggtgtcgatacggttgccgccgggatttgtctgagtccaacgtgtgagcggcggacttacagttccgtgaaaatccgaatcgttatcacttgatttttgtatgaaacgcgattggccgaaagctcgtcactccatttctgcaatcagcaagtcgactgtacatgcgcaagcaggtcgtcgatgcaccagcagaggacgccgcaggaagcttgacacgcggtcggagagcggccggaacgagtcgccgaagaggagcaacagacgttgctgcggtcgcagcgatggcgaggcgactgtggaccttggcgtcgctcgtcattgtcgccacctggctgggtttactgaatggtgcagcagctgcaatggacgcaggcgccgagccccaactgaggagagccacgcaacatgaggagagcgtggatttgcgcggcttgatgcccattctggacggcacctactcgaacacgaccggtgactacgactaccactgtacggtgcaatgtgagagctagtgaggtgagattggtgctgatggcatggactcatgttggacagacgggagctacggctacaacgatgatgagggcagctccgacggaagcagcggctcgaagacggtgatcatcggcgtcagcattggcgtgggcctcgtgcttgtcacactatgcttgacgtggaaagcctgtaaggagtgctgcacgagctcgagccggcggtcgcgccaccgcgccttcatcgaacgatcgtgagtctttttgaacgttggggatcaagtgagatcggggatttatatctttccggtgtcgtggcatttttgtagaaatgctggatggagatgcgagatctgctaccacacaaacgagttttcgcagaccgactgcgtgttgtgcggtactacggctgaaggtttgaaaaagctggaatttgtttttcatggtttacctgtgatctgatgtgctggattcgtggattgcagagctaaagatgatcagaagtcgacagaaagatgcgagtgcttccatactgagcgctccccaaggtgaaatcagccagcgttcggcctcaaactatctcctcatgtcctctcctcgtgctgcctggattcgaggtctgaacgctcttcctagtgaagatttgacggaccgtcagttaattgcacgcgaacggcatcagtggaagcgctgtattggagggcaacatgtgcgctgggtaaggggtgaaaagtttcggatccgataatgatctgtatagctaatgttatgcactctgggtcttacaggtaaacgttccttttgaagctctccaagtgagtaaggctttatgcagcgtcattattagagagcgtgactttcaggaatgggaaatacaacaccctccacaggtgcctgggtcctcgaggatgtctgtttcctctgtcatcttttcggacagcagtgggaaacaactttcttggctcaccccaggaactgcattcgtgcgagatgactcacactcgggaagccgaactgtgcgctggcgcttagccgaggaattttcaacttcatcacgaccatactccaaaacgatcatggtaagccagtcggtcgggtaagccttatcactcttgtctaatgtttttgtgcgcggttctcttagcgagtatcgaccttgccattttccgagaaagcacagtggttctaccagtattcgctcaagctctgctcgtccattgtcgatggctaccatactatacgtacgttagctgtggctgtgattttcaggttgctcaactgacgaaagctgcaggcattcatcgtgacagggtgttgaagcagtcaatgactctctttatgtctgcaccggatgcaactctacatcgccgactacgcgtcgattttatggatgaggttggcgtcgatggtggtggcattttgcgggagtggctgcatcttgtttgcagccagctttttgcggaatctctggggctgttcacactaaccagctcagcagcgcaccagggatactggattaatcgaactgcgacggggaaatgcacgaagcagctgcaggtatgtccaaagcattgcctctttgctcatcacaaattgttttaactgtggttgatgctcataataacagatgtacgtcttcttcggaaagctattggggaaggctttgcttgaaggcctacttctaaacgtgcggctttccgtccctttgctgaagcacattctcggcgtgccactcaagctctcagacctatatctgctcgatgaaacggtgcattccagtatgatgtggatcctcgaaaacgataacacaaatgctctcggcttgaacttcacggtggatggcgcagaacttattccaaatggcgccgatgtcattcttcacgatggaaacaaacagctttacgttgcaaaagtggcacagtactatctgtttgacagtgttcgagcggaaatttcgagcatcatggagggtctgcgcagtgtcatcagcgattcagttcttcacgtatttgatttcaaggaacttgacatactcttctctggattacctcaaatcgatgtcaatgactggagacagcacacagatattcgattctacgaacaaagtagtcacgagtttgaattggttgcctggttttgggaaattctagagtcgttcacgcaagatcaacgcggaagattgctgcagtacgtcactggttccagcggcgttcctgtcgaaggctttaaggtatatttttcggcttcactacgttaagtgaatttggttctgaccttcaatatacagggtctgactggtatggatggcgagatccaacttttcacaatccagcttgggaaggatatttcaaccgtgtacaccgtactaccgcatgcaagtacgtgcttgaacaggtgagtgcatattttgaaccgtgtttctgcaagccgctttgttgaccactgccttgctggttcaggctggatctaccactctatccttctaaggcagagctagagaggattttgtcaatggtacgtgctttggcatcgtgcgtttgggttacattgaactaacgcagaccttatgattgtggtgccaacggtaggtaatagagatggacgtcacgggatttagtagtcgatgagtggtaattttgctaattattcggaattgccaagtccacgctggcgttgtctatcgtttcggtggtttctacctctccaccagtttcaccttcaggcaagaactcctttagcactcccaacgatgcttcgttctcctttcgtgatgcaattactaacggcgttgtgccgtttgagtcgggtttgcgtgggtcagcgcaatggtgcagcagtattcgaatcgtcgccaaacggcttgaagtcgacacttcttctcgtcgca

SEQ ID NO: 293 - DNA, 18678 bp, unidentified
  misc_feature 1..18678: note = Fanzor polypeptide
  variation 6232: note = n is any nucleotide
  source 1..18678: mol_type = other DNA
ctgcacctcagaagctcattgatttgctcgacggcgcagagacctcagtagatatcgctatgttcatcttgacgcatcctgaaccgacagacgctatcatccgggcctcccagcgtgctatcgttgatcgggcacaagtctccgagaaaagctcagctatgatgatcgaaaacggggtcaacgtatttcacgcaaaggccccaaactcatgcactggaagatggtctgttgccttgcaaaacaactggaaaggtgagatacccgcggtactgttcatctgtagcccacatacacacacaggacagggttctgcaacttgagcttttgcgcttttgcacaatcgccacaataaacggagctgttctgcgtggcggcttggagcttcggccgagtggctggctcaagagtttgtctgcagtgagaacgagagagaaatgtagaggagatgaaggtgctccgaggttttcgggatcccgagttttggagttttggatcgcccggtgctacactgctttcgtccggaccggtaagaaggacatcaaggccatctgcgaggagcacccgggctggaatcgacggacggtcgcgcattactacgccatgtacgaaaatggagagagtttgcagcccaggtgtggcattgtggcaccggtcgagcattctgaaggcgcgtgcagaaggctgcaccattcgcatgatcgtcgacgagcgaagcgcgctccaaaagaaaaaaacatgacttgggtacgcaagtgcggggatcccggtcaagactggacgcgtggccagcttcatggtccacaacaagtggaccatcgtcaacggcgagttcattttacaaggcacgggcaactacagcgcggttgcgttcgatggagcccgccacgcagagacctttgagacgcgcacgggtcaggcgcaccttgattcgatcaagcgcgagttcgagcagctctgggaagaaggacgggtgcttcaatgggcctcgaggcgtactgcttgcttcatgtacttgggggaggacgaggatgaaacgaaaatgtacccccccccggggagagcaggacgaggacgaggacgtttatgtgtaggatatggttgaacgtgcaagccagtaagtaactttgttggtgcccactttgacttgggcttacattggccgtgcaggagtgccatcgtagttacaatagagctcgaggatcatgatgagtcctctcagtccttaccagccaaaaaaggcaaactgcacctagcgcattgagctggcaacggcagccccatcgacggcggctccagctacaacgggatctccgtcacttgactcgtcccttcagtccactgttgcttcttcgtcgctcgacaatttgatcgcgtctgctggatcgggttcgttcattgatccgagttcagtagtggtaaacggcgagctgctaccagcgagatcaagtcgacgtaccgcaactgggtggggcctcgcgccgtctcccccgacgccgcgtgctaccgtgaagcactcatcatggacgcatgcccgaccaacttcgaccagaacgaggttaccaacacgtgctgggccgagtgcccgatcgcctacccggtcgagtgcggcatggaatgcatccgtcagaacgatgactgtgctatggaggtgcttaacaaggtcggtgctgttgctagcacgtctagtcatcgctaccgttggtgcgtctcagaaactgtggcagctttcaaagggtgcgacgcgcgcattcgactgcgctaacatgatgatcggtacgatgagatccatcatccgttacgtgcgtaacatcaagaccacggacccgcaggcctcgacggacaagattctcaacatcctgtaccagtcgaacaacatcgtgacggacctgccgatggccatttacatttgcatgggctgggacttgccgaggcctctcgatgtctcgggtcgtgtgcttacgacgatgaactggatcttgctaaacgccatcgggtacaaggacgacctcgtgtctagctggagcaagttcaaggctttcttgatcggcgccaacttcacggaggccgccaacaagatcaacgagacggagatcaggacgctgagtgacgccctgaaggccaactccacctgcggctacgacttgcgagtgatgacggaccgcacgtgacgaggaaacgcagcataatgcgggtcaagatgagaacgtgatacttgccctcatgctgtccacatcgtgcacacggacggatgctgagtctgtcggtgttgatgcactttcagtcgtcgaccgtaatcgcttccagtttttgagggacgcgaacatttttcttgagtcagggaagaagctggtgttttacctggtgcgtcttcgttatcgagctccgattctccggcagaacgaccagtcggaagtgaaacaattgatgcagagcatgatctggtattcgatcaccggcgcgaagatcgacggtggcaagttgcacgatgccgagtggaccaagaagctggatttcttgaatcctgccaacgaaacactgtcgcagctgtgggaaagtggagagagaagcaccagctcggagcacgaacgttttgcacttattggctggcctgcttccgccgacataatgaacgcagtcgcattgtttggaaaagtgtcctgtgtgcctgtaattcttgcacagtgctacaacgctccgaatgcttctcagcgccgaacttgatgaaaatggatgccatttcgctcaaactctcaaaatcttcgagaagagcaatgcatctgttgagtttgtacccctttgccgggagctaggtactgccatcgttgacttgggtgacactacactgatccaggcgtttttcaagaagtatgttgcccagctgaaagacaaggacagacagttatttctccaatggcttccagctctcgtgcgcgcatttggatgggcatacgttagtgctgccacactgaatgccatcgacgtgcaatcaactgaaattcgctcggatcgagctttggaactcgcaaacacactccatgacaacgatgctgcacttctagctctcgtagcgtttgcgctgaagaaagctcacgcacggtgctctggccacgccgatgcattcgtatcttcgggtaagatcatcacacttttaaagcttgcgctggcgtgtggaaaccctcaaatatttgccggtctatcaaccatactgaacaagatcgatggcaatcttctccacacagtgattaatgcgctctcgaaatacgtcaatgactcgagtttacctgaacaacgtgctacgctggcctcacttgcagcgagacgtcgtgaatggctattcgctgagatcgaagacacgaagcaaccactggacttgacgaagcgcgagatctaggcaatgctagccgacaacacaatcggctccgcgaagtacttttcaatcgtcgctgactttttgaaggtgtcaccgatgagcacgagattcctggggttaaggctctacctagtggacacatcgttcgagttcaagtcagtactcttggggactcgccatttcgcgcctcagtatgggggaccagatggcggaatacgcggaccactttaccggtggattggtgacgtcctgggggggggggggggggggggctttggtttgagtcgccataaccttttcggggctacaacagtgatgtcaaatggatgatgagggacggtctaaagttgtagcgggagtagtgcgtgccgcacttcatgcatgcggcaaccaatactgttttcggcatcgtcggtgacaacagctcgtccaagaacccagccatgaccgacatccttcgacgcatcatcaaaacgatgtacaaaacgcagcacgtcgaaggaaagggcactctattaagcgagttatgcagcgttatgaacccggagggtgtgcatccacgctagctcttaaacttccgcacgcatcgattcctgggactcacgcgcgtcgtccgacgcattcttctactctgggatccattggtgcaatggtacgaggagcgggccacaaaagcccgacgtgagaacgtgatgccgccggagtccttcccactagctcgggaaaagatggaatgctctcactgctggagccgatctcgaaactaaatcagattggacaggccgagtcggggggaccaatgcaacgtgcttcttggactctacaagctccgaatatccttgttggacatcaccacagccttgaaggactgaagacggagaatcggttcttccgaccggatgagctgtacgatctcgcatcgacaacccgttcgctacttcacaaagggtttcgtcgggttttcttccggcggtacaccgatcgtgataccatgaacgtctgctcctttgcctttgagatgcaactatttcttcaccccaacttcaagcatccatatggagcgctgataaaggtgttaccaaggtcaatatacaggcaggtgcctcccagcaggtagctgaccgacactacacgaagattcgacgcattatcattgacagcgtccgcagcatcatgacagcggctgacgccgagccgacgtcgactgatatcgttgccccaccgccagctactgggttatcagaggacttcgtggagctcttcacggagacagcgaacgaggtggcaccaccacatagactgcggtgcacgagcaacgcatcgacgatgagctcgaccgctggctgacaacgcctacttcgcttcaagcgattcaacccggtgcgtttgactcagttctgagcttctggaagcgccagcaagagctgggcaacttcctgcttcttcccttggttgcgcgcgtgctgttctcaatgccctcatcatcggcccaaattgaacgcgactttgggatggcaggcaggatggtgacccccaccgcagctcgatggcgccttacaacgtggacatggccacatttctgagctgcagcagaacttacgtgggtatcacccagtacccaaagttgtcgtcgagcacagcaaaggatcaagtaccgtcaaacgccatggtgagcatggagcgagagttggacgacgagttcggatcgttgatgaacaaaggcatcgagttgggactctccgacgacgaaaacgacggtattaccgaaatgtagcgggagcgggctggggcggacgaaaacgtgagagaacgggagcacgtgtggaagtggaaacgggctatagctgccgtggtagagttctagccatgcatgtgcacgaaatgagtgtctttacttttcatcaacacgttctgaccgtgtttggtgttagcttcgctatgcagcatatgtaaatagtatttcgctttcacctatgctttcgtgctggtcgtttgattactagcaactctgtaacacgcattgcagcgcgtacacggatcgcctcctgtgtttcaagctagattcgctcgatttgagatcgatctcgcagtattcgcgaccgtgggcacacaggcgggttgctggaccgggtggaagctgctgaaacccgcgtagttggtgtcctggctgccgctgcttcttttctgcggtttgctccagcggctcgtgataatgcggtggtggagcctcgcgtgcttgcagttgcttctgtagggcccatcgctgcacctgttgaggaagttggcgtcggcgcgaacgttgggacgatggccgtggacttgtctcgacttgatacagatattcacatcggtgttcttgaggacatcactgtattatgctggtcctgtggtacgaactcagagtgccatcagttcacggggttttgtctcggcagtcttcttgaccaccacgatggctgggcgaaaccgttcgcctgggtggttgttagccctctcttgctcctgatcctgacgcatgcgaatcgcgatgtcgtgttgatctagcccgccgttgatcagctctactacgcgaacctctgtacgagcggttgttgcctcttgcactacttcaaatttgcaaatgtcgtggcgctcttacgcagcacgcttgtgctcctcctctaccaggttgtgttgcttgaccctggaagactgcaatgtgacttgcaaaacgcctggtgaggagatcaaaagagatcatctttgaccaataaaacgagatcttgtttgccaataaaaaaagcaatttgcagagcgaaccaagttctcgccctagctcggttcgaatgaaaagtaagcgaaccaagcccccccccccccccnccccccctccggttcaggtaaaaaagaaaagaaaagaagggtgaaaccgtggttccagttcagttcgtcccaggggtgggaaattcacgaagtgtaggaaagtgtaatagacttgcgaggagagctgctggtctttctactcagtccacaaatggaaagttctgtccgtgcagctctctcaagtctaacctaaagctctacactgccagtcatactgtacaccactcgtacaattgcctctctcacattgatggtcgcacgctcttcaattgttttcgtgaacccagcagccgcagtcaacggcaattcgaagatgtcgttgggtacgccccgaggcttcactgctccagcaagttctcacttttcctttcgcaccgtcaagcgcagtcactgtctccaacctccatcgcctgttagtagcgttgtatcaagccctatgtcggggaagggtgcgccaggaaagcgcaagcgcaagtgacacccatttgatgacgggaagagcgatagaaatggcactgaaggtgcatgcccgaactcggagggcgatgatgacctcgatgaggatgacgtagattatgaggacgcccaaccagtaacgacacgtccaagcaagaggcctgacgtcgcggagtgcatgaagggcaacaagaataccagcctcgtatatgtgaagatgtcactaggttccttcttgacaggcgaggagaaactgttgctgtcattcgatggcattctcgtagacttgagcattggattgttaaatgcctacgcgctgctgaacatccacatgatgcggtgtgtgacaaaggacttcccattcctcgatttgagcagaacttcgtttgccaatgcttgacagacgtaatgtttaacgacagcaacgtgcacatagacgctgaactacatatatcgttggagctatacaatttgttgagaggctctaacgcttctcacgggcgtcgcgctggtatcaagaacgggtggcaacaggcgcagctcgggagatgatgaccgctatccagcatgcactcaaaaatgagtttccttcgccggtttaataaggtgctgcgggtatggtgtagacagaagcactggtagcacacattattgccccagagttcgagcggactccacccgacattcctgatcgtcagcgcctcgacaacgtagtcaacgagtggcgtggagaagtccctcagcgtcggagtgagctggtcaacttcacggcccaccgactggtgcttctgacttatcgactcctgcaaatgattgaggagcgtaacgacagagttgagcaaagcgtttgcgctgtttaagtgacaggggcgtctgattttgaagttagactaatccaagctgaagttatgaagacgttcactgttctaccaacaaagctaggatttggaattagtcacctcacgatagatttgattagtttccgggaactattagtccgcaacgacattgctgttcctccgtacagatcgaagtggaatgaggtgagatacatttattggagacggttcttccgtattgacaaagtggagactatagagtttggtcatcgcagattcacacgagagatctcggcggacggcaagtcggtgaacatcaagattcggaagcccgaacgtgggccttccgagcccaatgcaaatgacctccaagctgccgacattggctctagatgggggttggatgcgagtaaatgcaacctattggtcaccacaaaccaggacgacgaaacggttgtgtgctctggcaaagagtatcgcgaagacgcttacattacgaagagcagccagaagcatttgagatggatacgggatcgtccgggcactggagctgcttttgcgagcatgccgacgaagaggagcatgttgctaaagcggtggcgggagtacgtcccatttatgacgcagcacctgcatctgctagtgacccccgtgcagcacaaatcgtaccgtcgccatcgacttcgaaggagcttctttaaaaagaagaagctatgtgagctctaccagaaacttgtatgtcacggagagcgaatttttatcgtcattgacaaccggagtaacggcgatccaaatggagcgatcaaagggaagccatcggcactcgtgcagaaattggcgctggagttgtcaaagacgtcgaactgtacggtcatcattattgccgagttccggatcagcaaagtgcactttggttaccaacaagaactgtccaagcaatacccgtatcgaaaggccgctgtccacgtacgcgcagtccacgaaagacgagccacgtacccagtttacggcttactccatttcagaaacaaaggttgttctggtatgagtgtgaacagggacgtgaatgcttcgaagaatatgctgcgcctgctcgattgtgaactcaacgagactcgcccagtcacctacacgcatcaagcaaacagatagataacaatacatttctagtgtcgctgtgtgcctatctaggggtgaggaagattacattgtgatagctggctcagaaattagcccttttggactctgtaggctacgtacctataggacacccttaggagaataatgggttaaagaaaggctcaatgaagcctggttgatttctgcatgaaatatttttcaaaacggtgatgtcctcctgtggatgaatatacttgtctttccgacagatagctcagcacgattgttgtctgctcgctttgcaggccattttgaccaattttaacacgtaaagccttaattgtgtccaattaaaatggttaaatgtaggtttgacattctgacaccttccgacaaatatgtgtctgaagtatttccaaaatatcaatatcttcatgcaaacaacaactgtaaaacgtatttttcaaatataccagccattcgtacaatgaggagtggccctaatgtaggaacactgaagaagatgaggtcgttggttggatgtccaccgttggtgtacactttaccagaagagtaacgtagccatggatcgtgcgtgatgcgtgggacataagcaaaataaacaaaggctgtgcttatgtcttcaatatgccacgggaagaccgcaaggtagcctgagtgctgtgcagctggaataaagagatcgcgcctcacgttgtggacgtcgcgacgctggaccatccgacgcgggagcggcttgaacgcttgcaggagctcctgtttagcacatgcacaggacgcaaggaacaccggttcaacgtgagtagaaaagtgcttggcgcttacctggtacggtactactcgcagcttaaagcgctagttcctgcagtgccgatcatcatcctgcttagtatctgcgggcatatcgtcaactgcattgcttgagtggtctgtagctggcggctccacctgctcaagaccaagaacaaactcaagacaaggcgcacacgttgccgagaagatggccaccttttggctgtgagtgatgggcttatcgcctcgaacaaggtcatggctgcatcgtcgaggcggtactactaaataataagggtccacacgcaacaacggaagaaggacaactgcaagagccatcagatcaagaaccaaatcccaagcacagaaaaaagctgcgaacctgtcggccacatggcttgcgtggtacaagaggataccacgcgtgtgggactcaaccgatagaagtcggagtgtcgccacgtggtcgcctccatgaagctctccctcgacgatagcttcgttatgaatgtcacagcggaagaattcaaaaaccaagtcctcaacaccagccgcgcggaaattggactgctggagtttctaaagctagcggcgtcaacgaagggagccgggagtatcctgcgtgcgctgcacccgctgcatacgtccggtatattggacgagcaaatcatggtctacaggcaccaactcgtcataggaagcaccgaagaccctgcacatatcgacgcgcaagacatgctcggcattgtaggtcatgtgtgagaacggtgaagttaattcattccaatatatgtattcattcgacataacatcgctgcttaacaagacaacatattcatgtgtacacatccacgcgcgcaggtcacctaatcaaagcgtaggctgcacaccgcacgatcgcaccgcgctcactcacccaccacatgcacagatcctcagcaatactgcacggttcaaagcactgatcccgacccaatcttgatcataaataccggccaaaacgtggctgttgacgaagctagtattgcgtgtcgttcgcaatacgctcgccatattatagttttctatccccaaaaccagacagggaaatatcacttcaagctgtatgcttgttgctgctcgacatcatggtatgtcgtgagtttcaaattgcactgtgcaagtgaacaaatagaccgtttggacggcgtggttccaagtccagaggtattacagcttgttgatctgacagcgaagtcctttgaaatttgttcccacgtaattgaagttgtggagtctttgaaaggatctaatcgcgttgtcaataccgataatttctacacctcgtgcctgctactagaatcgctaagatcgattggtctgtatggtcgtggtacagtgcgcacatccagcaaacacttcccccatttcacaatgatccgaaaagctgatggaaagcctagaggctacatgaaacaaggcgtgtgcttagagtaacatatcgtagcggccagttggatagatggctctattgtgaatacagtctctaatgttgacgcctcctcttcctctacggtatatcgtcgcataaaggaggaacatgttgcgtttaacgtcccggcctgcctcggtgaatacaacgcggggatgcagggagtcaaccgtcatgatcagcttcgcggtcggatttcgcttgccgatggtcactcatttcagaagtggcataaaaaattagcaatggctatgattgatatcacgagatgtaatgcgtatgtatgcgataacttggcacgtgatacaagcgagatggatgttgcacagcctcgcaataatgcaagggcaagcgcccgtgacggtcaccgggcgtttgtcattccacttgtgcgagaattattcaatggagattggaagaagtgcattgacagtgatgacgtaattgtgtacacttcgaacacaaaacccatgaccactgctgccaatttgaccagaaatacgaatgagttagaaacgccagcacatacatgtgtagcaaaagagtcgtggcttgtgttacaaggaaggagtcgggcaatgcacaaatggactgtatgtaagttcgagggcagggatgacacccagaaaacggattattgcgagacgcatcgagttgcactctgcaagcgtacctatcctactgaccacagaaaaccgcacttgtgtcagcagcaaaattggacgtgctggcaaaagtatcatttgttctacttgccaaaacaggtctatacagttgacggaaatctgagaaggtcgtctccaatttgtaaagcccagtgttcgttcttgaaggagcgtcgagaccaagataatactgaagagatcagcaaccacgactagcattcggctcatatatagtactgaaggtaaaagtaggcactcaatacattgtgtgcacttgaactacgactgaaaaccagccagttacttgtactcacagcatcctccctccttgtacattgaccagtgcaatgtgcgccgctttggtgcctttcgtctaattatagagctcatgcatggtgctgcatgttaccctcagcaccaatgtctcgatgctccctctctaggcggctccagaacctcgatgtcacgtagaattctgtcgccgggcccgtgatgtcgagatcgccttgcggtgaacccgaggcgttccacgagctgtcgctgtcgctagttcgcccctgcaacgggcgccgtctgaaattctgtgtccttgctgcctttcgccttgtagggttgcgccatcatctcgttctgtcggtgtctagcgtatggctgctgcatcgggcgccgttgtgccgcacatgtggatgatgtagcacaataatgtcgggataggcgccaagcgttatgttcttgttggtgtcgacgcgagtaacttgagagacacaatagcatgggcgcgccgtgtctgatcaggatttagatcccacgttgtgattggcagtcaacgctgacattttcctagagaggcgcaaaaattgttgatcaaaagtcggtgccgtatcttaacttcactataggctagattagtctgctaccttcttttggaaaaatatcttcatgtatcattctggtatcgatagggttaaaccactagtgctacgcgaaggctggaataggatacagataatccgatctacactagtgacaataaagaaacgtaagtacgactctgttgcaagcccacagcattcatctagagaacgggtgtagctctaaagtcatcgaagttcttggcgtcgaagtaagctttattgccttcgaactccgtgacacggcacgcttgcagagccactgttttgtattggtgcctcgtggctacagcgtcaacaaatccccccccccggagtgtgcagcacacctcgcttttggtgctatcaatcatcaaacaactgatctaatcgttctctggtctgtcgaccatcatcgccattgagtacctcatcgccaaatgcaaaacccttcgggtcggcaacacagcaatagtaatagaccaacgcgataggagggtgtcttgtaccagtgttgagcctttcccataaatcgaacctcctcatccgtaaaattaacacaggacagagcgcgaccttcaagctctccaagtctatcctgaataccccgttgtttttgcgcgcggcgggcgcgggccttgccgttcgctctcgaggtgctgctcccgttcctgcaaactttcattggctctttgggtacggcgcttcttgctgcggtcttcagtgtcggccattgccttcccacgttgttattggtcgtcagccctctacaaaacaaactgttggataaagcctaaatcatacggcgccatgctcccccgactacaccaatttgaatgcgctcccattagtatagtcactacaaattatccatacaatcatgtagcaaaatccccatctatgctgcccgagtgtccagtacccaaatcgattcaccggtaaaactatcccgtcgcattgagatttttgaggcattttgctcgatggttcgcgaaagggttagcacgctgatggcgcatttcttgaagcctgtcggcggcagtaccgacagcacaaactgcgtgtcgtggtcggtccaacggcactggcgaattccagttcaacgtgcttcgtgtcggcccactgcttcgtgcagctcggacagtgcgtgtgttgctgatgtccttgcagcatatgtgactcgcaatccgttcctcatcaacaagctcatcaacatggcttgtgcacattgcagggcagagccgccgtctttccccgcgctcactccgaaaaaaacaggccagtgcccaggagagccatcaacagggcggaaggagacgcagccagttcgcgcagttccagacgcagaagaaccccacgccacagcagcgttcgaggtctcctgctgtgagccgcatttgcctgccggcgccaacgttcgggctcagttgcgagcgctgaacgtacgactccttcgcgccattgcgaagaccctcgaggccaccatgccaccaacagacagcatgaagacccgcgcccgcgccgtgagctccgacaatgccaagcccacgatcgtgctcaacctgccgggcgtccgcctcgccgtgctcacgagcgcctacgactcgctcgtgcacctcgacgtcaccctcagctcggccgcgtcgctcttgctcgccacctatgtcgcctgcgtactggcctggaacgtcctcgcgttcgtgctcacgctcctggtgcagggggcggcgttcgggctcatcagcttttacaccttcatgggctgcgccatgctgtccatgaatgcctcacgcaacgcggcctccgttcaaaactactacatcgccaagccggtggctgctacagcctccacgctcccattgctccgcgttgacggcgggtttatcgcgtccaagtccacccatgtcgacaagacagacgatgcggccgcttccaagagaaaggagcggcaggccccggctgcccgacgtcgtgtgctggcgcacctgaacaagaatcgcctcctggtcaatgtggtgcccggtgacatgcgccgccgcgtcgacatgaacctaggcgaagcgaacattcgtgtgggcaaggcgttcgtgcaggcggtgccggcaagcgcaaaccccgcgacgtctacgtcatgcgcgtggactgcggtgcccagtcggccggccaggagaagcacatgaaccccgtggtcatgtgggacgtgactgcaacctttgacgagttcaagcaactcgagcgcgagctgaagaaggaggtcaaggcgaaaaaggcgtcgcgcggagtgaaagtgccgcacgtgtcgagcggcgctgtgcttttcgtgcagcctgagctcacggaccatgtgctcaacgcccgccgcgcccgcctgcagacgttcatcgacatcgtgcgctcggacccagtgctttccacgatggggtgcttgcgcaagttctgccaggcctactaggctgcccagccccaatgcactctccgaccgaaggagagactgcaacacgggagagaaggtcgggtgctgccgcgctcgtgtgaagaatgaattcgtcgagccagtggctaccaagggagaagaggagatggagcttccatgtatgtgagagtgagtgaatgagacggacgctgtgggccgttgccgggccgccgcagcggaggcagcaacatcccgacggccgacggcgttcgtctgttcaaattataaacgcagttcgaccagcacggcggcgactctgaaggaggaggcgaggcccattgcgaggtcacaaagaggaataaaaagctgtaaatattattttggtgttgtgtagagatgcttggtgtcgatacggttgccgccgggatttgtctgagtccaacgtgtgagcggcggacttacagttccgtgaaaatccgaatcgttatcacttgatttttgtatgaaacgcgattggccgaaagctcgtcactccatttctgcaatcagcaagtcgactgtacatgcgcaagcaggtcgtcgatgcaccagcagaggacgccgcaggaagcttgacacgcggtcggagagcggccggaacgagtcgccgaagaggagcaacagacgttgctgcggtcgcagcgatggcgaggcgactgtggaccttggcgtcgctcgtcattgtcgccacctggctgggtttactgaatggtgcagcagctgcaatggacgcaggcgccgagccccaactgaggagagccacgcaacatgaggagagcgtggatttgcgcggcttgatgcccattctggacggcacctactcgaacacgaccggtgactacgactaccactgtacggtgcaatgtgagagctagtgaggtgagattggtgctgatggcatggactcatgttggacagacgggagctacggctacaacgatgatgagggcagctccgacggaagcagcggctcgaagacggtgatcatcggcgtcagcattggcgtgggcctcgtgcttgtcacactatgcttgacgtggaaagcctgtaaggagtgctgcacgagctcgagccggcggtcgcgccaccgcgccttcatcgaacgatcgtgagtctttttgaacgttggggatcaagtgagatcggggatttatatctttccggtgtcgtggcatttttgtagaaatgctggatggagatgcgagatctgctaccacacaaacgagttttcgcagaccgactgcgtgttgtgcggtactacggctgaaggtttgaaaaagctggaatttgtttttcatggtttacctgtgatctgatgtgctggattcgtggattgcagagctaaagatgatcagaagtcgacagaaagatgcgagtgcttccatactgagcgctccccaaggtgaaatcagccagcgttcggcctcaaactatctcctcatgtcctctcctcgtgctgcctggattcgaggtctgaacgctcttcctagtgaagatttgacggaccgtcagttaattgcacgcgaacggcatcagtggaagcgctgtattggagggcaacatgtgcgctgggtaaggggtgaaaagtttcggatccgataatgatctgtatagctaatgttatgcactctgggtcttacaggtaaacgttccttttgaagctctccaagtgagtaaggctttatgcagcgtcattattagagagcgtgactttcaggaatgggaaatacaacaccctccacaggtgcctgggtcctcgaggatgtctgtttcctctgtcatcttttcggacagcagtgggaaacaactttcttggctcaccccaggaactgcattcgtgcgagatgactcacactcgggaagccgaactgtgcgctggcgcttagccgaggaattttcaacttcatcacgaccatactccaaaacgatcatggtaagccagtcggtcgggtaagccttatcactcttgtctaatgtttttgtgcgcggttctcttagcgagtatcgaccttgccattttccgagaaagcacagtggttctaccagtattcgctcaagctctgctcgtccattgtcgatggctaccatactatacgtacgttagctgtggctgtgattttcaggttgctcaactgacgaaagctgcaggcattcatcgtgacagggtgttgaagcagtcaatgactctctttatgtctgcaccggatgcaactctacatcgccgactacgcgtcgattttatggatgaggttggcgtcgatggtggtggcattttgcgggagtggctgcatcttgtttgcagccagctttttgcggaatctctggggctgttcacactaaccagctcagcagcgcaccagggatactggattaatcgaactgcgacggggaaatgcacgaagcagctgcaggtatgtccaaagcattgcctctttgctcatcacaaattgttttaactgtggttgatgctcataataacagatgtacgtcttcttcggaaagctattggggaaggctttgcttgaaggcctacttctaaacgtgcggctttccgtccctttgctgaagcacattctcggcgtgccactcaagctctcagacctatatctgctcgatgaaacggtgcattccagtatgatgtggatcctcgaaaacgataacacaaatgctctcggcttgaacttcacggtggatggcgcagaacttattccaaatggcgccgatgtcattcttcacgatggaaacaaacagctttacgttgcaaaagtggcacagtactatctgtttgacagtgttcgagcggaaatttcgagcatcatggagggtctgcgcagtgtcatcagcgattcagttcttcacgtatttgatttcaaggaacttgacatactcttctctggattacctcaaatcgatgtcaatgactggagacagcacacagatattcgattctacgaacaaagtagtcacgagtttgaattggttgcctggttttgggaaattctagagtcgttcacgcaagatcaacgcggaagattgctgcagtacgtcactggttccagcggcgttcctgtcgaaggctttaaggtatatttttcggcttcactacgttaagtgaatttggttctgaccttcaatatacagggtctgactggtatggatggcgagatccaacttttcacaatccagcttgggaaggatatttcaaccgtgtacaccgtactaccgcatgcaagtacgtgcttgaacaggtgagtgcatattttgaaccgtgtttctgcaagccgctttgttgaccactgccttgctggttcaggctggatctaccactctatccttctaaggcagagctagagaggattttgtcaatggtacgtgctttggcatcgtgcgtttgggttacattgaactaacgcagaccttatgattgtggtgccaacggtaggtaatagagatggacgtcacgggatttagtagtcgatgagtggtaattttgctaattattcggaattgccaagtccacgctggcgttgtctatcgtttcggtggtttctacctctccaccagtttcaccttcaggcaagaactcctttagcactcccaacgatgcttcgttctcctttcgtgatgcaattactaacggcgttgtgccgtttgagtcgggtttgcgtgggtcagcgcaatggtgcagcagtattcgaatcgtcgccaaacggcttgaagtcgacacttcttctcgtcgca

SEQ ID NO: 294 - DNA, 8645 bp, unidentified
  misc_feature 1..8645: note = Fanzor polypeptide
  variation 4173..4182: note = n is any nucleotide
  source 1..8645: mol_type = other DNA
caacaagatcaacgagacggagatcgggacgctgagcgacgccctgaaggccaaccccacctgcggctacgacttgcgagtgatgacggaccgcacgtgacgaggaaacgcagcataatgcgggtcaagatgagaacgtgatacttgccctcatgctgtccacatcgtgcacacggacggatgctgagtctgtcggtgttgatgcactttcagtcgtcgaccgtaatcgcttccagtttttgagggacgcgaacatttttcttgagtcagggaagaagctggtgttttacctggtgcgtcttcgttatcgagctccgattctccggcagaacgaccagtcggaagtgaaacaattgatgcagagcatgatctggtattcgatcaccggcgcgaagatcgacggtggcaagttgcacgatgccgagtggaccaagaagctggatttcttgaatcctgccaacgaaacactgtcgcagctgtgggaaagtggagagagaagcaccagctcggagcacgaacgttttgcacttattggctggcctgcttccgccgacataatgaacgcagtcgcattgtttggagaagtgtcctgtgtgcctgtaattcttgcacagtgctacaacgctccgaatgcttctcagcgccgaacttgatgaaaatggatgccatttcgctcaaactctcaaaatcttcgagaagagcaatgcatctgttgagtttgtacccctttgccgggagctaggtgctgccatcgttgacttgggtgacactacactgatccaggcgtttttcaagaagtatgttgcccagctgaaagacaaggacagacagttatttctccaatggcttccagctctcgtgcgcgcatttggatgggcatacgttagtgctgccacactgaatgccatcgacgtgcaatcaactgaaattcgctcggatcgagctttggaactcgcaaacacactccatgacaacgatgctgcacttctagctctcgtagagtttgcgctgaagaaagctcacgcacggtgctctggccacgccgatgcattcgtatcttcgggtaagatcatcacacttttaaagcttgcgctggcgtgtggaaaccctcaaatatttgccggtctatcaaccatactgaacaagatcgatggcaatcttctccacacagtgattaatgcgctctcgaaatacgtcaatgactcgagtttacctgaacagcgtgctacgctggcctcacttgcagcgagacgtcgtgaatggctattcgctgagatcgaagacacgaagcaaccactggacttgacgaagcgcgagatctaggcaatgctagccgacaacacaatcggctccgcgaagtacttttcaatcgtcgctgactttttgaaggtgtcatcgatgagcacgagattcctggggttaaggctctacctagtggacacatcgttcgagttcaagtcggtactcttggggactcgccatttcgcgcctcagtatgggggaccagatggcggaatacgcggaccactttaccggtggattggtgacgtcctggggggggggctttggtttgagtcgccataaccttttcggggctacaacagtgatgtcaaatggatgatgagggacggtctaaagttgtagcgggagtggtgcgtgccgcacttcatgcatgcggcaaccaatactgttttcggcatcgtcggtgacaacagctcgtccaagaacccagccatgaccgacatccttcgacgcatcaccaaaacgatgtacaaaacgcagcacgtcgaaggaatgggcactctattaagcgagttatgcagcgttatgaacccggagggtgtgcatccacgctagctcttaaacttccgcacgcatcgattcctgggactcacgcgcgtcgtccgacgcattcttctactctgggatccattggtgcaatggtacgaggagcgggccacaaaagcccgacgtgagaacgtgatgccgccggagtccttcccactagctcgggaaaagatggaactcattcaggtgctctcactgctggagccgatctcgaaactaaatcagattggacaggccgagtcggggggaccaatgcaacgtgcttcttggactctacaagctccgaatatccttgttggacatcaccacagccttgaaggactgaagacggagaatcggttcttccgaccggatgagctgtacgatctcgcatcgacaacccgttcgctacttcacaaagggtttcgtcgggttttcttccggcggtacaccgatcgtgataccatgaacgtctgctcctttgcctttgagatgcaactatttcttcaccccaacttcaagcatccatatggagcgctgataaaggtgttaccaaggtcaatatacaggcaggtgcctcccagcaggtagctgaccgacactacacgaagattcgacgcattatcattgacagcgtccgcagcatcatgacagcggctgacgccgagccgacgtcgactgatatcgttgccccaccgccagctactgggttatcagaggacttcgtggagctcttcacggagacagcgaacgaggtggcaccaccacatagactgcggtgcacgagcaacgcatcgacgatgagctcgaccgctggctgacaacgcctacttcgcttcaagcgattcaacccaatgcgttttactcagttctgagcttctggaagcgccagcaagagctggacatcttcctgcttcttcccttggttgcgcgcgtgctgttctcaatgccctcatcatcggccctcatcatcggcccaaattgaacgcgactttgggatggcaggcaggatggtgacccccaccgcagctcgatggcgccttacaacgtggacatggccacatttctgagctgcagcagaacttacgtgggtatcacccagtacccaaagttgtcgtcgagcacagcaaaggatcaagtaccgtcaaacgccatggtgagcatggagcgagagttggacgacgagttcggatcgttgatgaacaaaggcatcgagttgggactctccgacgacgaaaacgacggtattaccgaaatgtagcgggagcgggctggggcggacgaaaacgtgagagaacgggagcacgtgtggaagtggaaacgggctatagctgccgtggtagagttctagccatgcatgtgcacgaaatgagtgtctttacttttcatcaacacgttctgaccgttgttggtgttagcttcgctatgcagcttatgtaaatagtattttgttttcacctatgctttcgtgctggtcgtttgattactagcaactctgtaacacgcattgcagcgcgtacacggatcgcctcctgtgtttcaagctagattcgctcgatttgggatcgatctcgcagtattcgcgaccgtgggcacacaggcgggttgctggaccgggtggcagctgctgaaacccgcgtagttggtgtcctggctgccgctgcttcttttctgcggtttgctccagcggctcgtgataatgcggtggtggagcctcgcgtgcttgcagttgcttctgtagggcccatcgctgctcctgttgaggaagttggcgtcggcgcgaacgttgggacgatggccgtggacttgtcttgacttgatacagatattcacatcggtgttcttgaggacatcactgtattatgctggtcctgtggtacgaactcggagtgccatcagttcacggggttttgtctcggcagtcttcttggccaccacgatggctgggcgaaaccgttcgcctgggtggttgttagccctctcttgctcctgatcctgacgcacgcgaatcgcgatgtcgtgttgatctagcccgccgttgatcagctctactacgcgaacctctgtacgagcggttgttgcctcttgcactacttcaaatttgcaaatgtcgtggcgctcttacgcagcacgcttgtgctcctcctctaccaggttgtgttgcttgaccctggaagactgcaatgtgactcgcaaaacgcctggtgaggagatcaaaagagatcatctttgaccaataaaacgagatcttgtttgccaataaaaaaagcaatttgcagagcgaaccaagttctcgccctagctcggttcgaatgaaaagtaagcgaaccaagccccccccccccnnnnnnnnnnccctccggttcaggtaaaaaaagaaaagaaaagaagggtgaaaccgtggttccagttcagttcgtcctaggggtgggaaattcacgaagtgtaggaaagtgtaatagacttgcgaggagagctgctggtctttctactcagtccacaaatggaaagttctgtccgtgcagctctctcaagtctaacctaaagctctacactgccagtcatactgtacaccactcgtacaattgcctctctcacattgatggtcgcacgctcttcaattgttttcgtgaacccagcagccgcagtcaacggcaattcgaagatgtcgttgggtacgccccgaggcttcactgctccagcaagttctcacttttcctttcgcaccgtcaagcgcagtcactggtctccaacctccatcgcctgttagcagcgttgtatcaagccctatgtcggggaagggtgcgccaggaaagcgcaagcgcaagtgacacccatttgatgacgggaagagcgatagaaatggcactgaaggcgcatgcccgaactcggagggcgatgatgacctcgatgaggatgacgtagattatgaggacgcccaaccagtaacgacacgtccaagcaagaggcctgacgtcgcggagcgcatgaagggcaacaagaataccagcctcgtatatgtgaagatgtcactaggttccttcttgacaggcgaggagaaactgttgctgtcattcgatggcattctcgtagacttgagcattggattgttaaatgcctacgcgctgctgaacatccacatgatacggtgtgtgacaaaggacttcccattcctcgatttgagcagaacttcgtttgccaatgcttgacagacgtaatgtttaacgacagcaacgtgcacatagacgctgaactacatatatcgttggagctatacaatttgttgagaggctctaacgcttctcacgggcgtcgcgctggtatcaagaacgggtggcaacaggcgcagctcgggagatgatgaccgctatccagcatgcactcaaaaatgagtttccttcgccggtttaataaggtgctgcgggtatggtgtagacagaagcactggtagcacacattattgccccagagttcgagcggactacacccgacatccctgatcgtcagcgcctcgacaacgtagtcaacgagtggcgtggagaagtccctcagcgtcggagtgagctggtcaacttcacggcccaccgactggtgcttctgacttatcgactcctgcaaatgattgaggagcgtaacgacagagttgagcaaagcgtttgcgctgtttaagtgacaggggcgtctgatttgaagttagactaatccaagctgaagttatgaagacgttcactgttctaccaacaaagcaaggatttggaattagtcacctcacgatagatttgattggtttccgggaactattagtccgcaacgacattgctgttcctccgtacagatcgaagtggaatgaggtgagatacatttattggagacggttcttccgtattgacaaagtggagactatagagtttggtcatctcagattcacacgagagatctcgacggacggcaagtcggtgaacatcaagattcggaagcccgaacgtgggccttccgagcccaatgcaaatgacctccaagctgccgacattggctctagatgggggttggatgcgagtaaatgcaacctcttggtcaccacaaaccaggacgacgaaacggttgtgtgctctggcaaagagtatcgcgaagacgcttacattacgaagagcagccagaagcaattgagatggatacgggatcgtccggacactggagctgcctttgcgagcatgccgacgaagaggagcatgttgctaaagcggtggcgggagtacgtcccatttatgacgcagcacctgcatctgctagtgacccccatgcagcacaaatcgtacagtcgccatcgacttcgaaggagcttctttaaaaagaagaacctatgtgagctctaccagaaacttgtatgtcacggagagcgaatttttatcgtcattgacaaccggagtaacggcgatccaaatggagcgatcaaagggaagccatcggcactcgtgcagaaattggcgctggagttgtcaaagacgtcgaactgtacggtcatcattattgccgagttccggatcagcaaagtgcactttggttaccaacaagaactgtccaagcaatacccgtatcgaaaggccgctgtccacgtacgcgcagtccacgaaagacgagccacgtacccagtttacggcttactccatttcagaaacaaaggttgttctggtatgagtgtgaacagggacgtgaatgcttcgaagaatatgctgcgcctgctcgattgtgaactcaacgagactcgcccagtcacctacacgcatcaagcaaacagatagataacaatacctttctagtgtcgctgtgtgcctatctaggggtgaggaagattacattgtgatagccggctcagaaattagcccttttggactctgtaggctacgtacctataggacacccttaggagaataatgggttaaacaaaggctcaatgaagcctggttgatttctgcatgaaatatttttcaaaacggtgatgtcctcctgtggatgaatatacttgtctttccgacagatagctcagcacgattgttgtctgctcgctttgcagaccattttgaccaattttaacacgtaaagccttaattgtgtccaattaaaatggttaaatgtaggtttgacattctgacaccttccgacaaatatgtgtctgaagtatttccaaaatatcaatatcttcatgcaaacaacaactgtaaaacgtatttttcaaatataccagccattcgtacaatgaggagtggccctaatgtaggaacactgaagaagatgaggtcgttggttggatgtccaccgttggtgtacactttaccagaagagtaacgtagccatagatcgtgcgtgatgcgtgggacataagcaaaataaacaaaggctgtgcttatgtcttcaatatgccacgggaagaccgcaaggtagcctgagtgctgtgcagctggaataaagagatcgcgcctcacgttgtggacgtcgcgacgctggaccatctgacgcgggagcggcttgaacgcttgcaggagctcctgtttagcacatgcacaggacgcaaggaacaccggttcaacgtgagtagaaaagtgcttggcgcttacctggtacggtactactcgcagcttaaagcgctagttcctgcagtgccgatcatcatcctgcttagtatctgcgggcatctcgtcaactgcattgcttgagtggtctgtagctggcggctccacctgctcaagaccaagaacaaactcaagacaaggcgcacacgttgccgagaagatggccaccttttggctgtgattgatgggcttgtcgcctcgaacaaggtcatggctgcatcgtcgaggcggtactactaaataataagggtccacacgcaacaacggaagaaggacaactgcaagagccatcagatcaagaaccaaatcgcaagcacagaaaaaagctgcgaacctgtcggccacatggcttgcgtggtacaagaggataccacgcgtgtgggactcaaccgatagaagtcggagtgtcgccacgtggtcgcctccatgaagctctccctcgacgatggcttcgttgtgaatgtcacagcggaagaattcaagaaccaagtcctcaacaccggccgcgcggaaattggactgctggagtttctaaagctagcggcgtcaacgaagggagccgggagtatcctgtgtgcgctgcacccgctgcatattccggtatattggacgagcaaatcatggtctacaggcaccaactcgtcataggaagcaccgaagaccctgcacatatcgacgcgcaagacatgctcggcattgtaggttatgtgtgagaacggtgaagttaattcattccaatatatgtattcattcgacataacatcgctgcttaacaagacaacatattcatgtgtacacatccacgcgcgcaggtcacctaatcaaagcgtaggctgcacaccgcacgatcgcaccgcgctcactcacccaccacatgcacagatcctcagcaatactgcacggttcaaagcactgatcccgacccaatcttgatcataaacaccggccaaaacgtggctgttgacgaagctagtattgcgtgtcgttcgcaatacgctcgccatattatagtgttctatccccaaaaccagacagggaaatatcacttcaagctgtatgcttgttgctgctcgacatcatggtatgtcgtgagtttcaaattgcactgtgcaagtgaacaaatagaccgtttggacggcgtggttccaagtccagaggtattacagcttgttgatctgacagcgaagtcct

SEQ ID NO: 295 - DNA, 9137 bp, unidentified
  misc_feature 1..9137: note = Fanzor polypeptide
  source 1..9137: mol_type = other DNA
ctgcttcttcccttggttgcgcgcgtgctgttctcaatgccctcatcatcggcccaaattgaacgcgactttgggatggcaggcaggatggtgacccccaccgcagctcgatggcgccttacaacgtggacatggccacatttctgagctgcagcagaacttacgtgggtatcacccagtacccaaagttgtcgtcgagcacagcaaaggatcaagtaccgtcaaacgccatggtgagcatggagcgagagttggacgacgagttcggatcgttgatgaacaaaggcatcgagttgggactctccgacgacgaaaacgacggtattaccgaaatgtagcgggagcgggctggggcggacgaaaacgtgagagaacgggagcacgtgtggaagtggaaacgggctatagctgccgtggtagagtgctagccatgcatgtgcatgaaatgagtgtctttgcttttcatcaacacgttctgaccgttgttggtgttagcttcgctatgcagcttatgtaaatagtattttgttttcacctatgctttcgtgctggtcgtttgattactagcaactctgtaacacgcattgcagcgcgtacacggatcgcctcctgtgtttcaagctagattcgctcgatttgggatcgatctcgcagtattcgcgaccgtgggcacacaggcgggttgctggaccgggtggcagctgctgaaacccgcgtagttggtgtcctggctgccgctgcttcttttctgcggtttgctccagcggctcgtgataatgcggtggtggagcctcgcgtgcttgcagttgcttctgtagggcccatcgctgctcctgttgaggaagttggcgtcggcgcgaacgttgggacgatggccgtggacttgtcttgacttgatacagatattcacatcggtgttcttgaggacatcactgtattatgctggtcctgtggtacgaactcggagtgccatcagttcacggggttttgtctcggcagtcttcttggccaccacgatggctgggcgaaaccgttcgcctgggtggttgttagccctctcttgctcctgatcctgacgcacgcgaatcgcgatgtcgtgttgatctagcccgccgttgatcagctctactacgcgaacctctgtacgagcggttgttgcctcttgcactacttcaaatttgcaaatgtcgtggcgctcttacgcagcacgcttgtgctcctcctctaccaggttgtgttgcttgaccctggaagactgcaatgtgactcgcaaaacgcctggtgaggagatcaaaagagatcatctttgaccaataaaacgagatcttgtttgccaataaaaaaagcaatctgcagagcgagccaagttctcgccctagctcggttcgaatgaaaagtaagcgaaccaagcccccccccccctccggttcaggtaaaaaagaaaagaagggtgaaaccgtggttccagttcagttcgtcccaggggtgggaaattcacgaagtgtaggaaagtgtaatagacttgcgaggagagctgctggtctttctactcagtccacaaatggaaagttctgtccgtgcagctctctcaagtctaacctaaagctctacactgccagtcatactgtacaccactcgtacaattgcctctctcacattgatggtcgcacgctcttcaattgttttcgtgaacccagcagccgcagtcaacggcaattcgaagatgtcgttgggtacgccccgaggcttcactgctccagcaagttctcacttttcctttcgcaccgtcaagcgcagtcactggtctccaacctccatcgcctgttagtagcgttgtatcaagccctatgtcggggaagggtgcgccaggaaagcgcaagcgcaagtgacacccatttgatgacgggaagagcgatagaaatggcactgaaggcgcatgcccgaactcggagggcgatgatgacctcgatgaggatgacgtagattatgaggacgcccaaccagtaacgacacgtccaagcaagaggcctgacgtcgcggagcgcatgaagggcaacaagaataccagcctcgtatatgtgaagatgtcactaggttccttcttgacaggcgaggagaaactgttgctgtcattcgatggcattctcgtagacttgagcattggattgttaaatgcctacgcgctgctgaacatccacatgatacggtgtgtgacaaaggacttcccattcctcgatttgagcagaacttcgtttgccaatgcttgacagacgtaatgtttaacgacagcaacgtgcacatagacgctgaactacatatatcgttggagctatacaatttgttgagaggctctaacgcttctcacgggcgtcgcgctggtatcaagaacgggtggcaacaggcgcagctcgggagatgatgaccgctatccagcatgcactcaaaaatgagtttccttcgccggtttaataaggtgctgcgggtatggtgtagacagaagcactggtagcacacattattgccccagagtttgagcggactccacccgacattcctgatcgtcagcgcctcgacaacgtagtcaacgagtggcgtggagaagtccctcagcgtcggagtgagctggtcaacttcacggcccaccgactggtgcttctgacttatcgactcctgcaaatgattgaggagcgtaacgacagagttgagcaaagcgtttgcgctgtttaagtgacaggggcgtctgatttgaagttagactaatccaagctgaagttatgaagacgttcactgttctaccaacaaagcaaggatttggaattagtcacctcacgatagatttgattggtttccgggaactattagtccgcaacgacattgctgttcctccgtacagatcgaagtggaatgaggtgagatacatttattggagacggttcttccgtattgacaaagtggagactatagagtttggtcatctcagattcacacgagagatctcgacggacggcaagtcggtgaacatcaagattcggaagcccgaacgtgggccttccgagcccaatgcaaatgacctccaagctgccgacattggctctagatgggggttggatgcgagtaaatgcaacctcttggtcaccacaaaccaggacgacgaaacggttgtgtgctctggcaaagagtatcgcgaagacgcttacattacgaagagcagccagaagcaattgagatggatacgggatcgtccggacactggagctgcctttgcgagcatgccgacgaagaggagcatgttgctaaagcggtggcgggagtacgtcccatttatgacgcagcacctgcatctgctagtgacccccatgcagcacaaatcgtacagtcgccatcgacttcgaaggagcttctttaaaaagaagaacctatgtgagctctaccagaaacttgtatgtcacggagagcgaatttttatcgtcattgacaaccggagtaacggcgatccaaatggagcgatcaaagggaagccatcggcactcgtgcagaaattggcgctggagttgtcaaagacgtcgaactgtacggtcatcattattgccgagttccggatcagcaaagtgcactttggttaccaacaagaactgtccaagcaatacccgtatcgaaaggccgctgtccacgtacgcgcagtccacgaaagacgagccacgtacccagtttacggcttactccatttcagaaacaaaggttgttctggtatgagtgtgaacagggacgtgaatgcttcgaagaatatgctgcgcctgctcgattgtgaactcaacgagactcgcccagtcacctacacgcatcaagcaaacagatagataacaatacctttctagtgtcgctgtgtgcctatctaggggtgaggaagattacattgtgatagccggctcagaaattagcccttttggactctgtaggctacgtatctataggacacccttaggagaataatgggttaaacaaaggctcaatgaagcctggttgatttctgcatgaaatatttttcaaaacggtgatgtcctcctgtggatgaatatacttgtctttccgacagatagctcagcacgattgttgtctgctcgctttgcagaccattttgaccaattttaacacgtaaagccttaattgtgtccaattaaaatggttaaatgtaggtttgacattctgacaccttccgacaaatatgtgtctgaagtatttccaaaatatcaatatcttcatgcaaacaacaactgtaaaacgtatttttcaaatataccagccattcgtacaatgaggagtggccctaatgtaggaacactgaagaggatgaggtcgttggttggatgtccaccgttggtgtacactttaccagaagagtaacgtagccatggatcgtgcgtgatgcgtgggacataagcaaaataaacaaaggctgtgcttatgtcttcaatatgccacgggaagaccgcaaggtagcctgagtgctgtgcagctggaataaagagatcgcgcctcacgttgtggacgtcgcgacgctggaccatccgacgcgggagcggcttgaacgcttgcaggagctcctgtttagcacatgcacaggacgcaaggaacaccggttcaacgtgagtagaaaagtgcttggcgcttacctggtacggtactactcgcagcttaaagcgctagttcctgcagtgccgatcatcatcctgcttagtatctgcgggcatctcgtcaactgcattgcttgagtggtctgtagctggcggctccacctgctcaagaccaagaacaaactcaagacaaggcgcacacgttgccgagaagatggccaccttttggctgtgattgatgggcttatcgcctcgaacaaggtcatggctgcatcgtcgaggcggtactactaaataataagggtccacacgcaacaacggaagaaggacaactgcaagagccatcagatcaagaaccaaatcgcaagcacagaaaaaagctgcgaacctgtcggccacatggcttgcgtggtacaagaggataccacgcgtgtgggactcaaccgatagaagtcggagtgtcgccacgtggtcgcctccatgaagctctccctcgacgatggcttcgttgtgaatgtcacagcggaagaattcaagaaccaagtcctcaacaccggccgcgcggaaattggactgctggagtttctaaagctagcggcgtcaacgaagggagccgggagtatcctgcgtgcgctgcacccgctgcatattccggtatattggacgagcaaatcatggtctacaggcaccaactcgtcataggaagcaccgaagaccctgcacatatcgacgcgcaagacatgctcggcattgtaggtcatgtgtgagaacggtgaagttaattcattccaatatatgtattcattcgacataacatcgctgcttaacaagacaacatattcatgtgtacacatccacgcgcgcaggtcacctaatcaaagcgtaggctgcacaccgcacgatcgcaccgcgctcactcacccaccacatgcacagatcctcagcaatactgcacggttcaaagcactgatcccgacccaatcttgatcataaacaccggccaaaacgtggctgttgacgaagctagtattgcgtgtcgttcgcaatacgctcgccatattatagtgttctatccccaaaaccagacagggaaatatcacttcaagctgtatgcttgttgctgctcgacatcatggtatgtcgtgagtttcaaattgcactgtgcaagtgaacaaatagaccgtttggacggcgtggttccaagtccagaggtattacagcttgttgatctgacagcgaagtcctttgaaatttgttcccacgtaattgaagttgtggagtctttgaaaggatctaatcgcgttgtcaataccgataatatctacacctcctgcctgctactagaatcactaaggtcgattggcatgtatggtcgtggtacagtgctcacatccagcaaacacttcccccacttcacaatgatccgaaaagctgatggaaagcctagaggctacatgaaacaaggcgtgtgcttagagtaacatattgtagcggccagttggatagattgctctattgtgaatacagtctctaatgttgacgcctcctcttcctctacggtatatcgtcgcataaaggaggaacatgttgcgtttaacgtcccgacctgcctcggtgaatacaacgcggggatgcagggagtcaaccgtcatgatcagcttcgcggtcggatttcgcttgccgatggtcactcatttcagaagtggcataaaaaattagcaatggctatgattgatatcacgaggtgtagtgcgtatgcatgcgataacttggcacgtgatacaagcgagatggatgttgcacagcctcgcaataatgcaagggcaagcgcccgtgacggtcaccgggcgtttgtcattccacttgtgcgagaattattcaatggagattggaagaagtccattgacagtgatgacgtaattgtgtacacttcgaacacaaaacccatgaccactgctgccaatttgaccagaaatacgaatgagttagaaacgccagcacatacatgtgtagcaaaagagtcgtggcttgtgttacaaggaaggagtcgggcaatgcacaaatggactgtttgtaaattcgagggcagggatgacacccagaaaacggattactgcgagacacatcgagttgcactctacaagcgtacctatcctatcgaccacagaaacccgcacctgtgtcagcagcaaaattggacgtgctggcaaaagtatcatttgttctacttgccaaaacaggtctatacagttgacggaaatctgagaaggtcgtctccaatttgtaaagcccagtgttcgttcttgaaggagcgtcgagaccaggataatactgaagagatcagcaaccacgactatcattcggctcatatatagtactgaaggtaaaagtagacactcaatacattgtgtgcacttgaactacgactgaaaaccagccagttacttgtactcacagcatcctccctccttgtacattgaccagtgcaatgtgcgccgctttgttgcctttcgtctaattatagagcacatgcatggtgctgcatgttaccctcagcaccaatgtctcgatgctccctctctaggcggctccagcacctcgatgtcacgtagaattctgtcgccgggcccgtgatgtcgagatcgccttgcggtgaacccgaggcgttccacgggctgtcgctgtcgctagttcgcccctgcaacgggcgccgtctgaaattctgcgtccttgctgcctttcgccttgtagggctgcgccatcatctcgttctgtcggtgtctagcgtgtggctgctgcatcgggcgccgttgtgccgcacatgtgcatgatgtagcacaataatgtcgggataggagccaagcgttacgttcttgttggtgtcggcgcgagtaacttgagagacacaatagcatgagcgcgccgtgtctgatcaggatttagatcccacgctgtgattggcagtcaacgctgacattttcctagagaggcgcaaaaattgttgatcaaaagtcggtgccgtatcttaacttcactataggctagattagtctgctaccttcttttggaaaaatatcttcatgtatcattctggtatcgatagggttaaaccactagtgctacgcgaaggctggaataggatacagataatccgagctacactagtgacaataaagaaacgtaagtacaactctattgcaagcccacagcattcatctagagaacgagtgtagctctaacgtcatcgaagttcttggcgtcgaagtaagctttattgccttcgaactccgtgacacggcacgcttgcagagccactattttgtattggtgcctcgtggttacagcgtcaaccccccccccccccccccggagtgtgcagcacacctcgcttttggtgctatcaatcatcaaacaactgatctaatcgttctctggtctgtcgaccatcatcgccattgagtacctcatcgccaaatgcaaaacccttcgggtcggcaacacagcaatagtaatagaccaacgcgataggagggtgtcttgtaccagtgttgagcctttcccataaatcgaacctcctcatccgtaaaattaacacaggacagagcgcgaccttcaagctctccaagtctatcctgaataccccgttgtttttgcgcgcggcgggcgcgggccttgccgttcgttctcgaggtgctgctcccgttccagcaaactttcattggctctttgggtacggcgcttcttgctgcggtcttcagtgtcggccattgccttcccacgttgttattggtcgtcagccctctacaaaacaaactgttggataaagcctaaatcatacggcgccatgctcccccgactgcaccaatttgaatgcgctcccatcagtatagtcactacaaattatccatacaatcatgctctgtagtagcaaaatccccatctatgctgcccgagcgtcaagtacccaaatcgattcaccggtaaaactatcccgtcgcattaagatttttgaggcattttgctcgatggttcgcgaaagggttaacgcgccgaaggcgcatttcttgcagcctgtcggcgtcagtgccgacagcacaaactgcgtgtcgtggtcggtccaacggcactggtgaattccagttcaacgtgcttcgtgtcggcccactgcttcgtgcagctcggacagtgcgtgtgttgctgatgtccttgcagcatatgtgactcgcaatccgttcctcatcaacaagctcatcaacatggcttgtgcaccttgcagggcagagccgccgtctttctccgagctcaatccagaacattcaggccagtgccaagagagtcatcaacagggcggaaggagacgcagccagttcgcgcaactccagacgacgcagaagaaccccacgccacagcagcgttccaggtctcctgctatgagccgcatttgcctgccggcgccaacgttcgggctcagttgcgagcgctgaacgtacgactccttcgcgccat

SEQ ID NO: 296 - DNA, 11690 bp, unidentified
  misc_feature 1..11690: note = Fanzor polypeptide
  source 1..11690: mol_type = other DNA
cttgatcggcgccaacttcacggaggccgccaacaagatcaacgagacggagatcaggacgctgagtgacgccctgaaggccaactccacctgcggctacgacttgcgagtgatgacggaccgcacgtgacgaggaaacgcagcataatgcgggtcaagatgagaacgtgatacttgccctcatgctgtccacatcgtgcacacggacggatgctgagtctgtcggtgttgatgcactttcagtcgtcgaccgtaatcgcttccagtttttgagggacgcgaacatttttcttgagtcagggaagaagctggtgttttacctggtgcgtcttcgttatcgagctccgattctccggcagaacgaccagtcggaagtgaaacaattgatgcagagcatgatctggtattcgatcaccggcgcgaagatcgacggtggcaagttgcacgatgccgagtggaccaagaagctggatttcttgaatcctgccaacgaaacactgtcgcagctgtgggaaagtggagagagaagcaccagctcggagcacgaacgttttgcacttattggctggcctgcttccgccgacataatgaacgcagtcgcattgtttggagaagtgtcctgtgtgcctgtaattcttgcacagtgctacaacgctccgaatgcttctcagcgccgaacttgatgaaaatggatgccatttcgctcaaactctcaaaatcttcgagaagagcaatgcatctgttgagtttgtacccctttgccgggagctaggtgctgccatcgttgacttgggtgacactacactgatccaggcgtttttcaagaagtatgttgcccagctgaaagacaaggacagacagttatttctccaatggcttccagctctcgtgcgcgcatttggatgggcatacgttagtgctgccacactgaatgccatcgacgtgcaatcaactgaaattcgctcggatcgagctttggaactcgcaaacacactccatgacaacgatgctgcacttctagctctcgtagcgtttgcgctgaagaaagctcacgcacggtgctctggccacgccgatgcattcgtatcttcgggtaagatcatcacacttttaaagcttgcgctggcgtgtggaaaccctcaaatatttgccggtctatcaaccatactgaacaagatcgatggcaatcttctccacacagtgattaatgcgctctcgaaatacgtcaatgactcgagtttacctgaacaacgtgctacgctggcctcacttgcagcgagacgtcgtgaatggctattcgctgagatcgaagacacgaagcaaccactggacttgacgaagcgcgagatctaggcaatgctagccgacaacacaatcggctccgcgaagtacttttcaatcgtcgctgactttttgaaggtgtcaccgatgagcacgagattcctggggttaaggctctacctagtggacacatcgttcgagttcaagtcagtactcttggggactcgccatttcgcgcctcagtatgggggaccagatggcggaatacgcggaccactttaccggtggattggtgacgtcctgggggggggggggctttggtttgagtcgccataaccttttcggggctacaacagtgatgtcaaatggatgatgagggacggtctaaagttgtagcgggagtagtgcgtgccgcacttcatgcatgcggcaaccaatactgttttcggcatcgtcggtgacaacagctcgtccaagaacccagccatgaccgacatccttcggcgcatcatcaaaacgatgtacaaaacgcagcacgtcgaaggaaagggcactctattaagcgagttatgcagcgttatgaacccggagggtgtgcatccacgctagctcttaaacttccgcacgcatcgattcctgggactcacgcgcgtcgtccgacgcattcttctactctgggatccattggtgcaatggtacgaggagcgggccacaaaagcccgacgtgagaacgtgatgccgccggagtccttcccactagctcgggaaaagatggaatgctctcactgctggagccgatctcgaaactaaatcagattggacaggccgagtcggggggaccaatgcaacgtgcttcttggactctacaagctccgaatatccttgttggacatcaccacagccttgaaggactgaagacggagaatcggttcttccgaccggatgagctgtacgatctcgcatcgacaacccgttcgctacttcacaaagggtttcgtcgggttttcttccggcggtacaccgatcgtgataccatgaacgtctgctcctttgcctttgagatgcaactatttcttcaccccaacttcaagcatccatatggagcgctgataaaggtgttaccaaggtcaatatacaggcaggtgcctcccagcaggtagctgaccgacactacacgaagattcgacgcattatcattgacagcgtccgcagcatcatgacagcggctgacgccgagccgacgtcgactgatatcgttgccccaccgccagctactgggttatcagaggacttcgtggagctcttcacggagacagcgaacgaggtggcaccaccacatagactgcggtgcacgagcaacgcatcgacgatgagctcgaccgctggctgacaacgcctacttcgcttcaagcgattcaacccggtgcgtttgactcagttctgagcttctggaagcgccagcaagagctgggcaacttcctgcttcttcccttggttgcgcgcgtgctgttctcaatgccctcatcatcggcccaaattgaacgcgactttgggatggcaggcaggatggtgacccccaccgcagctcgatggcgccttacaacgtggacatggccacatttctgagctgcagcagaacttacgtgggtatcacccagtacccaaagttgtcgtcgagcacagcaaaggatcaagtaccgtcaaacgccatggtgagcatggagcgagagttggacgacgagttcggatcgttgatgaacaaaggcatcgagttgggactctccgacgacgaaaacgacggtattaccgaaatgtagcgggagcgggctggggcggacgaaaacgtgagagaacgggagcacgtgtggaagtggaaacgggctatagctgccgtggtagagttctagccatgcatgtgcacgaaatgagtgtctttacttttcatcaacacgttctgaccgtgtttggtgttagcttcgctatgcagcatatgtaaatagtatttcgctttcacctatgctttcgtgctggtcgtttgattactagcaactctgtaacacgcattgcagcgcgtacacggatcgcctcctgtgtttcaagctagattcgctcgatttgagatcgatctcgcagtattcgcgaccgtgggcacacaggcgggttgctggaccgggtggaagctgctgaaacccgcgtagttggtgtcctggctgccgctgcttcttttctgcggtttgctccagcggctcgtgataatgcggtggtggagcctcgcgtgcttgcagttgcttctgtagggcccatcgctgcacctgttgaggaagttggcgtcggcgcgaacgttgggacgatggccgtggacttgtctcgacttgatacagatattcacatcggtgttcttgaggacatcactgtattatgctggtcctgtggtacgaactcagagtgccatcagttcacggggttttgtctcggcagtcttcttgaccaccacgatggctgggcgaaaccgttcgcctgggtggttgttagccctctcttgctcctgatcctgacgcatgcgaatcgcgatgtcgtgttgatctagcccgccgttgatcagctctactacgcgaacctctgtacgagcggttgttgcctcttgcactacttcaaatttgcaaatgtcgtggcgctcttacgcagcacgcttgtgctcctcctctaccaggttgtgttgcttgaccctggaagactgcaatgtgacttgcaaaacgcctggtgaggagatcaaaagagatcatctttgaccaataaaacgagatcttgtttgccaataaaaaaagcaatttgcagagcgaaccaagttctcgccctagctcggttcgaatgaaaagtaagcgaaccaagcccccccccccccccccctccggttcaggtaaaaaagaaaagaaaagaagggtgaaaccgtggttccagttcagttcgtcccaggggtgggaaattcacgaagtgtaggaaagtgtaatagacttgcgaggagagctgctggtctttctactcagtccacaaatggaaagttctgtccgtgcagctctctcaagtctaacctaaagctctacactgccagtcatactgtacaccactcgtacaattgcctctctcacattgatggtcgcacgctcttcaattgttttcgtgaacccagcagccgcagtcaacggcaattcgaagatgtcgttgggtacgccccgaggcttcactgctccagcaagttctcacttttcctttcgcaccgtcaagcgcagtcactggtctccaacctccatcgcctgttagtagcgttgtatcaagccctatgtcggggaagggtgcgccaggaaagcgcaagcgcaagtgacacccatttgatgacgggaagagcgatagaaatggcactgaaggtgcatgcccgaactcggagggcgatgatgacctcgatgaggatgacgtagattatgaggacgcccaaccagtaacgacacgtccaagcaagaggcctgacgtcgcggagtgcatgaagggcaacaagaataccagcctcgtatatgtgaagatgtcactaggttccttcttgacaggcgaggagaaactgttgctgtcattcgatggcattctcgtagacttgagcattggattgttaaatgcctacgcgctgctgaacatccacatgatacggtgtgtgacaaaggacttcccattcctcgatttgagcagaacttcgtttgccaatgcttgacagacgtaatgtttaacgacagcaacgtgcacatagacgctgaactacatatatcgttggagctatacaatttgttgagaggctctaacgcttctcacgggcgtcgcgctggtatcaagaacgggtggcaacaggcgcagctcgggagatgatgaccgctatccagcatgcactcaaaaatgagtttccttcgccggtttaataaggtgctgcgggtatggtgtagacagaagcactggtagcacacattattgccccagagttcgagcggactccacccgacattcctgatcgtcagcgcctcgacaacgtagtcaacgagtggcgtggagaagtccctcagcgtcggagtgagctggtcaacttcacggcccaccgactggtgcttctgacttatcgactcctgcaaatgattgaggagcgtaacgacagagttgagcaaagcgtttgcgctgtttaagtgacaggggcgtctgattttgaagttagactaatccaagctgaagttatgaagacgttcactgttctaccaacaaagctaggatttggaattagtcacctcacgatagatttgattggtttccgggaactattagtccgcaacgacattgctgttcctccgtacagatcgaagtggaatgaggtgagatacatttattggagacggttcttccgtattgacaaagtggagactatagagtttggtcatcgcagattcacacgagagatctcggcggacggcaagtcggtgaacatcaagattcggaagcccgaacgtgggccttccgagcccaatgcaaatgacctccaagctgccgacattggctctagatgggggttggatgcgagtaaatgcaacctattggtcaccacaaaccaggacgacgaaacggttgtgtgctctggcaaagagtatcgcgaagacgcttacattacgaagagcagcaagaagcatttgagatggatacgggatcgtccgggcactggagctgcttttgcgagcatgccgacgaagaggagcatgttgctaaagcggtggcgggagtacgtcccatttatgacgcagcacctgcatctgctagtgacccccgtgcagcacaaatcgtaccgtcgccatcgacttcgaaggagcttctttaaaaagaagaagctatgtgagctctaccagaaacttgtatgtcacggagagcgaatttttatcgtcattgacaaccggagtaacggcgatccaaatggagcgatcaaagggaagccatcggcactcgtgcagaaattggcgctggagttgtcaaagacgtcgaactgtacggtcatcattattgccgagttccggatcagcaaagtgcactttggttaccaacaagaactgtccaagcaatacccgtatcgaaaggccgctgtccacgtacgcgcagtccacgaaagacgagccacgtacccagtttacggcttactccatttcagaaacaaaggttgttctggtatgagtgtgaacagggacgtgaatgcttcgaagaatatgctgcgcctgctcgattgtgaactcaactagactcgcccagtcacctacacgcatcaagcaaacagatagataacaatacatttctagtgtcgctgtgtgcctatctaggggtgaggaagattacattgtgatagccggctcagaaattagcccttttggactctgtaggctacgtacctataggacacccttaggagaataatgggttaaagaaaggctcaatgaagcctggttgatttctgcatgaaatatttttcaaaacggtgatgtcctcctgtggatgaatatacttgtctttccgacagatagctcagcacgattgttgtctgctcgctttgcaggccattttgaccaattttaacacgtaaagccttaattgtgtccaattaaaatggttaaatgtaggtttgacattctgacaccttccgacaaatatgtgtctgaagtatttccaaaatatcaatatcttcatgcaaacaacaactgtaaaacgtatttttcaaatataccagccattcgtacaatgaggagtggccctaatgtaggaacactgaagaagatgaggtcgttggttgggtgtccaccgttggtgtccactttaccagaagagtaacgtagccatggatcgtgcgtgatgcgtgggacataagcaaaataaacaaaggctgtgcttatgtcttcaatatgccacgggaagaccgcaaggtagcctgagtgctgtgcagctggaataaagagatcgcgcctcacgttgtggacgtcgcgacgctggaccatccgacgcgggagcggcttgaacgcttgcaggagctcctgtttagcacatgcacaggacgcaaggaacaccggttcaacgtgagtagaaaagtgcttggcgcttacctggtacggtactactcgcagcttaaagcgctagttcctgcagtgccgatcatcatcctgcttagtatctgcgggcatatcgtcaactgcattgcttgagtggtctgtagctggcggctccacctgctcaagaccaagaacaaactcaagacaaggcgcacacgttgccgagaagatggccaccttttggctgtgagtgatgggcttatcgcctcgaacaaggtcatggctgcatcgtcgaggcggtactactaaataataagggtccacacgcaacaacggaagaaggacaactgcaagagccatcagatcaagaaccaaatcccaagcacagaaaaaagctgcgaacctgtcggccacatggcttgcgtggtacaagaggataccacgcgtgtgggactcaaccgatagaagtcggagtgtcgccacgtggtcgcctccatgaagctctccctcgacgatagcttcgttgtgaatatcacagcggaagaattcaagaaccaagtcctcaacaccggccgcgcggaaattggactgctggagtttctaaagctagcggcgtcaacgaagggagccgggagtatcctgcgtgcgctgcacccgctgcatatgtccggtatattggacgagcaaatcatggtctacaggcaccaactcgtcataggaagcaccgaagaccctgcacatatcgacgcgcaagacatgctcggcattgtaggtcatgtgtgagaacggtgaagttaattcattccaatatatgtattcattcgacataacatcgctgcttaacaagacaacatattcatgtgtacacatccacgcgcgcaggtcacctaatcaaagcgtaggctgcacaccgcacgatcgcaccgcgctcactcacccaccacatgcacagatcctcagcaatactgcacggttcaaagcactgatcccgacccaatcttgatcataaataccggccaaaacgtggctgttgacgaagctagtattgcgtgtcgttcgcaatacgctcgccatattatagttttctatccccaaaaccagacagggaaatatcacttcaagctgtatgcttgttgctgctcgacatcatggtatgtcgtgagtttcaaattgcactgtgcaagtgaacaaatagaccgtttggacggcgtggttccaagtccagaggtattacagcttgttgatctgacagcgaagtcctttgaaatttgttcccacgtaattgaagttgtggagtctttgaaaggatctaatcgcgttgtcaataccgataatatctacacctcctgcctgctactagaatcactaaggtcgattggcatgtatggtcgtggtacagtgcgcacatccagcaaacacttcccccacttcacaatgatccgaaaagctgatggaaagcctagaggctacatgaaacaaggcgtgtgcttagagtaacatatcgtagcggccagttggatagatggctctattgtgaatacagtctctaatgttgacgcctcctcttcctctacggtatatcgtcgcataaaggaggaacgtgttgcgtttaaagccccgacctgcatcggtgaatacaacgcggggatgcagggagtcgaccatcatgatcagcttcgcggtcggttttcgctagccgatggtcactcatttcagaagtggcataaaaaattagcaatggctatgattgatatcacgagatgtaatgcgtatgtatgcgataacttggcacgtgatacaagcgagatggatgttgcacagcctcgcaataatgcaagggcaagcgcccgtgacggtcaccgggcgtttgtcattccacttgtgcgagaattattcaatggagattggaagaagtgcattgacagtgatgacgtaattgtgtacacttcgaacacaaaacccatgaccactgctgccaatttgaccagaaatacgaatgagttagaaacgccagcacatacatgtgtagcaaaagagtcgtagcttgtgttacaaggaaggagtcgggcaatgcacaaatggactgtatgtaagttcgagggcagggatgacacccagaaaacggattattgcgagacgcatcgagttgcactctgcaagcgtacctatcctactgaccacagaaaaccgcacttgtgtcagcagcaaaattggacgtgctggcaaaagtatcatttgttctacttgccaaaacaggtctatacagttgacggaaatctgagaaggtcgtctccaatttgtaaagcccagtgttcgttcttgaaggagcgtcgagaccaagataatactgaagagatcagcaaccacgactagcattcggctcatatatggtactgaaggtaaaagtaggcactcaatacattgtgtgcacttgaactacgactgaaaatcaaccagttacttggactcacgacatcctccctccttgtacattgaccagtgcaatgtgcgccgctttggtgcctttcgtctaattatagagctcatgcatggtgctgcatgttaccctcagcaccaatgtctcgatgctccctctctaggcggctccagaacctcgatgtcacgtagaattctgtcgccgggcccgtgatgtcgagatcgccttgcggtgaacccgaggcgttccacgagctgtcgctgtcgctagttcgcccctgcaacgggcgccgtctgaaattctgtgtccttgctgcctttcgccttgtagggttgcgccatcatctcgttctgtcggtgtctagcgtatggctgctgcatcgggcgccgttgtgccgcacatgtgcatgatgtagcacaataatgtcgggataggcgccaagcgttacgttcttgttggtgtcggcgcgagtaacttgagagacacaatagcatgggcgcgccgtgtctgatcaggatttagatcccacgttgtgattggcagtcaacgctgacattttcctagagaggcgcaaaaattgttgatcaaaagtcggtgccgtatcttaacttcactataggctagattagtctgctaccttcttttggaaaaatatcttcatgtatcattctggtatcgatagggttaaaccactagtgctacgcgaaggctggaataggatacagataatccgatctacactagtgacaataaagaaacgtaagtacgactctgttgcaagcccacagcattcatctagagaacgggtgtagctctaaagtcatcgaagttcttggcgtcgaagtaagctttattgccttcgaactccgtgacacggcacgcttgcagagccactgttttgtattggtgcctcgtggctacagcgtcaacaaatccccccccccggagtgtgcagcacacctcgcttttggtgctatcaatcatcaaacaactgatctaatcgttctctggtctgtcgaccatcatcgccattgagtacctcatcgccaaatgcaaaacccttcgggtcggcaacacagcaatagtaatagaccaacgcgataggagggtgtcttgtaccagtgttgagcctttcccataaatcgaacctcctcatccgtaaaattaacacaggacagagcgcgaccttcaagctctccaagtctatcctgaataccccgttgtttttgcgcgcggcgggcgcgggccttgccgttcgctctcgaggtgctgctcccgttcctgcaaactttcattggctctttgggtacggcgcttcttgctgcggtcttcagtgtcggccattgccttcccacgttgttattggtcgtcagccctctacaaaacaaactgttggataaagcctaaatcatacggcgccatgctcccccgactacaccaatttgaatgcgctcccattagtatagtcactacaaattatccatacaatcatgtagcaaaatccccatctatgctgcccgagtgtccagtacccaaatcgattcaccggtaaaactatcccgtcgcattgagatttttgaggcattttgctcgatggttcgcgaaagggttaacacgctgatggcgcatttcttgaagcctgtcggcggcagtaccgacagcacaaactgcgtgtcgtggtcggtccaacggcactggcgaattccagttcaacgtgcttcgtgtcggcccactgcttcgtgcagctcggacagtgcgtgtgttgctgatgtccttgcagcatatgtgactcgcaatccgttcctcatcaacaagctcatcaacatggcttgtgcacattgcagggcagagccgccgtctttccc

SEQ ID NO: 297 - DNA, 21005 bp, Chlamydomonas sp.
  source 1..21005: mol_type = other DNA
gtgtaaaggggacttagttccacttgtcactgaattttgtagtagatacaaggatacaatcaatgctgggaaaattttagtatcagttgacgaatgtgggtttagtgagcgtctcaagccacattatgggtattcccctgtaggaaaacctgttatcgttaaaactattggtgggtgggtacaccatagtttgttgatggcagttttttcagatggtaggaaggagttcgttgtaccgtacactccagaaagcggtttcattttagtattccgtcgagtgtaaagtgactccaaattaattactccaaatgtcgctgatgtgcgggggactctaccgtgagctagacaccaccgaccagtggtcgcgacaacattatgtcgcactccggtgtggccgtacacaatgagacgtttcatttaagtgttccgtcgagtgtagttgtacatgtctcattttcacatgcggtaagtgcaacccacgagtttgatttgttctctattttcaccgaatgaacaatcgcacgtgatcttcgcaacagtgcacgccctaaccatatcatcgtattcatcctctccccaaggatacaaggattgccgcatccacacgcccggtatgtcggacgcgactagcaagtcaccgttccgtatgtcccctccctgtacacacactagcacccccccttgccagcagagttcacactgacccgccctagtagagagtcttttccaggcaggcgcgcgatcacggtgcccacctgaaattccctccctccgtcgttcgtatgcactgtactcacaacgccgaagacgcgcgggtcccgagcgcgacaacaaagcgtcaccaatggcagagcctcgtccacgtcgaggaggtcctcgcacccgtcgaggtcgcagtacgcgccggtggccaccaccacagcgccaggccgcaaagcaagaagatcctccccctccgccacccggcaccgatgctagcctgtgaagttaagcactccggggctgaaggaccccgttagacgcgtggacaccccatcttctgacaggaagaccaagtctttggaggcgacatcaccaaagacagcccacgacgaggggcccgggaacgagagcgctccgcctagacgcgttaggtccgcattaagttcgagcgtgtacttgttactctgggctgctcggtatccgcacacgcggttcatgacgttgatctctccctcgctggcagtctgtgcacctgcaccgatcgcgagggagagagcacctcccgccgtcgcgccggcgccgatggccactccccctttggcacctacactcgatgcggagcctatcgccacggcatcctcgacgttccccgcgccaacgtctgcggcgcatcccacgagagtattcgccctgccggagacaattgtcgcgccagcgagagctcccacgaccgtcgtcgcgccaccgcccaccagcgaggtcgccgacgagtacccgatgacgcagttgtaagaggaggctaggcgtaaggaggactcgccccctacgaccacattgtatgagcccgtgcgtgaatacaacgccacctggtaccccaagaaggagttcatgatgcctacggattgtggcgctgcgttgtaaccgaccgacagagactgattctgagtcgtcgcgatccccccccccttcgattggtcctcgcccgtgagattcgcgttaccggaagaagatatagacatttattggaaaccactataatgattatgcagaatttgtcatactcggccatacgattttgttaaattctgcaagcacgtgtaccattttattaacactagcttgaatttgtttggtgtctcccccatcattgatgatgtatgtgttgacgcgcccgataatgtaatggactaacaattctgccatgttgtcagaacacaacgattggtaatcgaccttgatgaatttttcatcattcaatatcaattcgaggccattatcggtaaatgtgactgtaaaaaccttgccgtatgtttctgcgattttttttagatgttgttccataagtttcttcaagtagtcggacacgcaatgaggatgtgtttgcgcagccatgttttattacacatctgtcatacattttagaccaattttaattgggtgtacgcgcaaagtacactcgacggaacacttaaatgattgacctacattcggcggaacagtacaatgaaacatgtatcagatggaaataaatgtacaacatcgccgttagaaatttggcgttaagaatggtcactgacttgggatttcgtacatggtgtccaaaacttatttgagaaaaactgtattcatgagcttcagcgcctccacggcctcggcctcgaggtaggaaatcgggtacttcgtgacgcactgtgcatggttggtcatcctcttcggattggttgagggcgccgccttcttgggaagaatcttctccggatgtgtttgagcccctaagccaggatgcggtgtttcgatgaatctgaagacgcccatgtagattggtttgttccctgcacaaaatatggtttgccacatcatggacgcgacgttgctgtacatgctcatccggacgagcaccacttcgaagtcgccggtgattagcatgttgtacacatgcgggtcgcatatgtggttcgggacgaagaccgtgtactccttgccccccttgatgatgtacacactcaacgcgtggatgccttgctggctgtagatggagaggatcgatctcgtggcgaaaagtatgtcgttcacgtaaggattcattgatgcaatttacaattctcacttgagaatatccatcatttatacaagttttgtgtgtttgcatgaattgaatcacccaaatagtgacacgcctggcaccgggtcgccgtagtagttggaagggtgcgccgcaattacaaacatacgttgttgcaccccccccttgctgattgtattgttgctgtacacgtgtctgacgatctcaaggtctccgctatcggctatctcaaaaccgtaagagactgtaacgttgttgttgctgaacccgcgctcgatatgaaaccctcctcctcctacacgccaccgagaaggtcgcgtaacaccgtcgccgtccgtgtactgctgaatccaacgcaaagaccgctccgattgattgccgctacttgacccgacgactatccctgcaccgctaatgtcgttatctacgtatgcaggtactgtagggtccagaggatgcgcgagcttgatgagcttgtcttgaacgactagctcgacggaggtgatggtctctataccgccccgcacgtagacgttcccattcacggtgatgctgttcgatccgaccgtaataacgtccggcgtcccgaaggcgccgatggagacggtagacgagagcgactggatctccaggttggagtcgctcacgaaacgcatcttcccttccgcgatggcgcccacgagcgggtctttgttgtcatgtgtctgctggtttgggagcgatcccatgaggaggtaggatgccgctgggtcctcaggcatggttgtggtggcactgtcgcggaagaaccagagggagctgcgcgccactagggacatgttttataaaggttctcgcaaatattccgagtagcctctttggtaaacagttcaacccccaacgttgcccaaaagcaacgatctgcagttttttcgagtataaaaggtgtgtctgtcccccaacataagagtctgattatgtccaacaacatccagaatctcgctgataacggagtatttgtcgtcaaacccgattggataacagaaacaatcagggaccaattgcgcgaagagtttatccagacttgccgcgagtttccagagtttgaaaaacccaaggatgacgtgcacgttctgggtggattttcggcactcggtaatccggcgtcgtttcacaacccgtttgtgaggaaactaagagaatctgttatgtggacagtcgcaacgattctgaaaccactcgccaatggaagaaatctggagcagattatggacaggatgatgttcagaacccgagggaaggttgtcgcaagcgaaagttggcacagggacgaagctcctgaagccgccgatgaagatgacgtttttggagggtggatcaatctcgacgatacggatcaccatttttcgtgcatcccaggatctcacaagggcgtttcaaagcattcggggtttggaaaagagaaagtggtggacagtgctaacaagcagaagatccgggtcccaccaggccacatcattatatttttcgagcggattctacacgaagtgaacaggtcaaatgttccgccaaaagggatcgttcgtttgtttctgggttggcgtctcaccaatagcacgcggagtctctacgatttgaaggacattttcatgaaccaagctgttccaaaactgaagtcggatcagacgcccgcgatgtattcgatttatcacagaaatgtgtgggtcgacgcactcgagagtttttcggcaaccttcaaagagaattgtatcgtcaaagacaatctcaaaggcagagacgtcaaaatcgtcccgatgcacatgaagtcgctgagaagcattggcgtccccatgtacaaagagtacacgtcaagagagtgtctcttatacgttccgggaaagcgatgggatttggaagttccgtgctcagagacttctagggtcgataccctcgggttttaatcatcgttgacgcgccggtacatgaccgtcttgcttacgatgagtgagtgcaaccatgttgcaaagtcgggcctcacagcagctgcatcgttgagatgttctgaactcatcgacgtcctccatgataacgttttcgcggctacgaagctcgaaacgaatagcttggagagggccacaagtccgcctagagattggtgtcgcccccagacctttccaatcaccaaacccgatgggcaagaagaattggcgcggcacccatgtagaatctggcgtacgccccaatctgttgtcttgagacaacggacctgtatctggtttcaggggatatcattcaaattatactgtatacttgcgaatgtaagccacatgacagtgtacagtcgacggaatactaaaatgaaaccgcctcgtgtacggcacaccttacggtgtaacctaatggtgtagcaacccacggggcagtggaacaccaatacgattttgaatcaacaaattgcaggatgttaacgagaatatcatggttcttttttagatcacggctctccatcctgcagactccgtatcgttcttttgtcggtactttcgagagtgtccattgaaggaccagccgcacttaagcgatcgcctcttccccagtaccgtggcccaaaagaacacggggtctttgttgatgtgcaatgcgtcatgtaaggaggtttctttgctggacgggtcattttataggaccatccactcatacaatatatgattgtcaccgccttataccgtttttttgatgtttcattttagtattccgtcgagtgtagtagataaacacagattgaaataaatgtcaactcaatgcacaaccaaccgcaagaggcgttgtcaactcaatgcacaaccaacctcaagaggcgttgttgcatttttcaaaagtactcaaaatttacgattatcaaccaaaacattgttgcagatgtaatactttggtgtgaatcgaaaagaatgtgaatttgtaagcaaactttttgagacgaacaaggatttgttgaaattgtttttattgtttttacacaaccgtcaacattgtgagcgcattgattcttcagacatgcacgcccatgaaatgattggagagcacagctcggaagagcatgcggtagtccgggactgcagagacgatcatgaaaatgaacaataacatgtccgcgaaggcccgtatcccccggatgcccacgtcgcggtagcggagacttctgtttctctgcaaagacgacgctaccatgataccgacagttgcggatagaaggacggatagggcatagtcgtatacgagcagcttcacgagcgtcgtgctgaacacgttcacaaaggttccggttttctcgatactggtaacgtagttggagaagacaacgaggagaatgataaagcaacttgtcaacacgacgtttatcacgaccgcaatgatcacgaggtattgcaggtctggtggggttttgtttgactcgatgagcgcgtcgtctaggtacatttttttgacgaactgcatttggaatatcctctccgcgatgtacacggatatccatatgatcatgagttgcaacaatttgaaaagggatagtataatcacgctagatttgtccattgtctcttctttacgtagagtgtaagtgtatttactctggttgtacacttgttttcaaaaataaaatgaatattatttaagaaaactattcaatgtcaggcattcgtggtgaagacattgacgacgaacatgggcaacacaacattcctccaagcgtatggggccccccattatggaaatctatacactacgttgccctggggtacccagcaaacccacgcctgaggagagacgggtctgcaaaacgttcttcgaccagatcttggaacacttgatcccgtgccacgtgtgcagagagaactaccacaggcatcttgtagagctccgaggtgcgtggagtgacgaaaaaaggttctcttcccctgatggtttgtttgattggacggtcgcgctgcacaaccttgtgaaccgagacaccagtaaacccattcagaattctgctgagatgcgtcgccatctcattcatgcgggcgctaactcatgtcctccgaaccaacgccgtcgttcaggcggaaacaatgattattacaacaacaacaacaacaacaacaacaaccattggttggccatatttgctttcttgaccggcgttggcgtcgccatttccgttatgttgttaatattgagatctcagagaatcaggtttccgggagtcacgagaacacgaggtcgatgagcgtgaacatgaacatgctccctatcgccaccgccacggttacaatgcctagagaaagcggtgttgcggcttgattgttatgcgaaagacctgacggagaaagaccaaatggcgtaatagatccgtgtacgtcaaatagtggtagtggtttcactatgaatatgaggatcatggccaacatgaagaagactgacgcatagataacgcgtgctggcatgatcggtggcattgtaggtagtgcttgttggagagacattgatattttttcttattgaccttttttacatttttttcaagcaaaaataaatggtaacggtttttttgtgatgccaattaaaagatgttgttgagggagcaccccgaataccagtctctacggggtctgaagaccggccatagccgtttgatattttccacgttcggagacatcgatttagacagcccttgccttactggattcaatgtgagcggcggctcgaaagcggaggcaaacatcaccggattcatgcgcaggtgctcgcacttcattttcgacaacttctcaaacaagcagtacccggacttcctcagcggttccttaaacttaagaatgacaaaggttccgcgccccaaccatgtgaggcagatgttattcgggatgctcatccagcataacatgatggcgatgcacaagaaggcgtacgcgggcgtcctgggaatagacaagcggaagctctctggaacagacatcctgaagaggtacttcgcgttggtgggtggctctgcgttcatacaggtggcgaggatgggcgagtacaagactttgaacaagaacattgtgttgaaatgtaagaacgggagcttccggtacgtgtacgagttgctgtcggacaacacgcagctcatagacgcgttggtacaggacaagtatctggagaatctcttgggcatccagaacgtgtactccatggccatttacagattggtcatgcggcggcttctagacccctcaggaactgacaagtgcattagggacttcatcgatacggtcgccctctcgggcgtgtattatatagacgagaccgtgtacaacaacgttgtggccgagccgttcgatccctcaaaccagatgcacagcttcctgataatgaacgaactggtcacgggggggcattattttgaccactgtcgaggtaacttctcgaacttttatgaaagttacagcgccatgtactacctaagcgcgcttgcctctaacggggtccttccggcaaccatcagggcgctgaagaagcgtatggaggcagtcacgatccacgcgatcgccgtgtctctcgactttacaggggacacggcgggcgttgaatgcgcaaaagttaagacgacttaccaaaaggcgcggtccgtcaggatttatgaggacaccaaggaacgcatccagctcctgaccaacttcgactcgatcttccgcctcttcttcgggcatgtgtacgacgggctcgctgtcctcgaggtgaagctaacgactccgttgaacccggtgttgaaggcgtaccaaaacaagaccatccggtacgacatcatcaaagacttgggaataaaaaacagttacactcagaccggtcaataatgttacagtatattgaatcaattccaattctctatgtacaacttggacagacggtcgattgttgtacacatgtacacattgctgcaaagtttgaggagagtggctatacttgcgaatgtaagccacatgacagtctcgaggtggatctcaaaccccactaaaaaagtgtacaaacggaataaacctacaaaatcggatgtggtcatagagttcttaaaggcgtcattaaaaatagatccattcgcatctcttgctggtcttcgtcatacagctagggacatttgatattgggacaccttatattttggggattctgaaaagttgaccaattcaagatttgtaaccgatcttgtcaatacagatactgtcttcaggtgattgacacaaaaaattcaaggcatctaaagacactgaatttacatgttcaaagtaccctgaaaagtcaaactgatggctaacatcgtgcgcatcaataatccttttcaaagcgttactgtaatcaaatatatctgctacatctggaattgttgggcacatgcagcgatattttcgcttgagcaaactaaagacattctcaatagcgttaaactctggactgtaaggaggtacaaagagtggtcgtattcctacagaatcgaacatagaaatcgtctcctttgaatgatggaactggatattgtcaaggacagcgactgtaccccgctgtacatgtaactcagatacaaactgtacaaagtcgactttcttgcaattgtgatcaaggatcttgtaatgaacgatacctttagcagaaacagcagcaattagtgtcaatttggacattcgcaatgtcctagaaatttggatatttaaacgtttgccgcgttgacagtaccctctgcgacaagtgtcaccaatgtaaaaacccgcctcatcgatgcttaacaaatccgatgtcggaacggctaaatactccttccaaaaacggtcgacagaagatttgtggtcagtcttgtgccgaactgttttgtatgcgcgcttgcgggtgtaaccaagtttgcgtgtgtagcgtccacaagtttttggagacatcttgacagaggacagagaagtcacaccctctgcaagctgagacattgtcaagatgggattggagtcaatcagttgttttatagcagccttgatatcttctgtaatgacactcacccttttcttccgatgatgttttatattggctttggtgacccaatgttggagtgatgattttgatactttgtacagcaaactaactttcctcaaactacgattatagtatttgtagtgaacaaccgcgcggtttctaatctctgcatcaatcatgataacgtaggaaatggtataaggaaatgtgggtgcaatattatatcaccagaagaaaaagaatactcaccccctcttaatgggggtagtgcaagacaaaggagatgacgatattaacatcagcgtcgtcaagaagacgcttaattctctgtgcatggatgtatcgaggcatcagatctcctcaaggatacaaagcatggtactcttaatcaaccacgcagttgcagaggcatacttattcgcaaactttcatatcacaagatgcctcgatgatggagactttgacgtcaagcagttgccacacctggatcggaacttttattacaggtgcctccttgcggtatcgacctccaatgttcgaaaggatactctgggccagagcttcaatgataccatggtttctttcgacgccctaagacctgcaggatacgtgaaggtggacgttcgtccttggggacaagtaatcgcagacgtctcaatacaaatggcgacgatggcgtgcaacagcgtctgggcaaacgtggacagggtcgttatcaagtacctgcgacatccctctctgaagaaacatttcaagaagattgtcaaagcggtggtccagtacccagaatcgaaaatcgacacaatcatcccagagggcctcgtgcatgcgatccacatcaaagaggttgtcagtcacttgagggctctctttccgctgccaagagggaagcagttcaacactagagcgcacctgacaatgcgattgttccatcacgtgcttacagagttgggagaggtcggacgagtggatccgaaagataaaaaaacaagaaaaagtcacccccgtctgttcagtatccttcctcgcaagaacggcttcacaatttcgtacgtcccgatatcttccatgcctttcatgaagcttctcagcatgggtgattcgccactcgagagcgtctctggcgatggacgttacgagaaccatacaatgctgtggcgaaagtactttaatgtccaaggtcttgagacgaaaagggtttcgctttgacaaccgaatcctcagcgacggtaaaggggtatccgtccaaatgaagcagaagggtaaagaagaggtcgttgaagaaggagaaaacgcaggctatccaaaggacgcaaatatcgtagagtgcaaggacgcagtgggtgcgctgcgtgtcggagtagaccctggaatgacagatatcgtcacggtagcatcttctgcaggtcgcatcgagtctttcagctcggctcgctttagcaaagttgctgggtacaatacaagcaagcgtcgcacctacaaatggaatgacgagactcaagacctcgtgaagtccattccatcgcctaatacgagcaacatgtccgacctgcaggaccatgtcagagcttatctcaaagcgctcccgatcctcctacaacacagagccaacaaaggctaccgatctatgcgattctttcgatacgttggtaaacagaagacgattgaaaaggtatgcgatgtgattgcaccaagggcacagacgaccgttgttggcttcggcaactggtccaaccaagggtatggtatcagtcgttcatgttctgggcccatcaaagagatcaggaggtgcctctcacgtcgtaagaatgttttgttcaaaaacgtcgacgaacgcaacacttcttgtaaatgtcacggctgcttccagaggcttgtcaacatgaaggcagacagcgtagtctggcgcggagtttgcaaagagtccccaatcgacgggtctataactgttgagaagcagaagatggtggtgaagaacgtcaaggtccacaaagtactgcactgtagagacagtgtcaaaagcgcatcatccaatgtgcgctgtggtgcaacctggaaccgagacgtgaacgctgccaagaaccttcttctgcttctgacaacgtagatggacgggagagagcgacctgaggcattctgtgttccctcgcctccccccaaaaccacagtttccatcgaggcgagtgtgagcgctaaaccgaccgacccacctgggtttgtcagcagcttgccttgttatcctttgggccagcttaaatgctgaaatacagagatgaacggcaaaaatatgtactcgcctttagctgatctacccattgggttcaagggtcaccggtagggtgtcccacaaattgcgtctccgactgtaaggtaaaggatgctttcggatttgaggtatcaaaagagttgagagcggggtcttcaaatctagagggccgaccaagaagtggttgtctaacatccaggactgccttgaggacctgaaggacaacagtccaaagcgcacatctctagtgtcgtatgacgcttacgtgactgtaatggtcaaccattgggattctcgatggggggagatgtccaagtcgcgatggggcgcgcagcgcctgcgtctctacggtggcaagaaacgtgtcttatcacgcttcttcaacgaggtccaggcggatgtcggtgagaggaaaacaattgtcgtcgcatacggttctgctaagtttgcccctggtggcaagggtgaactttctgtccctacaacgagcgcgttcaaggcgtttagcgaccgtttcaaggggcgagttgccgtcattgacgaattccgtaccacaaagatctggcacaaggacagcaccaccgtcctccagagtgtgcagtccgaaaaagaagggcgcgcggttcgaggcttgctatggtgcagttccaccatggagaacagcaagttgtttgtaaaccgtgacctaaatgcagccattaacatccacaattgctttacaatgtacccaatccgccccggaattcttgcgaggccaaagaaatattgcaaactggaagttgtggtaggacgcaaaattgattacaagctgacaggttctttacagaacgcagtgtcgagctaagtgtagaagataaacacatacaagaggattttgggggactcgggatattatgtaacataattcccttgtccgagtgtagatacacggtacaatcgatacctcgaggccacagaggacgagggctacgccaagctggtcaacatcgctcccatcccaacagtcaagcacgccttcatcacgatagacaccgacggcctaatgggcgtcctcaaggacgtgggtctcatccagagtctcgaaaagacgctgacgaacaaggagcactgggagtcggtcttcgatgtggaaaacatccgttctactgggaaaggtgtgtttacatgcaccatacagctatggacatttgatattgggacaccttatattttggggattctgaaaagttgaccaattgacaagatcggttacaaatcttgaattggtaaacttttcagaatccccaaaatataaggtgtcccaatatacagatactgtcttcaggtgattgacacaaaaaattcaaggcatctaaagacactgaatttacatgttcaaagtaccctgaaaagtcaaactgatggctaacatcgtgcgcatcaataatccttttcaaagcgttactgtaatcaaatatatctgctacatctggaattattgggcacatgcagcgatattttcgcttgagcaaactaaagacattctcaatagcgttaaactctggactgtaaggaggtacaaagagtggtcgtattcctacagaatcgaacatagaaatcgtctcctttgaatgatggaactggatattgtcaaggacagcgactgtaccccgctgtacatgtaactcagatacaaactgtacaaagtcgactttcttgcaattgtgatcaaggatcttgtaatgaacgatacctttagcagaaaacgcagcaattagtgtcaatttggacattcgcaatgtcctagaaatttggatatttaaacgtttgccgcgttgacagtaccctctgcgacaagtgtcaccaatgtaaaaacccgcctcatcgatgcttaacaaatccgatgtcggaacggctaaatactccttccaaaaacggtcgacagaagatttgtggccagtcttgtgccgaactgttttgtatgcgcgcttgcgggtgtaaccaagtttgcgtgtgtagcgtccacaagtttttggagacatcttgacagaggacagagaagtcacaccctctgcaagctgagacattgtcaagatgggattggagtcaatcagttgttttatagcagccttgatatcttctgtaatgacactcacccttttcttccgatgatgttttatattggctttggtgacccaacgttggagtgatgattttgatactttgtacagcaaactaactttcctcaaactacgattatagtatttgtagtgaacaaccgcgcggtttctaatctctgcatcaatcatgataacgtaggaaatggtataaggaaatgtgggtgcaatattatatcaccagaagaaaaagaatactcaccccctcttaatggggtagtgcaagacaaaggagatgacgatattaacatcagcgtcgtcaagaagacgcttaattctctgtgcatggatgtatcgaggcatcagatctcctcaaggatacaaagcatggtactcttaatcaaccacgcagttgcaggcatacctagtgttctcgcaacatttcactattttatttttcgcaaacttttaatcacaacgatgccttcgatgatggagaactttgaccgaatcaagcagtttgccacaaccctgtatcggaacttttaattacaggtgcctcccttgcggtatccgatcgaaactcgtccaatgttcgcaaggatactctgggtcccagagcacttttgcaatgataacattgtttgctttcccgaccccctaagaccctgctccaagaatacgtgaaggttggacttcgtcctttggggagaacaagtaatccaaactgcgcaagacgtctcaatacaaattggcgacgatgcgtgcaacagagcttctgggcccaaacttggacagggtcgtttcaagtaccctgtaccccatgcgctgaacacatttcccctctctggaagaaacatttcaatagagattgtcaagcgtggtcccagtaccccataatcgaaaatcgacaacgactcccgccacggccacaagtcctcacccggttgttcctcgtgcatgcatgcgatccaacattcaaagaggtttgtcagttcactttgaggacatgagtgcactcttcttttttttttttccttttactatccgctgccaagaggaagcagttcaacactatagcgcacctgaacaatgcgattgtttccatcaacggtgcttacagcgtttgggagaggtcggacgagtttatctatccgaaagattaaaaaacaagacacaaaatcacccccgtcctgttcattatccttccctcccatgaaacgcctttttacaattttcgtacgtccgatatctttccatgccctttctccctgaaaagcttttcttcagcatgggtttcatcgccacttccgagagcgttctctgggatggaacgttaacgagaaccataacaatgctggtggcgaaagtacttttaattttaatattccaaggtcttggaacaaaaaggttctctcattttgggaacaaaccgatccctcagcgacggtaaagggtatcgtgtccaaatgaagcagaagggtacagaaagaggtcgtttttgaagaaggaataaaacgcaggctatagctaaatccaaggaccgcaaatatcgtaagtgcaggacgcagtgggtgccgctgcgttgtccggagtagacctgggaaatgacagaaataaaaaatcggtcccaaaaaatcgtcaaacacggtagcaatctacacaatctgttttcttcttgcaggtcgcattcgagttctttccagtcttatttagctcggctcgctttagaattaagcgaagttggcctgggtacaatacagccaaaaaagcgtcgcaccttagcaaattggaatgaccgtagaaacactccaagaaccacctccgtgaagaagtccattccatcgcctaatagagcaaaaaccatgtgccgacccccacccccctgcaggaccatgtcagagcttttatctcaaagcgctccctccccccagcgctcttactccaaccgtatccacttcctcgctgccaacacaagatccaacagccgaacaattctactcatacctccataacattttaaccgaatctcactaaaaaaaatctaattgcaatttcttttcgtataataaaaaacataaaaactccccccccgtttggttcccccccgccgccgccgtacccgcttcccccgccgccggctgaggtctttcgctgactgtgttatttttcttctggcctgtccctggaatgtgaaaaggtattatggatgcgcatgttgattgcaaaaaaccaaggagaagcaagggcacagacgaggagagagcacggagagaaccgtgttggctttcggcacctggtccaccacaggtaaatggtatcaagtccgtttcatgttctgctggtgctggttgtttctgggcccatcaaagagatcagggagggtgcactctcaccgttcgtatagaagaatgttttttgttttcaaaacaaggagtcccgacgaacgcaaacaattcttgtaaaaatgtcgtccccaaaatgtcacgggtcatccaacggcttgccttcccagaagctttgttcaaccattaagtcgacacagaagcgtagtcccctggccgtcggagtggagttgcaaagattccccaaattcgacgggtcctatactgtttgacagaataagccaaagattggtggtgaagaacgtcaggttccaaaattactttactactactgccactgtagagaacagtgtcaaacagcgcatcatccaagtgcgctgctggtgcaaaaggttggtgcaaccggcaaaacaaacctggaaaaccgatacgtgaacgaacagcttccaatcagaggagaaaccttcttctgcttctgacacacccccacgtgggatggacgggaaagagcgactgaggcattcctgattccgtgttccctcgtcgctcgcctccccccccccaaaacacaacagtttttcccatccgaggcggtggtgatgagcgtaaaaaaaaaaataaaaaccaaaatgagcgctaaaaattaaaaattaagcgctaaaaaaaaaaaaactaaacaaccaaaaaaaacaaaaaaacccgaccgggcctaaaaaccctcccacccccaccccccctttcccccccccccctcccccgcccccttcgttcccccccctcccgccccgacattccctcccccacccccccaatcccccccctcccatcccccaacctgggtttggtcaaccatgagcttgccccttgttatcatatccttttttttttgggccagcttaaaaaaaaatgctggtaataatacagagaaacgcaaaaaaatatgtactacttactctactgcactaatatgttctttaatgcgtaactgtacttttttatgtgttactatgtacttaactgtacgttacttaaacattgtaactaatatgtacttactttttctatcaactattactccttttcttacttctttcgttatgtctatcaatgtactatacttcactttcattacttcttactctctgccgtcggcacctttttaggctgatctcccccattgggttcaagggcaccggtagggtgttcccacccccccccacccccccccccccccccccccccccccccccccccccccccccccccccccccccccccccccccccccccccccccccccccccccaccccccccccccccccccccccccccccccccccccccccccccccccccccccccccccccccccccccccccccccccccaccacccccccccccccccacccccccaccccaaccccaaaaaataaaaaaacaaaaacaaaattgtcttgcgtcctcccgactgtatctaggacaacttggttctaattaaatgtttcttttcctgtttccctaaagttttttttcaagtaaatgttaggccattacaagcaaacatttattaaagaataagaaataactatccaatcacgtcatcaacaaaaaaaaaaaaacaatgactaaatgactttctaatcttcgatgtttataaaacaaatgtatctaaattatagcgttgcccaaaaaccccgaacttgtgaaaaataagacgcatatattaatctgtaatcgatataaatggtctcgttttccaaaaaataccagtatttgggaatcgagattattgatgttttaacgataattatagtcgttgggataatcagaaattttaaaacgccgataattatagttgttgggataatcaagaaattttaaaaacactaacttaatattttttaccttttgcgcaccatgttcgtttgttgtgtaaggactacaacccacgccgaagaacctgaaaaagtttgcccacacccctcacaaacatgtccctcgttgccacatgagaacttcctggcagaacatgggaagattcccatattcgcgccccaatacgtcgtcgtccatctccctgccacacgtcggttaggttttcgagaacagagctctcgcaaactcatcatctgcccttcgacgtaagatttgagtgcccgcctgcgaggtggatggtagttaacgcacgtaacatacttgttcacaaaatttaatcgaataattaaatacgaccgacaagtgcttcctctaacaacaatttgccgatatctttttgcaacaacttttggcaaacaagaaacacaccacctttgggtcgtttttttgaagaatttttgttttgcgaatcacttcctcaaacgtcccctgaaataccactcttgaaactaaaccactcgtgggggggaatgaatctttggttttgtggtttcaatattattgcgccaaaccgtcatgaaaacatgaaggaacttcctttgaagccataataccaaatcctcatcccttgcaatcagtgaattcctgcaaataatcggtattgatacgcactcctccccgccccggccaatcatcaccatcacatacacgagtttttgggggagaaggtacagtgaccccgttgtcaggatggttctctgatcgacaaatcacgaacacaataaatcagtcccccccctctgacactctctaccccatatcgtttattctctctccttctcttttcgcaccccataaaaatctcctaccctcccacctcctccttctaacgtccgaacagtgctgtgacaacaccacctttattatatattctttttacctcccacccgcatgaaagtatgaaggaacccgcgaacggcaccatataatatcacacgtgtggggaaagatttagacaaatatgtctcgcccaaccaagcccccctaacgtatgaccccactcctccgtctaaggaaaaacatccgcaatacgtcctcgcctacagctccccgggcccactttcgaggggacgcaggatatcctctcctttcgatgaatccgctaagcactggcatatcctccctcaacgcctttttgtgtgtcgtccaagtcctattcgcagcaagccatcattttttattcgatttcccccggtcacgcaagaccagaagatttatccctctacatttcgcaaacttgcacgctttttcttttttttctttttccgcgcatccctctgccaattccctgccacggcaacatggcgcaatctccaacgacacactggatattcagaaaccgctccccctctgcacagcaaccacagaaatctcttcgtgttcttctcaagagcatctgcgaaccttgcccttttttttcaagctggaagatccatcatcatcggctaacctttggcccttttcaagcctgaagaaatcatcttctaagtcaaaaaaaaacctttgttgccttttttttttttttttgttttttcccaactttcaaagcatacggctaaccttacaccttttttttttttttcccacaacctaacattccaaggcatcggccttaaccgttaaatggggacctttttctccaaactgtcaacaagaatagctacccaacagaagcagttcccttgtttaaaaaaagtcgcgagagtaggtgtgctggtaagatttagtttttttttttttgcagcgtgtggtaagccctgacaattaagggtttgtcattgctttggtctctttgggcgtggtttgcaaaacagccattttcgagggttgaagaaaagattccgcatttcgtagacgtatctatgatcaggaaaccttgacactaactaaatacaactaccggaactttgacattttgcatgtagtgtacagtgaattacttttcattcaattttaacattcccgtcatgttttttttatgcttcaaaatacaactcgaatgatttttttcaacagagatttttaccacacaacatatattttggggaggtgaaaaaggggctctggcgcacccgcttgtgtgaataataaatcaatcagccgataatacagacgcctcatcgacatgtttagaggatgcggagcactcacaacaacaacccaacctccatgcgtcaaacaaaccattttattttatcatgcccacctccccaatgcgacagcgcccagaatgccatgacccccagcacacccccgccgtgcctgaatggcacagagacgcaagtcggcaagctcaatttaccatccaattttattccactagactcattccactaaacccccctccccccattccactacccacaccacagctaacccccgcaataacaaactctgaaaaccccacccactaaagaccgactaacctaaccctagactaactaccaaccccacccattcccaaccgtaccccatcactaccccgcctaacaacccgcccccctctcaccgccggtgcctccctctccctccccgctccctccccccttccccccccaaca

SEQ ID NO: 298 - DNA, 21278 bp, unidentified
  misc_feature 1..21278: note = Fanzor polypeptide
  source 1..21278: mol_type = other DNA
aaaatggaatggaactgatgtgtcaaaacatgttccaaaccacgcaacggggatttggtcatggaataccttcccagccaaagcaggtagaaccaaaatggcatgggatgattctgcccccacatacccctgcacccttttgttggtgtctttgtttgccccacttctgaactgctccctgtgctcctgatgggtgccacatgccatcatgaagatttaggcctaggatttcctcttggggttgttccgcagtcgggctcgtaaggctcaacttgggcaccgcaacttgcccaactgaaaacgtttccttcatgtggaaaatagtatatggtgaaggggaaaaaatggcttttgtacagcttaagaagcgaaatcaagaacttttgaagaaacatagaagtggcgacagccatcatcaagaagcactgaccgcttgactggacttatctaacagcaccatgggtaattggaatcagggtggcgtggaaaagactgcactggtgagggcatacaaagagtcggaacaaaggggatcctggttcaacaacttcagatgcatgcatggtgggggatgaacgcgattccatgacagctcttcgaaaaccgtgcgctagaagctaagaccgaactgaatgcaaagggaagctgacaatacaccctgtcagaccaagtggacgatagccgtctacatcccgtactaacagaacaccgatggcaatgttacatgtgtgtcttgtttttgaaaagacggttcctgctcgcgggaagcgggtcttccaagtgtttcttgccattaaactggcagagtggtaggggcagtggacagatatttcccctaattggtgagtactgaacatgaaaagaggttgcgcataccctgtcaggaagccaggtacacaaaagatggcggtggtccctgtcaaagaattgaagaagtcctgtctcccttttctgcgtgcaactacgatggtcgaccgtcccgtcaaccactacaacgcactcgtgaatggcagtacagtcaaggtggatgcctttacaggtttgtgtccgtgacgttcaccgcgaggtggagatcaaacctaacttccattgtagtttcaagcagaagaactcgtccgacagggcgccttcgtcacaacacatacgtgggatcgtagatctgcgcttttgtctttttcgaattggtttgggatgatgagtttggaatatcgtttttagcgcctaataatggtggcacgccatgccttgttggatcctttttttttagcatatttcgcaagtgatgacttttctcaagataataatttaatttgtaatctgtttggttgtaatgttctcgcatacgttgcgtataagcagcttgccatacactaaaacaccggtcagttagccttggggggggccttggcacaaatccaacgctccacaagagaatgttaatcattgcttccttcctatttttgctgaagatggacgatgaggtttttggatctcatacggggggtccccgcacttgaatcccgcccagtatcattaaacacacacggtttttgtggatatccaactggggtcgactctgtgactgttccacaatattatgttttacaccctactccaagaacttcacgcaccgtgttcatctatgatctggaaagacaaattcctgcaccagcctgcatttaatgaacatttggttttcatggtccgagttgttttcttcttattacagtcgatcatccatcctacaagttgttcctcaacattaaagtgggacacccgttgttataaatcatgccaactgcagatcgttgcttttttgggtaaccattgggtgggtggcagcaggtttcgttgaagaagaggtttctcgaagatttccgagtacctcttttggtaacacctttcaagttcaagccgcgaatgtcgcagagtggatcccccttttcaaaaaacaatccgaagacctcgtttccacaatacagtcgacggaatgtacatgtgactgtcatgtgttattcacaactagcggtatttttttaatgataacgactcctgcctggcaacaacggtcagtggcctcaaaatggcactttggcagcacgctgacgaccggcaagcctcacacacgcacggcggggggtcttaagcaacacgcatgttactccaaacgaaagcgtggtgtaatcaagcaaagagccgggaaaatggaaaacgtttgggggggtgcatgagctcacctacgtgcgaggagattagcttcgtaatagcatggatcaatacaaatatacaactgcaaaacgaaaaaccataacagccaaagcagcttcagattgccctttttttcccctgagcggaagataacccgaaatagccttacgtaatcgtcccataatcaattttggaaatcctgttaattccacgcgcattttcgcccgtgtacgtctttgtttcttaatctctacaatctttctcaataaagaaacaatcagagcacagcattactgggtctggaactacccaattttggcattttttggcatctcagataataggtgattgtcgttccgtcaaacgtgaaccatcgtcttttcacacgttttcgattgtaacgcggccttgaagtagacaaatgtctctgtgtacaggtcgagttaattgttctaaacatttattttgttggcgtacatcctcattaaactcgaataccaaaccgtccatgttaaaataaatttttttttggccattcccaacgtacttgctgaaactgttgaaacaacgacaatacatgcttgttatccaacgcttcccttgaagttatccattgtttcttctgttttacacagagagatagacaaaaactatgtacgtccctgactcgcctttaagctgtcatctctaacccattcttgggtgcaaggcaccgggtggggtgtcccaaacaaatcgcgttcgaacctgtaaacgtgagcgatgcagcaaatgtccatccctttttgcatgtgcaatgcaatcgcaattggcaccaaatgtttgtgtgcatgaggggcggacaaaaacaaaacccgactgttatgaactttgatgcaacacttgtccagatgccaattgcccaattttgacgagaaccactcgtacttaccaattaagtctgctatatcattcgcaatcagcgtccaattgtgtagctcgccttcggatgatcacaactacatgtcgcacgacttgcggatcatgatcaagcagaaagattgatgaacaacacatgcatgtgcctgtcaattgttgcctgcaacacgtcattccctcaaaagtttggcatctggtgaccggtgcatgaaattgcaaagaggattgccaactcatggttttaatgcttgttccgaataggtagatagaactcaatagataggaatgtggcacgcacgtgacatatcatcacgactacaacaccatggtgtgcgcatccctcaagactaaacgcgcaccagagaagacaggagggtggccttctccacttattttcccccccttgtcgacttcctccaaatcgatctgagccggtacccagggtacgagggactgccgattcctcccagaaacatgatttacgtgacctcttaaacgctcggacccgggatcgctcttctgctcctcaaaataatcgcaagcgctgcactgcatgggaattgattgggtctaggacgaccctctcattgtgccgctacaagctgactctgttgtttgttgatgatacaaacctcggtattgtcttgttagacaacaccactcacaccactcggtccctggtggtcgcgaacaacattaggttacaccacaaggtgtgccgtacacgaagcggtttcatttaagtattccgtcaactgtaagagcgtttcatgcaagcagtccctcgtcacgtaaatcgatagcaacatgcatcctggcatccatcaagaactgttggcccaggagacacacatgctcgcatctggtcttggggcacaatcccacctgtgtggaaataccgctgatgacaccctcatacatgtgctccgagtgagggagcttcggatctggaggataaactgcattcttgtaccccaaggctgtatgtaatacctccagcgtcatgtagctgagtgtagagcccgtgtcatacatcatggaaatctgaactggtgcaatggctcagcagcctcacacataatgggatccgccttgacaattacggggaacacaaaatgcggttcaaccccccgtaaaaccgaccagatgacattgcgtcatggggaaccagctcatcagtaactgacaggtagtgcaaattaaacagtgttttgctggcagagtaaactaccgatcgctcacagaacacggagcacatcacatcgtccatggcagcctggtatgggtttctggacaccgtcgccctccctggcatctcgaagtcttcatacacttccataatttcaagctcccttaccagctctgtcaggggaattattacgccgtcgagacgcgacaggccaaggtgcttatccagtaccaaactccggcacgccagaaggctgtcaagtgcgcccaacacgctgtctggcagagtgtcatagtgtgacgacgagcagttcctcctctagggaaccgttacactcgcaacttcaaagctgggaaagctaactgggcactctgtacggtccttgagggtcgatgatgatgatgatgcattgatgcgatttcattattcttcttcaagtcatctgacttgttttacacacgcaaacggcgggaaactgtcgcatccacaccgtccgttcgtccgtccattcatgacacacggatgcggtggcggattctcgtccctcatcgtctcgtagtcctcgaatgaagtgtaaacaaccattcttcagtataaacaaccatcagcacagcacacttcacaaacgaatgagttcctttgacgaaatcaatgaagatgtattggagatcattctagccaatgcgatttcgaacgaatgccacctccaacaagtggctctcgttagcaaacagtggagatgcgtcatctggaggtacgatcgccggtaatcatcttccctagcgcataattcgcacaccacccatcgatgcgcacgtacacgaccttattagctcgcgatgtgcaccaaagccaatataaaacatcatccttagaaaagttcgagcgtcatacctagtgttatgtcatatatagcgtgtcctatcacaatatcgttcgcttcgtctctaattcttgtctacagtcagagacagaatttgtgggacacccttaccggtgacccttgaacccaattgattgggtaggtcagctaaaggttttgtatcaaggtcccaatccttcgtgtccttcatcccgtatttcagcatttaagctggcccagaggataacaattgtaagctgctaactgacccaggtgggtcggttggttgagcgcccacatttgcctctccggaagctggggttttaggggggggggcgagggaacacagaatacatacggtcgctccacgttatcagaagcagaagaaggttcagcagagttcacgtctaggttccaggttgcactatagccacattggatgcgcttttgacactgttgtgacagtgcagtacttagtggaccttgacgttatttaccaccatcttctgcttctcaaacgttttagccccttctcctttgtctgacactacttcttcttctcatggtgatacaatattgcactcacgtttccttatacccataatcaacttttcaaaataaaaggtgtcccacaatcaaatgtccctagctgtatgctcgacgcgcatgtcaaagcatgttggaagccttgtccatgttagcatggttggtttcgacaagtgtgatcatcacatggattgccatgacaaaaaaccagaagttacctcaaatttgtgcaggcatcatgtggactataacaataacgatgttgattagcttctgctcatcattttaaaagaatcatgaagtaatgggcgttcctgcctcccggccgaattccaggggaacacaatgagcgtttgtatgacatggaagaacacatcaaaccaatcctggatgcactacattctgcaatttgttgattcaaaatcgtattggtgttccactgccccgtggattacgtgcttgagaagccaagtcccagacaggatccctcgaaagccgggtgttataaggacggattccacatccaatacccggatatcgtcacatgtccagatttttagcttttcagaaatttactatagtggactatagtcttaccatgggcagctttacctttacctttagctgcctaagacttgattttatgcccataaaagatacagatacaggggccattcaagtaccttcaagtggtactccaggtacctttagggcctatgactcttttatgggcattaaatcaagccttatattaggcagctaaaggaaaataactagtattttgtgtcaatatatcatgtatgagggtgtggaagccattatttttatctattactaaaacagtgtattggttgtaaattatatcggatacagataaaggtgttggatttgtcttgttaatctctttgattagcattgatgtcttaataattacgttaattttatccccagtgtttttatttaatactttttgagcttgctatctcctactggtttcggtatacgatgttaacgtcatttttctttccctttgcataatgcgagagatttcatgaactcatcaatcagcgaattctagacgtattagaagcataatagcttcgtcccgctttggttatcatttatctttccctcattacaacataacacgctacaaacgaagaaccacggtcttttgggaccgtgtcgccaccacactccccctgaggaaatccccagggtatgtgaaaatctgccactctcggcgctttttgcgctatcttttctaacacccagcgctagtgtacaacatccacaaccagcaccacattctggacccatctgatgcatggggcttctcaggaaatactccatccagacactcgcacgtcccttgtccgcagtcgtcatacaacagagcccatccgcattttacgaggtgtttcgaagtctccactctccgctcccgcctactgtttttgtcacaatctaccatgtaattaatgtgcctctaaaccatgctatagtacagatgtgtaccactttttcctatttttttttttttgttttttcgcacctctcttttttttctttagtgtttttttggtttgtcatttttttttctttttttttttttctttgtactacaactgtttttttttttttttattctctttttttttttttttttatcttcttacaccttttttctttgttgtttgattttctttttttttttttggctttctctcatctcttttttctttattttttttttttgtttttatttcttttttacacaactttttttttttgttttttttcttttttttcttttttttttttttttttttttcccttttttgtttttttcctttttttttttttttttttgttttttttttttttgtccgccccttaatgaagcatagtgacggtctgtaatgtgaccaaatgtggcccgatcatcgaaaatgagaatcgtcgggccttttatcatgtccaacgatcgattgtaccgccagcactaaatgggcgttcctgcctcccggacgatttttttaaatttctaatcaggatttagagcctcctgaacgactcgctagcttgagacatcagcaccaaggaatcacaattccgctccataccatgtttcgcagccagtcaaaatcgtccgggaggcaggaacgcccattactacacaggatttgggtgatggggggcttacacataccatgtttagcagccactcactacgtttacactcgtttttagaggaacggcgaccactctcatcaaggacggcggcatctgtgtcgagtcgagtcacagagttacagagtcacagagtcacatggcgacatctcgcatcacggaggcacgtgtgtagagtcacagagtcacatggcgacatctcgcatcacggcggaacgtgtgtcaagtcacagagcgaccgacctctcgcacctggcggcggaacctgtgtgtgtcaatacctcgatactgtaagatatcactcacagattacggaaaacccggtaaagtaatcgcaaacggtgatcacatgccaagcagaggtctgctagacaatagatatcgtatatcgataggggattcgcggagtatcattatcgataattacagtaacgcattgaaaaggcatctgatcattcttgcagatggcgtcagatcgtgagaaaattgaagctagtcttcccaaccatgtggatgtgttcacctacgatcagcatgacaaaatcatcgggctcaacgaaaacggacttatcggattttcccagaacctcaggaacgtcaaccatgtgttaatcggcatctgcaccatgtttgaatatgaccgcactcgtgcgggagatgacaacagagactcaaggcaggattgctgctctgatcactgaagaggtggatagggttgaggaggagactgtgtaaatgagttaacaatgtgttcggtgcgttattgttgaataaaaaagtttcatttatacagctagggacatttgattgtgggacaccttttattttggggatttgaccaattcaagctttgtaaccgatcttgtcaatacagatactgtcttcaggagattgatacaaaacattcaaggcctgtacagacacagaagttacatgatcaaagtagcctgacaagtcaacgtgttggcttacatcgtgcgcatcaataatcattttcaaagcgttcctgtaatcaaataattctgctacatctggaattattgggcacgcgcagcgatattttcgcttgagcaaactgaacacattctcaatagcgttgaactctggactgtaaggaggtacaaagagcgggcgtattcctacagaatcgaacgcagagatcgtctcctttgaatgatggaactggatattgtcaaggacagcgacagtaccctgctttacatgtaactctgatacaaactgtacaaagtcgactttcttgcaattgtgatcaaggatcttgtaatgaacgatacctttgacagaaacggcagcgattagcgtcaatttggacattcgcaatgtccgagaaatttggatatttaaacgtttgccgcgttggcaataccctctgcgacaagtgtcaccgatgtaaaaacccgcctcatcaatgcttatcaaatccgatgtcggaaaggccagatactctttacaaaaactttcgacagaagatttgtggtcattcttgtgtcgaacagttttgtatgcgcgcttgcgtgtgtagccaagtctgcgtgtgtagcgtccaaacgtttttggagacatcttgatagaggacagagacgtcacaccctctgcaagctgagacattgtcaagaatggattggagtcgatcagtttttttatagcaaccttgatatcttcggtaatgacgctcgcccgtttcttccgatgatgttttatattggctttggtgacccaacgttggagtgacgattttgatactttgtacaactgactaactttcctcaagctacgattatagtatttgtagtgaacaaccgcgcgatgtcttacctctgcatcaatcatgataacgtgcgcgtattagggtataaggaaattgtccgttagtatggtatcactaaaataataatcactccctctcgatgggggtggtgacaaacaacggagatgacgacgatctggacatcatggtggtcaagaagacgcttaattatttgttcatggatgtatcgaggcagcagatctgctcaaggatccaaagcatggtactcgtaatcaaccacgcagttgcataggcatacttattcgcaaattttcacataaccagatgcctagatgatggagactttgatgtcaagcagttgccgcacctggatcgaaacttttattacaggtgcatccttgctgtctcgacatccaacgttcgaaaggatacgctgggacaaagcttgaaggatagcatggttgctttcgacgctctcaggcctgcaggctacttaaaggtggatgtttgtcaatggggacaggtaatcgcagacgtctcaatacaaatggcgacgatggcatgcaacagcgtctgggcaaacgtggacagggttgtaatcaagtacctgcgcttgaaacatccctcgttgaagaaacatttcaataagattgtcaaggcagtggtccagtatcctgactcggatatcgacaaaatcatcccagcgagtctcgtgcatgcgaatctcatcaaagacgttgtcagacgcctgagagatctcttgccgctgccaagggggaagcagttcaacactcgagcgcacctgacaatgagactgtttcatcacgtgcttacagagttgggagcggatctaaaagagaaaacaacaaaaaaacgcccccgtctgttcagtatccttccacgcaagagcggcttcaccatttcttacgtccctatatcgtccatgacactcatgaagcttctcagcatgggcgattcgccgctcgagagcgtccgtggcgatggacgtcacgagaatcattccatgttgtggagaaagtacttcaatgtccaaggacttgagacgaaagggtctcgttttgacaaccgaatcctcagcgacggcaaaggggtctccgtccaaatgaagcatcaggtgggtaaagatatcgctggagaaggaggaggagataatgcggggtatcccaaagacgcaagtatcgaagactgccaggacgcttctttgcgccagggtgcgctgcgtgtcggtatcgacccgggtatgacagatatcgtcactatagcatcttctgacggtcgagtcgagtctttcagctctgcccgctttagcgaagcagctgggtacaataccagcaatcgtcgcacaaacaaatggaatgccgatacgcaagacctcgtgaagtccattccatcgccgactatgagcagtatgcacgacatgcaggaccatgtcagaggttacctcagcgcgctcccgaccctccttcaacaccgagccaacagaggttaccgatcgatgcgattcttcgatatgtgggcaaacagaagacgattgaaaaggtatgcgatttgattgctccaaaagcacagaagaaaacgattgaagaaaaggtatgcgatgtgatgctccaaaagcaaagaagaccgtgttgttggcttcggcaactggtccaaccagggctatggcatcagtcgtttgtgttctggaccagtgaaagagatcaggaagtgcctttcacgtcgtcagaatgttctgttcaaaaacgtcgacgaacgcaacacttcttgtacttgccacggctgcttccagaagctcgtcaacatgaaggcagacagcgtcgtctggcgcagagttcaaaacgagccctccgccctcatcgacggggctcctacaacaacaacaacaacaacgtttgagaagcagaagacggtggtgaagaacgttaaggtccacaaagtactgcactgtcgcaacagtgtcaaaagcgcatcatccaatgtgcgctgtggtgcaacctggaaccgagacgtgaacgctgccaagaaccttcttctgcttctgacgacgtggatggacgggaaagagcgaccagcggcattttgtgtgccctcctcatcgcccaccccaaaaaccacagtttccggagaggcaaatgtgggcgctcaaccaaccgacccacctgggtcagttagcagcttacaattgttatcctctgggccagcttaaatgctgaaatacgggatgaaggacacgaaggattgggaccttgatacaaaacctttagctgacctacccaatcaattgggttcaagggtcaccggtaagggtgtcccacaaattctgtctctgactgtaacatgttacattgtgcaaaatagaatagttgtacattgaatgtacagaggacagcaaattcaatatgattcgaatggtgttgttccgccatggataatagcaagttggagcaccgtgccaaagctgatgcagacttaagctatatactgactaaagccgctagggaaggacatgtggatgtctgcaaggttctgatggatcctgagttcgcgagcgaggagcatagtgccaaggcagatgcatacgacagtcgtgcactgagtgccgccgctcgtgaaggacatgtggatgtatgcaagtttctgatgaatccggaattcgcgggcgaggagcaccgtgccaaagctgatgcagacttaagctatgcactgactaatgccgctatggaaggacatgtggatgtctgcaaggttctgatggatcctgagttcgcgagcgaggagcacagtgccaaggcagatgcatacgacagtcgtgcactgagtgccgccgctaatggaggctatctggatgtctgcaaggttctgatgaatcctgagttcgcgggcgagaagcaccgtgccaaggcagatgacgaaatcagcgaggcactgtgtgcagccgctaatcaaggacatgtggatgtctgcaaggttctgatgaatcctgagttcgcgggcgagaagcaccgtgccaaggcagatgacaacgaaagccatgcactgagggaaggtgctacggaaggacatgtggatgtctgcaaggttctgatgaatcctgagttcgcgggcgaggagcaccgtgccaaggcagatgacaacgaaagccatgcactatgtgacgccgcttctgaaagatatgtggatgtatgcaaggttctgatgaatcctgagttcgcgggcgaggagcaccgtgccaaggcagatgacaacgaaagccatgcactgaggttagcctttattagtggccatctcgatgtctgcaaggttctgatgaatcctgagttcgcgggcaaggatcaccgtgcatcgtcatccgtgcttggaagggatattatgatgtttacatacagctagggacatttgattgtgggacaccttttattttggggattctgaaaagttgacgtacatttattatgggtataaagaaacgtgggtgcaatattatatcaccatgagaaaaagaagtagtgtcagacaaaggagaaggggctaaaacgtttgagaagcagaagatggtggtgaataacgtcaaggtccacaaagtactgcactgtcgcaacagtgtcaaaagcgcatccaatgtggctatagtgcaacctggaacctagacgtgaacgctgccaagaaccttcttctgcttctgacaacgtggagcgaccggatgtattctgtgttccctcgcctccccctaaaaccccagtttccagagaggcgagtgtgagcgctaaaccgaccgacccacctgggtttgtcagcagcttgccttgttatcctttgggccagcttaaatgctgaaatacagagatgaagggcaaaaatatgtgctcgcctttagctgatctacccattgggttcaaggatcaccggtagggtgtcccacaaattgcgtctccgactgtaaaacaattgaacttgaaccagtacccatgtgtcaccgctcttgaccccaatacattgtttgctcatacaatcaccctgaaatcacaacgtcattctcacatggcggcttaaagcagcctcctgctcgattgttttctgaaggggaagcgcaggcggtttcattttaatattctgttgactttatcgcaagtcagaagaagaatccctctacaccaagtggaatcaccatgctaattgtaacctgactcattagaaaacggtggtatgatgatgaaaatgtgtcaagctgtctccttggtggattggatgtgacggcctcgtccctcgcacgccacggcggcgtcatcgaaaacaattacttaacttcttcaggtactccttcttcgtcttcagaatcatttcacacacaaacaacctcctaaaatcatgaacgcttgtacacaaatcatcaactctggctacacccaaggcgtgctcgcgagctgcgtcgctgcagctaccaccgctccagccaccacaactgcccccaccataactgcccctgcgatcaggtagcctgccctaaccactgcagccgactcgatcgcgcttccgaagacgtatggcaactctttcaggacgttcctgaactgctggatcgggggaaatggaatgaaggccggcattcgactaacatacaggtgtcggtggagccttacagtagttctcaaataaagtgggacacaccttatatacagactgcagatcgttgcttttgggcaacgttgaggggtgcagcaggttgaagagttcctgcctcccggccgatttttttaaatttctaatcaggaacgcccattctgtgtcaatacctcgatactgtaagatattatcactcacagatgacggaaaacacggtaaagtaatcgcaaacgacgatcacatgtcaagcagaggtctgctagacaatagatatcgtatatcgatagggaactcgcgggccccacggagtggggtaggggaattgagctgcagaactaagtgtgtcaaggcatcaatcaatcatcacacgcaaaacggtggaaaactgtcgcatccacaccgtccgtccgtccgtccattcatgacacacggtggtggatcatcatcgcaaactcatcgtctgtctcgtagaagtggtgtaaacgcgcgcacatgacaaccaatgtcgtattccagttcgtggcgtctacagccttgcttgcggcaccgagttcgtgccgttgttgagcgagagaaggaacgagagaaatatggcaaggctaccaaagcatggaacgcaatatcgaagcgatgcgatattccccgaaaggaatgtgccggtgattgttgaggcagggtcttacgcaaccgcatgtactcgaacgaaagccgtgtgtatcaagcaggcttggaaatggaaaaacgttggggggtgcatgagctcacctacgtgcgaggagatttagcttcgtaatagcatggatcgatacagaatatacaactgcacgaaaaacataacagcaagcagctccagaatgcccttttcctgagcggaagatacccgaatagccttacgtaatcgtccatgtattcccacgtgtttgccgtgtacgtcttttctatctctacaatcttcttcaatcgagaagcattctggtcgtactcaattttggcaccagataataggtggattgtcgtgccgtcaaacgtgaacatagtcttattcatcacgttcgatgtactcatgaagtagaatgtctctttgtacaggtcgagtatttctaaacatttcttggcgtcatcctcattatcgaataccaccgttccatgtaaaataatttttttgccattccacgtactgcctgaaactgtgaaacacgcatacatgcttgtatccaacttcttgaagttatccattgtttctgttttacacagaagagatagggtgcgcaaagcaatatactagacatagtcttgattttttatacttaatgggcgttcctgcctcccggccgattttttaaaatttctaatcaggatttagagcctcctgaacgactcgctagcttgagacatcagcacaaaggaatcacaaattcgctccataccatgtttcgcaaccagtcaaaatcggctgggaggcaggaacgcccattacttgtgaaaaataaacatggtatcattctcatcagacagggttcgatttctaccccaggatacagagatggagagtcttttcagatgtgttcatgtgaacacatgtaaaatagggattgatgtgagcctccggcattgtgtacaacaatcgaccgtctgtccaagttgtatatagagaattggaattgattcaatatactgtaacattattgaccggtctgactgtaacttgtgttgacattgttttaatttatcacttaatgtcaaaaaacaacatgcaggatccggacatcatgcatggttctatcagctttcaaaaggctacggggtcgactggacctgatgacatttacatcaccgacgacataagggccgtgtttgaagctgtagcacttggcataatcaggatgtcattcaagtattcggatggagctcggtgcaatcctccagctggcctttctgtgggaaaaaaagggtttggggtgggcaggtactagttcagcagatcattgacactgattttgataccaggtgttacgacgtgtccattcaagagtcctacacaatcaagctcggcaacgaggatctttacaatattgtgccgcagatgcagagctatgtcaagccctcgccagcaggttcgctcaccaaggcaagggcattagctgctgcggctgccgctgctgctgcacacgtagaagcacttgccattgctgttactgcagacgatgccattgctgttactgcagaagatgcaattgctgttggttatctacagtgagcttgttcctaccgaactcagtctcaagcttattcactcaagcagcttcgtgtacggcacacctaacggtgcatgcacaacaccgagacgcgacattggaaatgtagtgtaaacacaagcagggttgagtgactaattgctcatcatcatcggaagagacacgcgtggcttatgacgcctactctaaggacagcagacgccaacatattccctagacgcttcgagagcagacctacgacttggcttgcttgcgagtttcacaaagttctatcgagattctgagaccggagatcgcagaaacgcattcaataggtggttttgaatcttttgccggagtggtggtacactacagtacatggcccagagattgagattgcgtaacacacgacttaagaaacaatcatcagaatttttaaacaatgattgacaattctcaactacttatctgcatatctaccttcgctattatttacatgactcgactgaagatagagcttgagactgagctcgctcgaaagaaggcagatgctgctcgagtgaatagtatggagattgagcttgagaatgctcgagtgaatattatggagattgagattgagaatgctcggctgaagattgagcttgagaatgagcgcgctcgaaagaaggcagatgctgctcgagtgaatagtatggagattgagcttgagcttgagactgagcgcgcagaagcgcttgagaagcaactgaggtacgatctgtcaagcatgactatcgagcaatggaattccctgaacgataatgacaggcgtctcaatgaggatctttgcaaacaacacggaatcaccctccccaacatgcaagagtcgtcctacccagattcaaacgagtgtaaacaacgcaaaatccatacagattattacagccatacaaactcgaatctctctctgtcgaattcattgtcggggccattcattaatattcagtgcacggatgcggtggcggattctcgtccctcatcgcctcgcctcgtatcgtacgaagtgtcatgattaccaaagcattcgataccaagacggggtcagcaataatttcgatcatattcggtctcgggttggctgcactgttcagacagagttgcaagggggaccggtgtatcactacactcaacaactgaggacatacacccgccttctactactactgcttgcaagttgcattattgagtataaaaacatcatgcatcatgattgggataagtaatcaaacatgaacgatcactcagcgatcacgatcactcctcattaccttcgtcgtcgttgcatcaaacgaacaccattaaaagatgttggcactgtcgactacgatgcaaagcttcaaaaggagattgaatccatccatgaccatttcatgcacaagaaagaagtacttgaactcagaatattaaaattggagcaggacagcgaacagcaaatcaaattcgcaacccagcggaacactattgccaaaatggaaggcaaagttgatttggtgcaggtcgctgaaaactatcgtcgtgttgaagcgatcgaggatgagtgctgggcttcgaaagtcaccttgaaagcgcctgtacaagtcgaggaggtgtcgtcacacggggtcgcccctccttgaagcacaagtcgtcgatccagagccacacgttcatttgtgaaatgataaaccgcgcgaagaaaggaaaaaacgcccgcaaccatcacaaacgtgaccctcgctcatgtgatcatgaacggattcgttctcgccaatacagtcaacggaagcttcgtgtacggcacaccttgcgtgaatccatgtccgtacgagctttacatttgaagagaaaatggaaattcaagcttacaaataatgaacatgtcaggaaatacactcggacaattacttttctgtcaagtgagctcttagttcctctggaatcggcacgcccctctccgtgaggactctgacgcaggtcaggctgtgcatagccatgccctgcatggccctgagtgtaacggggttaattttaaaccatttcattatattccctatagagtctgtgttgacatgcattataactagggttagtattgacatggcgccatattttttgtatagttcttgctgatctgtatctacgtatgacatcacatatgtcttgggaagatagcaacatattggggtttctgctcaactcataccagtcccatggtttatctgggttggtttgtataatctcccacgtgatattggggttttcgctcattccaccccaattccacggtttgtctgggttggtttcgataatatccatcgttatgacagggtttttgctgatccagttccagttccatggtttatctggattgacttcgatcatttcccacgtgatgtagggttttctgctgatataataccagtcccatggtatatctggattggcttgtataatatcccatgtgatactggggtttttactgatcaaaaaccagtcccatggtttatctgggttggcttgtataatctcccatgtgatactggggtttttactgataaaaaaccagtcccatggtttatctgggttggtttgtataatatctagtgtgatgttcgggtgtgaactcaatccaccccattcccacggtttgtctgggtttgtaatgacaatatcccatttaatgcatgggtttctgctgatccaataccaattccacggtttgtcggggttggcttcgatcatttcccacgtgatgtagggttttctgctgatataataccagtcccatggtttatctgggttggcttgtataatctcccatgtgatgttggggtttatgctcaacccaccccaatcccaaggtttactgggggttgtaatgacaatatcaatcgttattgtagggtttctgctgatataataccagtcccatggtttatctgggttggcttgtataatctcccatgtgatgttggggtttctgctgaaccatttccaatcccatggtttgttgggattggattcgatgatatcccatgtgatattggggtttgagctcaataaactccaataccacttgtgttccatacatttgacccgtctcgagatgtggttatttatttccactgaaatcattattaatagtaataactaaataatagatagtaatagatagatagtaatagatagatagtaatagatagtaatatatccacaagtatctttatgctccgatttgtacctgattttaaaagattgtggtgatttagcagaacccgtccgtacattcaaaatccatgaattcggtgaaaataaacggcatgcacacactcgacggaatacttaaataaaaccgctttctggagtcggtacacattataaagcttatcttattacagcactggaaaacttatggaagaaaaattcggatgtcgatgcaaaacgattggccacatttgtcaacaaatgcaaagatttgctcgtgtttttccacttgatggcctattactcttttatgatgatgcatgcatgggcggcttgtgtgctcttgcgcgtgcggggaaaacacatacacgcggacttttggggactcatcatgtaacgtgcgggttcgaggtgcattcacgacagcgtggatgagtgtatacctgcactggacggtcaacagattgaaacatccgggtattagcccagaaaacaacagaacgtcagtggacatcgtgagaggaagtgactctcgcgcggttggtcaacttttcaaaagcctcaaaagacaggggtatattctaaaccctggctatacaccgtaaggtgtgccgtacacgaagtggtttcagtttagtattccgttgactgtgtatcaccgcttatgcactctgctacatgggtccaaaataggcatcctgcatcatgccactggtgcttgcaaacatgggcttagatcaagcctggatatcctgcttgaagcaggtaggtgtgaaggtcgtagttgggggtgatgccgatgcgcatgattgtggtgccaagttcgcccttcacgacccccagcagacggccatgcttgtcgaccactggaccgcctgaaaacccgtcatctgcgtgtgcagtgatggccactgagccaggcatggtgctggatagtgagcccttggagcaactgggcttgttctctgtgcctgtgtaccccagtgcgtacactgacgccatgatttcaagatcagtggaccaaaggctcttggcagagcgggaacccttcaacagaatgaggtcaggcacattgcctggaggtgagggggccacgacctccaaatcctcctcaaagccgtcggttgggtaccttgccttaaaggccacagccggcgatgtactacctagggtcttgccacagaacccctgcatgtgtcctgctgccacgatgacttccccatgcatgaagccgctgaactgaccaactaggcttccgtcctgactgaatccaatcagcttcactaccaatggtgacaccttggcatacactgcctggtcgagcatctccgctgcagcaccgacgtccaccgggtcaacaccatcatccaagtttatccgcaacctggtcatgttacagccagaccggtcaataatgttacagtatattgaatcaattccaattctctatgtacaacttggacagacggtcga

SEQ ID NO: 299 - DNA, 21239 bp, unidentified
  misc_feature 1..21239: note = Fanzor polypeptide
  source 1..21239: mol_type = other DNA
tcgcaacgttgttgtcgatcgcctccactcggacctggagctgattggtgatgttgaagccgttgacggtggcattcttgtacgagaagcaccccttggctgtcattctgcacggcataacgtagtcatgtcagtgttgcgcattaaaactagaaaagtttacagccaacagtaacgatcttcccggccacttcctcccggccgatttttttaaatttctaatcaggatttagagcatccggaatgactcgctagcttgagacatcagcaccaaggaatcacaattcctctccatcccatgtttctcaaccagtcaaaatcggccgggaggcaggaacgcccattgacctcagactcagaactccacatcagactcagactcagaacccgcatcatcattagtgatgcaacaagaacccaccgggagagcgggcgtcccgaacacaccccggaaagcgtgcgtcatccgtacttgcgccccactccaatacttgtccaatgccgtctcgaacccatcgtacgtcacaaccacctcctgatcaaacatgcgccccagtgcgacaccgaacttgctgccccggctgttaccagtggtcttgccaaactgctgcgtggctgccactgtcatgccgtagtaggtgctaggcgcgcctgcccccccttgcatctgagcacctcgcagccttactgcgtccctggtaccttgcccatccttcaactgttgcaacccttcggcatcgcacatgttcagcaaccttacaaatgtgcctttgaacttctccgccacgcactcaattgcctcagctgtgaccagctgcttgaatgaacacacgagactaccgtgctgcggcgacccctgccacatgccatggccgcagaacaacaacacagccacctctgtgtcgtgggacaacaaccacttcaggtggtccaatacagcgctggacaacacctcgccctccagtgtttcaaaactgaaacccggccctaactggcggcgtagccctgctgcgtcgcgcgcaaaaccctcagtgctgtacttgcccaggtcactggggagcactcctgttttctccatcacgtatcgagtcctgatatccaacccaggcgtggcgtaactagggatgaccagcaaggcacgcttttgtctctgcatctgtgggggttacacttatttataccggttaatatttctctatgtatcatgcatgtccaataaagaaataatgatgcgggactcctaagcagcgtgatttttaagaggcgcgctccaccatccccaaaaaacacaggtttgttaagcagaaaaaaagtattggttcgcttgtgcatgcatgtatgtatgcacgaacgaacgaacgaacgaactatgatgagaacgacgacggcgccagagcagcagccgcagagtagttgtacttgttgtcatcgcacgcagatgtgtacgcggttacgcaatcagactgtgtctgagatgcgctgatgaccttcgcgtgtctctcgaaacagcgtgtagcgtaggccttgttgaccttttctgctacatgctttggtgatgacgcatgcgtggtgcacagcaggccagtggcctggcgattttttttgcactgtctagctccggacgaatcgagcaggacgatgcagcacttcgtattgcagaatggcagattgaggctggtgagcaggtcgtgtccaaagtggtacggggacaactctggaactagctgactcttcagcaggatattctcatgcatggtagtctcggagatgagcttcagctcatcgttatgcttgataagtgtctgattcttgatccgacagttctcgagctcgcgcaggagcgcatcgtagtcttcgactgtagtagtcatcggctcttcagacgcattggactcctccttgaaggagtcgtcctgcttgacgtggttgtagcagtatttactgccgtcagttacggtccgggaacatgggaaaccgtccttcttggtcccggcgcaagtgcagcgggcgttagaggtggttgttgtggatccagacatttcgggtatttcagtgagtgaatttggcgattacgtgtgttgtagttgttgttggttgttgtgctggagaaaacgtttcaatttttttcgaaacgtagtctatttggcgcgcggggtcctcgttgtcttatccgcgtttcaaataaagtggggcacaccttacaaactttcctcagactcctcaaaaaatatttgtagtgaaccacggaccctgtatctggtttcatgggaaatcttttaaacaaaccaggctttgattttttgtgttggatgaaaatgcatcgcatgtgtcatcaggtacacctgagcggcaattcgagacaacttaactgaatcccacctgagcgtacggcaccatgtcgcaaagtggtcacagttgcagcccagcaagtgatagaggccagagcaatcttgcagatccctgtgcagccccaacgccagtgccgccgagaactcccgaagctctggtgtgtcgctatcccaacacattacagcaagctcaggacagccggggacagccatgaattcgcccaatgtacgcagccggatcttggcctcttgtttgccagcatcctgtgagccccaaaaatcaaccacgagatttttacccccctgcactcctgaaatgggaccaacaaagattccatgatagaatctctccttgctacccgctgtccgaatgaggatctgatcgccagaaaggagctctgtggcaacttcagctatgtcaacgcggcgggctgactgcgggagcaagttgtgaatgcccatgacattcatcgcgccctccatgagggcgaaaacgtcattatcagcaccttctgactttacgcccaggatcttggccaccaacaacatcaggctgttcatctcgacaggcgttgttcacttattatcctggaaagttaataattgatgtcgagcagacgcctgctttagaagacacatcggaaaacgcccaagtgttccagtgataagctcaagtgttccagtgataagcccaagtgttccagtgataagctcaagtgttccagtgataagcccaagtgttccagtgataagcccaagtgttccagtgataagcccaagtgttcctgtgataagctcaagtgttccagtgataagctcaagtgttccagtgaccttcgagagtgcccattgaaggaccagccgccgcactgaagcgatcgcctctcttcctggacacgccgactgtagcttagttggttgcggttattatatgcatcgaattcccttgtcatgtgagtaaatgagcatcacacagacaacttgtaagccacaagtaatgtacattttagggcgcagggaaagtgggaagagtcacgctatcactcaacttattgctcaacattcaccacccactctaatattggtcatgacagaacataataaggagtaccatgctttacatacaccagaggcaacgttgtgtaaactgtctgaatctgaatcagaatcaccttcacttgacggtttcaatgtgctagcatttgatgacatccatctttttaatgtacaaggccgccaattgttacacaatgccatgcagtcgaaagctcgtgccgtcatcgtgtctgtctctcacccgtgcagcattcccctagccggtcgagacaccatcttacaactcagtcagtatcatgaccatcacggatctgaatgggtgaagatgttgaaggccacgtatgcattcaaattctacacttgacggaatactaaaatgaaaccgctttctggagtgtaaggcaaatgtagatgcaaatgtgcctggttctggaaaccaatccagccgtgtgcgagcatggagtagtgggacaccttgtatttcatgataaagtgtgcttaaggaaatgtggtgcatgattttatcaccaaaataataatgcaaacatagaatggatgcaaatcatcctttacctgttctacaaaatagtgcatgtacacccaatgacagtaaccacatcgtcaataatgtgctcaattatgtaaacaaatgcacaagtaaggtatcaatcattgtatttccagagtgtggcagcggatatcatgagtggaatgttttaatagccctcattcaaaccggttataacatcaatacagcgattttcatggatagccatatcgaaccccattcggtggacgagtggcttaggatgtctcaagtgcaccatgttgcgacaaaagtcgttgactcgtacgtagcgctggagcattggacgaaggagcaaacctccccaaacaaagtgtttgtaatttacatcaatggtgggctgaagttcggtgagtcgtattgtgccaaacatggatcctctgcatgtctcactgcggcggcacaattctggaagtggtgtgaccagaacgcagctaaccaactcacaattaatttcattggacgagacatgcgacaccctgccgattgcaagtcatggactgaattggctaacacgttcactaaactgtgatatacagtttgatacagttgttctcaaataaagtgggacaccttataatcatccagactgcagatcgttgcttttgggcaacgttggggggtgcagaaggttgaagaggttctcgaagatattccgagtagcctctttggtaaaccgttcaaccgtctgtgtccccatatcagtatcagggggtgggggtggggttgtcgaggaacttctcggcgcgtctcggcgaaacgcgagaggacgctctctcccaaagacttggtgaagtgtaagcatcaggatgttcctggaagcgttcacatcgcggtcccaagtcttcccgcagtgaagcataccaccgctctgttggcgtggcgctccgctttgactgcttttgcagtggagaatcttatgaatccgcttgcgtccttctgtacattcccaacctgtaccgtcttgcttcttacgatgagtgagtgccaccatgttgcaaaggtggttctcacagcagctgcatcgttgagatgttctgaactcatcgatgtcctccatgatgacgttttctcggctacgaagctcgaaacgaatagcttggagagggccacaagtccgcctagagattggcgtcgcccccagacctttccaatcaccaaacccgacgagtaccttagcactcttctctctcggagctacgaagtcagcaatctcaacaataagcttctgtttcttgcagtaccttcgaaagcggaggtttcggtaccccctggaagcacgatgggcaagaaggattggggcggcacccatgtagaatctggcgtacgcaccaatctgttcagaactcgaagagtctctatccggaatgataccaccgacgatatcagccgtctcgaggttccaaacgtcagtttgacgctgagacttgaagatcagacccttgcgataatattgcgccgagctgtacgatctggtacctccgttgagtcctgttacagtcacgatatcagtaacacccgggtctaccgcagccacgaccacattgtcaaggaaggatacaatgccaccctcgtatgttgtcacgtactcatgcgcccgcgtagagaacgcgtctgcaggcatcgaacatgtcagacacgtaggcttattcatcaagatgctgactgcaaagccgtctgtcacaatgcggtaaccgaacttccgagaaactgtctccactttcttgaggtttgcgaagcgctcccatattccttgatggtttttggaagcaacgtctgccttgcatgaatcaaagtggcactcgttgaccatatagaaaaaggccattttcgaaatcggaatgtgcgacagagtgaatccagatttgtaaggcaacaacgagaatgtgcgatgtttttcgtttttagtttttcgtttttcttcgatggtctccgacaatatcttgtggtacagaggcagggtcatgtgagcccgagtcgcaaaaatgtttccggatggtaaaggtagaacccccctgagacagaatgccacttcgcgtgcaaagaagcgtttcgcgttatctgcgtccaccctaaggttcttcgaggagagccaagcttcgctcaacttttcaagcctctcttgaagtttagtcaacctaacacgcaaaggggatccttctggttccttcctaccgaccctcttcttcgcaagagcaactgcactttttgccgatcgaagtctagatgttggaagcttggttggcagcttggttgtatgagggctcatcttgaagatgacgtcgagattctttgtagggcacttgatcaatgcagccacgatgtccgaccgcaggcgctttgcaatctgtgggtacttccacttcaagtaagtcgttatgcgtcgctcaaggttggtccaaagatggttagaggccattgtggccatgagaatagacaggtctgcaatgatctggttcttcacgttcccccgaatgtcaactttggattgccccggctctcttaacaagtcgaacagaagccgactactcttgaagtcttcgccaagagtcaaccccttacatttgttggtactgactgcaataaggcaccggtagaagaagttgcgatttacaggagggacagcgataccattctcaaaaagacgagcaatgtggaaatttgcgaaaatataaccctctccaagcaacttgttcatgtccagtaccagtgtgtctatcttgttacgaagccaatcatggggaataaaggtactcaatttcatcttgaccacacaaatcgctcgcccaggtgcacactcctcgtcttcctccccttcataatcgacaagttctgcaacgtcatcatgttggtcagcctcatgtaccaacgatgatgactcgccgatcccattctccatcacaaattgtaccccgaaaacgttttgatgtaatctggatctgcagacaggctctctcgaacattcctaacccaatctctcgtattaatcatatattttgacaagtctttatacctccacatttctagaacacaacatatttgcattaagtaatcgaaattacaggttgacgtcaatggacatgatgccctgtagtctctcttcatgcttccaaatatttgttcaatcgcattagctctggggcaataaggaggggtgtacaaaagcttccaccctttgcattcggatatatcctttatttctgaagaatggtgaaaccgaatattatccatgacgatcgtggttttctttgggatgaccaaagttttaaagaatttaatgaaatcttcttttttacaattgtgctccaataactgataatctattattccctgagatgaaatagcgagtaataaagtgaacttcacacgacggaggttactcattgtcttcgtagttaatctagaaccgatcttgctgtatccatatttgctgtgttctccagcgtaaaatcctgcttcgtcgatacaaacaacgttagagttttctctgtacttgtcacaaaacatttctacattttcttttgaatgtccgtagagaactgtgggaaacgccttcttcctagaaaatccacattgttttatgtgtctcgatgcagtactgatcgataatcttacattacaactcttgcaaattataccgaccaaatccttgcatgttatgaaggggttctctgcaatattattggatatcgtggaacgtaaaagcatggacaattctttcctttttcgttttaaacgcttacttttacccacctgatcagcattgacccatctatgtagtgagctcttggacacgttgtatatattacaaaccttcctgagactcctcaaaaaatatttgtagtgaaccacggacatgtacctggtttcaggggatatcattcaaattatactgagtgtcccaaaattatttgagaacaactgtatggtcgttaacaggttgatcctatccggcttgatacacacgactttctcttgagtagtgataatttaattctgcgattttgcaaaagagggggtctgagcatcttcctcatccggtgataccatgaggcaaagtagtaccattccctattaatccaattatcatgtacaactccatgacgcaattgatcaaacccatgcccgccttccaatccctccctgcacaagagcgacatggccactttgttgaatgacgatattgcaccaagtcgatatcgtgatcacagcattgctctcctctctgttgaagtctgtcatgcaatgcgtgtgaaggactttcagggcattctgaagcaccgatttctccgttgagttgatgacccacctttgtggaatcacaagcgcaaatcaaatcatacctgttgttgttgtttcgcagcatggctacggcagcttcaacagccgcatgcgccacccgcactgcctcatcagctcgctcagcagtttggacaagtgcagccaatgcagcattcttgtgtggccctccgtcagcgatgatgatgcctagcttagctggtgatgtattagtgaagtccatgcttattatctgtgtgcatgaaaaaatgaaagcagtgacaaataagatactgtgtacacaattataggctttaagtaataccgtgataaaatagggttgtcaagcagctaacaaaccagaattcgcccccgtacagacagttttagtatagatccgaattagatttgtgttagatacgtgtgcgtcggtatcacaccgtgcgcgacactcgatgcgatgagatgagatgagaaaacccgaattcaggccaaattcccatgaacacggcatccccttttgtgtgaggatccgccaaccttggtagctgtacgtggacaagacaacctagccgtcgcttagcggattcagctaaatgcagcccctgcatcaacaatcacctacacacccctttcgggggatatcgcatctcttcgatattgcgtcccattttttggtcgccttgccatatttcacaccttcattcgagcaatggacggcaccgcatcgcgcggtgcttgcgtgtttatcgaacgagctcatggcggttttggaattattggtcagcctcgccatgagttcatacagctagggacatttgattgtgggacaccttttattttgaaaagttgattatgggtataaggaaatgtgagtgcaatattgtatcaccatgagaagaagaagtagtgtcagacaaaggagaaggggctaaaacgtttgagaagcagaagatggtggtaaataacgtcaaggtccactaagtactgcactgtcacaacagtgtcaaaagcgcatccaatgtggctatagtgcaacctggaacctagacgtgaactctgctgaaccttcttctgcttctgataacgtggagcgaccggatgtattctgtgttccttcgccccccccccctaaaaccccagcttccggagaggcaaatgtgggcgctcaaccaaccgacccacctgggtcagttatcagcttacaattgttatcctctgggccagcttaaatgctgaaatacgggatgaaggacacgaaggattgggactttgatacaaaacctttagctgacctacccaatcaattgggttcaagggtcaccggtaagggtgtcccacaaattctgtctctgactgtaactgctacgacatttgctctcgatacaagatttgaggggcttttcagttttctcaatgacttcacctgcagccgatagtttatcgttgcattttgttacttttctgcactttgatgctttcatgcggagcgcgcctgcccactctatccattcatcaagcgtccgttcttttttgtcagaggcctcatgcttcataaacgcgacgaactcttcggacgtgtacgagtcgtccttctttccgcgtggacggggacctgtgtagcacacgatatcagatcgactcttcgtttatttttttgcttgaggtagttttggcattcaatgaatgtagggtataaggaaattgtccgttagtatagtatcactaaaataataatcactccctctcgatgggggtggtgacaaacaacggagatgacgacgatctggacatcatggtggtcaagaagacgcttaattctttgtgcatggatgtatcgaggcagcagatctgctcaaggatccaaagcatggtactcgtaatcaaccacgcagttgcagaggcatacttattcgcaaattttcacataaccagatgcctagatgatggagactttgatgtcaagcagttgccgcacctggatcgaaacttttattacaggtgcatccttgctgtctcgacatccaatgttcgaaaggatacgctgggacaaagcttgaaggatagcatggttgctttcgacgctctcaggcctgcaggctacttaaaggtggacgttcgtcaatggggacaggtaatcgcagacgtctcaatacaaatggcgacgatggcatgcaacagcgtctgggcaaacgtggacagggttgtaatcaagtacctgcgcttgaaacatccctcgttgaagaaacatttcaataagattgtcaaggcagtggtccagtatcctgactcggatatcgacaaaatcatcccagcgagtctcgtgcatgcgaacctcatcaaagacgttgtcagacgcctgagagatctcttgccgctgccaagggggaagcagttcaacactcgagcgcacctgacaatgagactgtttcatcacgtgcttacagagttgggagcggatctaaaagagaaaacaacaaaaaaacgcccccgtctgttcagtatccttccacgcaagagcggcttcaccatttcttacgtccctatatcgtccatgacactcatgaagcttctcagcattggcgattcgccgctcgagagcgtccgtggcgatggacgtcacgagaatcattccatgttgtggagaaagtacttcaatgtccaaggacttgagacgaaagggtctcgttttgacaaccgaatcctcagcgacggcaaaggggtctccgtccaaatgaagcatcaggtgggtaaagatatcgctggagaaggaggaggagataatgcggggtatcccaaagacgcaagtatcgaagactgccaggacgcttctttgcgccagggtgcgctgcgtgtcggtatcgacccgggtatgacagatatcgtcactatagcatcttctgacggtcgagtcgagtctttcagctctgcccactttagcgaagcagctgggtacaataccagaatttgagaagcagaagacggtggtgaagaacgttaaggtccacaaagtactgcactgtcgcaacagtgtcaaaagcgcatcatccaatgtgcgctgtggtgcaacctggaaccgagacgtgaacgctgccaagaaccttcttctgcttctgacgacgtggatggacgggaaagagcgaccagcggcattttgtgtgccctcctcatcgcccaccccaaaaaccacagtttccggagaggcaaatgtgggcgctcaaccaaccgacccacctgggtcagttagcagcttacaattgttatcctctgggccagcttaaatgctgaaatacgggatgaaggacacgaaggattgggaccttgatacaaaacctttagctgacctacccaatcaattgggttcaagggtcaccggtaagggtgtcccataaattctgtctctgactgtattttcggaaagcaaacgatcaattgttgcaaccctttgacaccatggacctacatcgcgcatggaattgaattagtaatgtgtgtgggtcagcacagagagatgttattgtattgcatgcattgtggggcacaacgcgcaccgcgtctattcatgagtgcactagcaagaatcacgcacttgaggttctcgatctcttcgtcctgcttggaaaccaagctcagcgcctggttcagtagacgatgttgctcatgcgtctgagccagtagctttttgtaagctagctgaacagcgtcagtacgcacgcgctctgcagccacggcatcagccacggcaacagccacggcatcatcgagttgggctttcgtgtacatttcggccatgatcagtcactgcacatgcattgccttgtctagggctgggtctctatattactattctactagtgtactgtactgtactgtaccgtacccctgtgaattcccccctccgtttgcgtgcgtgcgtgttccatgcgtgcgtgcgtgtctcttgttctcctgacgtcgtcgtcttgctccctcccccccatacatcatccgcgtgttccatgcgtcgtgtgtgtgtgtgtgtgtgtgaaaggggctccgccacttgttaaatgtggtacgttggcgacatatatcacttgacaagcagttttgaggttggttgcttgaggatgagaacaaagtaaggcaaattgtgtctgtattttgcgttatttgtagatggaagaaaggaaagaggaggcgaatgacgcgcattttgcacatcaacaaagaccccgtgtacttttgggccacggtactggggaagagtcgatcgcttaagtgcggctggtccttcaatggacactctcgaaagtactgacaaaataacgatacggagtctgcaggatggagagccgtgatctaaaaaagaaccacgatattctcgttaacatcctgcaatttgttgattcaaaatcgtattggtgttccactgccccgtgggttgctacaccatttggttacacaccgtacacgaggcggtttcattttagtattccgtcgactgtatgaagaggattcgtctacatgtttgcgtgggtcaatgagtgtcctgtgtgtgccattcgacagcagccgccgctacgcgtgtgtgagtgagtttaagttgtcaagtttaagttgtcgtcgactgtgatgtagtgtttggctgtcttcacaatactgtatcagataagacgatcttcctggaaaaattgtcacaatctagaacaaaaacgcaaattgcattctctccaaatccagccatagcaaatcataaccatagcaaataaaccctaaaccctttttttttttaacccgctccataccatgtttcgcaaccagtcaaaatcggccgggaggcaggaacgcccattatatgctaaatgcccattatgcacacgaagtatgacaaatggaatgtgtttgtgagggacaatcttaaatgcgtcttggacagtattgaaccctgtaagcacacacactgtcggcttcgacaatacggattcctcatttaaaaatcccatctgtaccaggtatccttatacccaatccataaaagtcctgaattaaaacccatgtcccccccggtgttgcaatgagaaaatgacggtcgcataaaaaagatccctatataattatctattagaaatcctcgaagcttaacacgagtcagcagctcaatttgagacaaacatggcatctcgggaagatccccttgccgacatcctcacatcagcaatcgcccacatcaagcgaatgcttccagattggtcacccccagacatcgggcacccatatgctaccctgacgccgtacaagagcggctatgctatgctcggcaagcttaagcctggcgcccagatcatggtaaaagacgcatccggttacaggcaccatggcatctttgtcgggcagcaagtggtggcaccaggggatatcgaagtcccgacagtcgttgatgtgtggggaatttctaaggagcaggccaacgtctccttgcgatcctacgaagacttcgttgccaacggctctatctttgcagaggctttgtaccccgaaggggctgctctggatcagaccctctcggcaagccttgccctcgctctagtcaaagatgctgagcaaaccccatttgtctacaacgccgcatttaacaactgcgagcactttgcaacgatgtgtcgctgcctcaggtgtgcatggaaggcatgccatctcatcattgacgcacagtttgctgaactgaatacattccctacatcacatctgcctccccgcggttttgtaggtatctgaatgaatcacaagcccataaccgtttggcctaagaatcgcagtagacggctcagtttatggcccttaccacatgaacacctctgaaaagactctccatctctggaacaacaattatttgagacataagcaccgaggaatcacaattccgctccatacaatgtttagcaaccagtcaaaatcggccgggaggcaggaacgcccattgaatgccggaggctcaaatcaatccctattttaaacggaaaatgaacaataatattactaaggatgacccgttgaacaattttacacatcattccatccatttttcaagtacgtcaacgaagtgagtcctgccagcggtgatatgtcgtccacgtcggtgttcgaactgtccaggtgaaccaacgaagtgagtcctgccagcggtgatatgtcgtccacacgtgtggacgacatgttcaggtgaatcaacgaagtgaggccggaaagcggtgatatgtcgtacacgtcggtgttcgaaatgtcgaggtgcaccaatggagtgagtcctgccagtggtgatatgtcgtccacacgtgtggacgccatgttcaggtgaatcaacgaagtgagtcctgccagcggtgataataggtcccgtgtgtacgccatgttcagatgaaccaacgcggtgagtccggaaagctgtgatagcgaaatgtctaggtgaatcaaagaagtgagggcggccagtggtgatatgtcggtcacaagtgtgtgcgccatgttcaggtgaatcaacgaagtgagtccgtacagagcttgtatgttgtacagaggtgtgtgcgacatgttcaggtgcgtcaacgaagtgagtccggacagcggtgataatatctcttcgtccacgtaggtgtgcgacatgttcaggtgcgtcaacgaagtgagtccgtactgtggcgatatgtcggtcacgtaggtgttcgatatgtccaggtgaaccaacgaagtgaggccggacagcggagatatgtcttggatcttgtcttcgatagccgacattgattggtagggtacgtattccccacgattgacacctattttcaactctttgagcctgcaaatgcgtgataatgcgtattccaaactgttataatgtcttaagtggatccttttgacacaccggggtgcggagcatctccactgtttgcaaacgagaggcacttgtttgaggtgggattcgttcgaaatcgcattggatagaatgatctccaatacattttcattgatttcgtcaaaggaactcattcgtttgtgaagtgtgctgtgctgtgctgatggttgtttatactgaagaatggttgtttacacttcagtagaggacgagaatccgccaccgcatccgtgtgtcatgaatgtacgtttgcgtgtgtcaatgagggcctgcgtgtgccattcgaccgtgttcggcctcttgtgtacactcctcctatacattcgtttgcgcgtgccattcggtgtccgatacattcgacagtgttccgccgtttgcgtgtgtcctccgatggacaagtcagatcctggggtttaaatatcaaaatttctaggacattgcgaatgtccaaattgacactaattgctgccgtttctgctaaaggattattgatgcgcacgatgttagacatcagtttgacttttcagggtactttgaacatgtaaattcagtgtctttagatgccttgaattttttgtgtcaatcacctgaagacagtatctgtattgacaagatcggttacaaatcttgaattggtcaacttttcagaatcccccaatataaggtgtcccaatatcaaatgtccctagctgtatgggtcttcctcctccaattcttagtaaatttcctggctgtggatattttgacagaagacgcgtccaccgcgattcacagctgtcacgatcatacgagaaattttcacatatccaagtgaggttccgtctttcaggtccatgtttatgagatgcggtagccaggacaaaagtctagtcgcgcccatagtggtctgctgtatggccttcgacaccttggcatgtccatactgggcaggggggggttgaggattttcggctccacaacgaaaagggtgttgatagcatgtgagaatacaagggcgcttccgttggcgatcttgtagcagccgtcatcgaagaagtactccacagcgacgaggaacaaacgtgacggtggggatgtgtggtgtctttgtttaataaggtgaagcaatgcgtcatacttcaagatgcgtggatcaccggaaacaaccgatgacgcccgcagtgcatggagacggctgacattctggcagtggaggcgatcaagaaacttggttgtgccgagactgtccatgtccagcgacaacgcctttcctagtttgcggactggttttgaaatgggctgacaaggtgggatatatatatcggtcggcatcgtgtcgatgaatactctttttcttcgcgcaatcgctcaatggtttttatcaggtatgtatgttgcgttgtttagactcgttttttagaaacgcacacgaaacacttgtcgtcgattaaagccgcattgagtcttacgcaaccgcattcactgtggttgctactgctgttcttttagtaccccattgctatttggggccattggctgccatgcaaaacatgcgatgtcccgtatgattctaagagcatcagaatcaccataaatcgtcttcccacaccacttgtaccgaattatttagagtgaccagtactttatgttcatatgtcccaattccgtgatacttcgtagcaagaataatgacgttagtctgcttatacttcctagcacagactttgtcaaatccccaccagaatccatcttcatccatccatgttctcttgttgtgcaactggcactggagctcgttaggaatgtatcgttcgatgtaatcactaccccattcaggcacgaggcctctcatgaggcgggccaattccaatgttttttgcatttcaattgtatcaagatgaacatcttggaccccagtgcaaatcaagtcggacgtacccgacacagtgatgtccgaagcgtaatctgtcattctatagttattctcaaataaagagggacaccctttataatgatggacgaggccgtcacatccaatccaccaaggagacaccaatcatcatcgaatcacatccaataagtgctcccccaagagtatcgacatcgttccgccgtttgatataagatgattttgtgcgcggtgatcgtctgaagacgtcttggtcagtcagtcgtcgtcttgtggtctgccatgtaaaaataattgtacaactctctcagactgcagccaactaactacttgaagcatgaacaaagggtgcttgattgaggcctctgcctgatgtaaggtgagaagcccaagtgttacactcagaccggtgagaagcccaagcgttacagtgaatggtgtacgcgagtcatcaaaatgaatccaatctgcccgcgctcccccttcagaaacaaatatatggggtgaaaacgattccatgtaaatacccacttattgtccagcagaagcctgcttgggaccattcggttttctttggatgacagtcctacggacctaccgtgaatgcgattgcgtaagatgcggtggctcattcaaaacacggaaacacaaaaacacacaaatttactaaacattggttagttcccctttacactcggacaagggaattatgttacataatatgccgagtcccccaaaatcctcttgtatgtgtttatcttctacacttcgctcgacactgcgttatgtaaagaacctgtcagcttgtaatcaattgtgcgtcctaccacaacttccagtttgcaatatttctttggcctcgggttgggtacattgtaaatcaattgtggatgttaatggctgcatttaggtcacggtttacaaacaacttgctgttatccatggtgtaactgcaccatagcaagcctcgaaccgtgcgcccttctttttcggactgcacactctggaggacggtggtgctgtccttgtgccagatctttgtggtacggaattcgtcaatgacggcaactcgccccttgaaacggtcgctaaacgcattgaacgcgctcgttgtagggacagaaagttcacccttgccaccaggggcaaacttagaagaaccgtatgcgatgacaattgttttcctctcaccgacatccgcctggacctcgttgaagaagcgtgctaagacacgtttcttaccaccgtagagccgcaggcgctgcgcgacacaccgcgacttggacatctccccccatcgagaatcccaatggttgaccattacagtcacgtaagcgtcaaacgactctagagatgtgcgcttgggactgttgtccttcaggtcgtcaaggcagtcctggatgttagacaaccacttcttggtcggacctctagatttgaagaccccgctctcaacgtagtaccgctcccgcgtgagtctcttgctcccaaactcgcagtgcctcttcctcttcctaccccccttatctttttcttcgaccttatttttcttccaagtcaaaaaggcaatgttgcagcggccagggtcgtttgcaacgacaaccacattggggtcggactcggaaaactcgcggagagtcttggtctgcttcttaatcgccgttccgtcgtccttgattgaaatctttttcttctcggccctaagaaagtgggtacaagccattacgccgtcagtgtctatggtgcatgtaaacacacctttcccagtagaacgggtgttttccacatcgaagaccgactcccagtgctccttgttcgtcagcgtcttttcgagactcttgacgagacccacgtccttgaggacgcccagtaggccgtcggtgtctatcgtgatgaaggagtgcttgactgttgggatgggagcgatgttgaccagcttggcgtagccctcgtcctctgtggcctcgaggtatcaattgataaagacgttgtaccggatcatcttggcgctgttggaaacgctcttaagccactgtcggttgatctcgtctcgtccgatgatcgagtgctgaatcttcagcaacatctttgttcgctccggtaggagcgaatgtatcgctatgaggtcttcctttactccccaagagtggatatcgtagaggaggtatcggtggaatacggtctcgtctatgccgtgctcatctttgaactccttggccaagatcctgttttccttcgagtaaacgaacttcttgatccatgtggagagatggactctgtagtggttattgaaattggtcaggtacttcttcgacgcgtggctgtacaggtttcgatcgccatcgtagcgagcgatggcacccacgtattgtttcttctttttcacaattacctcgcgcccctcaatcttctccctaaaccaatagttgttgtgaaagaacctttcgactgtggcgtccctcgtctccatgtgcgcctgtctcgaccccaccataagctgccgaatgtagttctggtcgacgctagggacacttacagtgtgaagttgcgcatctggtaccccttcgaagacttcttttaatatccggttcaccgcaacaccggcaagataagtcctcttggatacgctgtcgacccgatccttaatcaccttggtgataacgtccttgttgtccttatccgctatgatccgactcagtgtacactttaccacgttctcctcgccgtttttcctgtccttaattttggccgcccggtccggtcgcgtacgcttgtccggaggctctttattgactatcgtctccatttagtagccaatgtatctatttccttgtatcaaggtccagaaattgtattcaatgactttcgattttaacagaactcaaagccttatacacatcttggcttctatagaaatcgcgtttgacgatggagaacaccccttctattgggttgaaccaaggtgagtagggaggagtgtataggactcccacccccttgaagctgcaagtgttttgaccttcttggagtggtgaaaagcaacgttgtcaagtataattactgtgtcagttggacagtccaaattttctaaaaactcaacaaaagtatgcgtgttgaaagacccttgcctgatgttaaaataaatgtctccttttccttgttgaataagacaaaatgccgacattgtcgtcaccctaggtctcaacctcggtacaaccagtagctctccctttggtgagtagccaaacacgtctctcgtatgtcttccaaatgaagtttcgtcgatcgatacaaaagtcctcccttcctcttttaaccgttccctttggcttatgaatgacgtggttttctcatataagttatcaggcctggagaagaactttgcttttttctttgtgagcccaagcctttttatcacaacgcgaatcaattcttttgatacctcaaatccgaaagcatcctttaccttatgacgaagaacagcaagagatgcgaatggatctatttttaatgacgcctttaagaactctatgaccacatccgattttgtaggtttattccggttgtacacttttttagtggggtttgagatccacctcgagactgtcatgtggcttacattcgcaagtatagccactctcctcaaactttgcagcaatgtgtacatgtgtacaacaatcgaccgtctgtccaagttgtacatagagaattgtaattgattcaatatactgtaacattattgaccggtctgagtgtaacaaagggccttttctgggactgggtccctatattactattcaagcagaatcgccactcgcctgtgaaccattagccggccatccgaagatccctttcaaccttgcaggatacagcagtgccctcccactgccaccaggccagtgcctctgcaagagctcatcaaggcgctcgtaggttaagatcgactctgcgtcaaacattctgcccagggcagcgatgaagggtgtgcctgccttgccacctgccgtttcttcaaaagtcccagttgccaacaacatcacgtccttgtgtgcaacgcgatggaactgtgcatcatgatctgctcttgatgcgtcaagcagagatcttccgtgctggaacggcagaccaggggcaatggcattttcttcgcacatgttgagcacgcggatgagtgtgccgcaaaaacgttgc

SEQ ID NO: 300 - DNA, 21026 bp, unidentified
  misc_feature 1..21026: note = Fanzor polypeptide
  source 1..21026: mol_type = other DNA
cccacgtccttgaggacgcccagtagtccgtcggtgtctatcgtgatgaaggagtgcttgactgttgggatgggagcgatgttgaccagcttggcgtagccctcgtcctctgtggcctcgaggtatcgattgataaagacgttgtaccggatcatcttggcgctgttggaaacgctcttaagccactgtcggttgatctcgtcccgtccgatgatcgagtgctgaatcttcagcaacatctttgttcgctccggtaggagagaatgtatcgctatgaggtcttcctttactccccaagagtggatatcgtagaggaggtaccggtggaatacggtctcgtcaatgccgtgctcatctttgaactccttggccaagatcctgttttccttcgagtaaacgaacttcttgatccatgtggagagatggactctgtagtggttattgaaattggtcaggtacttcttcgacgcgtggctgtacaggtttcgatcgccatcgtagcgagcgatggcacccacgtattgtttcttctttttcacaattacctcgcgcccctcaatcttctccctaaaccaatagttgttgtgaatgaacctttcgactgtggcgtccctcgtctccatgtgcgcctgtctcgaccctaccataagctgacgaatgaagttctggtcgacgctagggacacttacagtgtgaagttgcgcatctggtaccccctcgaagacttcttttaatatccggttcaccgcaacaccggcaagataagtcctcttggatacgctgtcgacccgctccttaatcaccttggtgataacgtccttgttgtccttatccgctatgattcgactcagtgtacactttaccacgttctcctcgccgtttttcctgtccttaattttggccgcccggtccggtcgcgtacgcttgtccggaggctctttattgactatcgtctccatttagtagacaatgtatctatttcaaggtccagaaattgtattcaatgactttcgaaaaaaagcctctacgtgtttctctttaacataactcaaagccttatacacatcttggcttttatagaaatcgcgtttgacgatggagaacaccccttctattgggttgaaccaaggtgagtagggatccatcttagaaacgtattcttttgaattccattcgatttgtttggaattgtctatgaacttaatatttgatattgcgagtttaatatttgcttttttcgagtcctcgtctgtagcgtatgtgatataatgtcgtaaaatataatggcgttgcaaaactcaggaccgatcaaattatcagacctcgctgcccagttcggtcaaacggccgcagcgggacagaatctgaagctatcagaataccgcagaggcggagcatacggcgtgcttgcggcggtgggagcaaatgctgccgcacccaacgtgccatctaataattacaacatcaagattagcgatttttatggcgcttacaagatcaaaacaccggtattcaacacgatccccacgctgaccggcacgaacacgtcagcgaatgttacgttttcgatggcgagctacctagtcagctcgtccaaatatggcaccgtaacatggacgatgacgggcaaccccaccggcgtgacgataaactcctcaacgggcgtcatcacggtgacggcaggaacgatagtaaacaacagtatcacggtcactgccacgggacctggcgcgatccccgtatccaagacgttcacgatgacgctgacgacgacgactagtagcatcccatcgtttccaggagtgaataataacgcatttgtgtatgccgtcatacctggtggtccgcgcacagtgctcaactatttgcagtcattcggggtggcaaacacatccaccaacaacaataatagtttatggtttggggggcacgatacgctatactatgtaggggggcaaaacaatggaacagattttttctcactgtacaatcgtgcgagggtgatacaaggtgatggccacgcagacggaatggattgggtcgtgttcaatttcacgcaggacattaacggtgatttcgacggtaaatatctgacatctggttactttggcggggaaaacgcatcgagcggtggctcaatgggcatacaagaacttgacgtttacatatacgggtgggccaacaacgtctggaatattctatacaagctccctctgggcacaagaacatcgtcatttaaccacaccaacggtaattggttcatgtctggtgggacggttacttcgggatatggtaaatactctgactttgacagcttgaatgtgacagagataggttttggtgtttcgagtcgctttattgcgtcactgtcaccggtggtcgacacagctaaaacatcaattgagctcttaggggggactctgttttccacacccacagtcggagcgttagccgaacgactaacaaaaacgaccctgataacgggtgtagggcagtttaacaccgagaagcttgcggtcactttcacaaagctgtacggcatgtacttccttaacgacgtgcaacaatttacgatcgaatggacgttcacggacggaacaaacagcttcgactctttctttaacaaagccaataccacaaactatggcgccacatacacgtttagagtgttcaatgaatccggagggctaattttcacaagtgattcatctgtcagaaagtggtgcttcagcaactcgttcaattacgcaacgtttgcagatcgggtatatgtgtcgccagatgatggtatttggggcgccgcgatacagggaaacctggacggaaactcacccggtcttggtcttaataccaacactgggtggggtatacagaactttaatagcggggatactgcctattccggactattcaataactcagtgacgatcacatctggtacggcggtggcttttatatattcaattaatacttaacagtacacgtatttgaatttatacagatgaaaattctgctttcattctgcttcggtgtcgccaagtaataccaagacctcaaacaaacccaatgactcgcgtgtacggatatgacttgtggcgcgagaggccacccgagagcacttgacgcactttcttaggcagcccccccgttcgtccattcattcatctaccctaacccattgacaaatacagaatccgcctatctcttcacatgcgcggcgcaataccactcggcctatgtaagcaatggcgagctgttcgtatacggtcgcaacgactatgggcaactgggtctacagtcggcggaacagtaaaatgaaacatcccaataaacggtataaggcgtcgactatagtgtacgagtggatggtcctacaaaatggcccgtccagcaaagaaacctcctttcatgacgcattgcacatcaacaaagaccccgtgttcttttgggccacggtaccggggaagagtcgatcgcttaagtgcggctggtccttcaatggacactctcgaaagtaccgacaaaagaacgatacggagtctgcaggatggagagccgtgatctaaaaaagaaccacgatattctcgttaacatcctgcaatttgttgattcaaaatcgtattggtgttccactgccccgtgggttgctacaccatttggttacaccgtaaggtgtgccgtacactccagaatacggtttcattttagtattccgtcaagtgtactgtaatgtaaaagaatggtcccactttactttattttagaacaacacaaccgtgagaatttatataatgctcgacatcgaaattagtcacatactggatcgagtaaaagccggagaatgcaaatgggattggggtcaattgagtgataatccatacctgacatgggacgtcatgtcgagtaacccagacaaaccgtggaattggagtaaattgtgcttaaacccaaatgtcgtcacgtgggacatcgtgtcgagtaacccagacaaaccatgggattggtattggttgagcacaaacgccagtgtcgtcacgtgggacatcgtgtcgagtaacccagacaaaccatgggattggtattggttgagcacaaacgcgagtatttcgtgggacatcgtgtcgagtaacccggacaagccgtggaactggagtggattgagcacaaacccaagtgtagccacctgggacattgtctcgagtaacctggacaaaccatgggattggcggggattaagttcgaatcccggagtagccaattgggacatcgtgtcgactagcctggacaaaccatggggttggtattggttgagcacaaaccccagtgtagctacatggaacatcgtgtcgagtaacctggacaaaccatgggattggattggattgagcacaaacacctgtgtagccacaatggaaatcgtgtcgagtaacatggacaaaccatgggattggaattggttgagcacaaaccccaatgtcacatgggacatcgtgtttagtaaccgggacaagccgtggaactggcgtggattgagtgcgaatcccagggtagccacgtgggacattgtctccagtaacacggacaaaccatgggattggtattggttgagcaaaaaccccagtgtagcctcgtgggacattgtctcgagtaacccggacaaaccatgggactggcgtggattgagtgtaaaccccggggtagccacctgggatattgtctcgagtaacccggacaaaccatgggattggtattggttgagcacaccccccagtgtagccacatgggacatcgtgtcgagtaacatggacaaaccatgggattggtattatttgagcataaaccccagtgtagccacctgggatattgtctcgagtaacccggacaagccgtgggagtgggatggattgagtgcgaatcccggagtagccacttgggacattgtctccagtaacccggacaaaccatgggactggcatttattgagtagaaacctcaacatgttggtatccgtccaagacgcgtgccgtttagtgcgaagacgcagagccgcagcgactattcaggaaacatggagacacgtgaatacaaacccgagttatgttgtgtgccgacgcagactcttgaaagaattcattacactcccgttggtgagtacaatgtaagaagtagtatcccaaaacgcctctcgtacaatcagagacatttcagcatttaagctgacccaatccgcatcatcaacatgacacggcaatgcggtggcgtatcgttgtagttgttttcgggggtagctttttgtagttgttttcgggggtagctttttcccgatctgtctcattccattgagtttcgctgttttcaggtgcataaaaggttctaagttcatgatgtcaactcggtccccctccggtggtcgcgacaacattaggttacaccgcaaggtgtaccgtacactcaagtgtacaacgacattacgactgagcttacattggacatgagcggtgttgattgcttgatcgccagcatgcccaccgtctttctgagcgctgcgctgaatgcgtgtgatcggcaggtcagcataggtaccgacaaggtcagcccacagttccaccagctgttcattcggacatgtaatgagcgtacacatgaacactgtcatctggtgggactggtcagtctcttcattgcaacctgtgatcacatgtcaagcatgggtctgctatacaagcgctctcgtatatcgataggggaatcgcgggacagcttttagtatgaaacgcaacacattctgtgtttcctcgcctccccccaaaaccacagtttccatcgaggcgagtgtgagcgctaaaccgaccgacacacctgggtttgtcagcagcttgccttgttatcctttgggccagcttaaatgctgaaataaagagatgaagggcaaaaatatgtactcgcctttagctgatctacccattgggttcaagggtcaccggtagggtgtcccacaaattgcgtctccgactgtacttccgagagatccttgacagttcacatgcaaacgcaacggcggaaacctgtagcctctttctcgtccacacactcactctgaaaagagaaccagtcaaagtttcgccattttttttgtttttgtgtatttttgttttgcatgcgggggacctggttggtcatgggatggcatgtactccaccaggcgtgcacctgagtcctcgcgtgacactccgaacaggccattcaatccagcaattgcatcttcgcgttttacatcgatgtagtagttcttcacttgcttggatggttccgactcctgcatggttgcttgttgtacaatcggacaaggggattatatactgaattcacaacaacgtttacactcgtgtttcgaggaacggcgaccgaccactcgcatcacggcggcatctgtcgagtcgagtcacagcacactgtgatttcgcagacccgtaccgtccccacgttcgtccatccatcctcacacacaccaaggcggctttcgttgacttcgaggcgcgcgaaaaacgtggcagaaatgccacgtttacactcgtattttcatgggcgcgcgaacacacgtgtcagatatgctgacatgtttcccctggttgcgtatgccacccctcgcagaaaaagtctgccatgggtactaagaaaatggcgagcatcgaggctggcatgtggctgcatgtggattgcgtcaaccccatcggcatcaagttcgagcacgatggcattgtgagcgcccccccagaagggtattcctctgcagcagacatcaaggtcatccactatgcggggtcagagccccatggaaagcgattgatcagcgagactactctggcagagttcctggtagttggcagctctgcacgggttgtgaaagcgaggtgtcgtttctcaccgttggaggtggtcaaaagggcacgctcgcagctcggaagggcggattacaatgtgttgggaaggaactgtcagcacttcggtagctggtgctatgagggggcggctttttctagagaggtgttcaagtacggcgtcataggcaccagtttcggcctggtggtcagtattgtagggatcattgcaattgggatggcgcgggcatcttagtagaagccgccagccatgtgcgtactaaaatgatggagcaggaggacaacaccgaggtataggaactgcaataagtgggggaataaatactggcgctagcgtcacaagggaggtgcatgggcctcggtagtataaataaataatgagttgggattttataaaaagctatagaccatcctgtgcgcttgcatgcattgtacacacatgtttatagaacatgcattcgcacacgcgatcatcgttaatcctaacgcttcccgatgacattcttgatcgtattgccctattatcttccaacccaaagattgtattagtgtgtaaaactctgtgcaaaagattttctggatggccccttaccggactgatccaaccaccacaacgagttggagagatgatggcgaaaggggggcgcaccgaccttctagcagtatgcttggtgtccaatcctcttgtacaagttaagggggccctacaattgagggcgaaccaaaatgaaaacaagcttctctatgtggctgccaaggccggtcacgccgatgtctgcaagctgcttatggatccagaggttgctggacttgagttcagggcccttgcgaactatagctacagctttgccttgttggaggctgccaatgaaggtcacgcagatgtctgcaagcttctcatggatccagcggtggctggacttgagttcagggcccgggcgaactctagcgacagtagtgccttgtgggcggctgccaaggaaggtcacacagatgtctgcaagctgatgatggatccagaggtggctggaattgagtacagggccgtggcgaactctagcgacagcttggcattgtgggccgctgctagagaaggtcacgcagatgtctgcaagatgctcatggatccagcggtgtctggactcgagtatagggcccgggcgaactctaccgccagcagtgccttgtgggcggctgccaaggcaggtcacacagatgtctgcaagatgctgatggatccagaggtgtctggaattgagttcagggccagggcgaactctagcgacagctgggccttgtgtgcggctgcgaaggaaggtcacgcagatgtctgcaagctgctgatggatccagaggcggctggccctgagtacagggccctggcgaacaccagcgacagctgggcattgtgggccgctgctaaggacggtcacgcagatgtctgcaatctgctcatggatccagtggtggctggaattgagttcagggctagggcgaactctagcgacagcagggccttgcgtgaggctgccaaggcaggtcacgcagatgtctgcaagctgctcatggatccagaggtggctggacttgagttcagggctagggcgaactctaccgacagcagggccttgcgtgaggctgccaaggcaggtcacgcagatgtctgcaagctgctcatggatccagaggtggctggacttgagttaagggcccgcgcgaactctgtcaacagctgggccttgcggctggctgcgaaggtaggtcacgcagatctctgcaagctgctgatggatccagtggtggctggaattgagttcagggccagggcgtacactttcgacagcagagcattgtgggcggctgccaaggcaggtcacgcagatgtatgcaagctgctgatggatccagaggttgctggaattgagttcagggcccgggcgaactctagagacagctgggccttgcgtgaggctgccaaggcaggtcacgcagatgtctgcaagctgctcatggattcagatgcggctggcaccgagtacagctgagttgagacaaccaacgtctgtgtctttttgatcagacttccaatggcctcaaaaaccctttgttacactcagaccggtcaataatgttacagtatattgaatcaattacaattctctatgtacaacttggacagacggtcgattgtggtacacatgtacacattgctgcaaagtttgaggagagtggctatacttgcgaatgtaagccacatgacagtctcgatttgactggcgacattatgaaacatataattgcaaacggtatgcagataaaaacttcaaccaagtggccatgccgctctggttcagggagggattggaaggcaggcatggggttgatacattgcgtcatggagttgtacatgataattggattaatagggaatggtactactttgcctcatggtatcaccggattattaatcggtaaatagatacttgttcaagtgcagtttatgtttactgcaaattctaagaaagtgcagctcagttgaatgtagtccgaataagttagaaaatcggagggctgtctcgatattatgtggacgcgtttgactcatgttattaattgcatgcaagaaatcattttctttgaacacaagcaatctccccggttctctagttgtttgcatgtaaggtaaatcaacttgtatttcgttgaagtcttcacatatctccctgttcagatcgacatgtatgtagcagtcttgacgagaaacaactctatctatatcagacacggggtgagtggatgcctgaataaccaagcgacaatcgttcatattagttttctttttataattatcatcgccttatgctttttgacctgatttacttaaacccattaagcaaaatagtagtgagtaagattaaatttacaaatttccggtgttcctttcataccatacagctagggacatttgattgtgggacaccttttattttggggatttgaccaattcaagctttgtaaccgatcttgtcaatacacatactgtcttcaggagattgatacaaaacattcaatcatgataacgtgcgcgtattagggtataaggaaattgtctgacaatgagactgtttcatcacgtgcttacagagttgggagcggatctaaaagagaaaacaacaaaaaaacgcccccgtctgttcagtatccttccacgcaagggcggcttcaccatttcttacgtccctatatcgtccatgacactcatgaagcttctcagcatgggcgattcgccgctcgagagcgtccgtggcgatggacgtcacgagaatcattccatgttgtggagaaagtacttcaatgtccaaggacttgagacgaaagggtctcgttttgacaaccgaatcctcagcgacggcaaaggggtctccgtccaaatgaagcatcaggtgggtaaagatatcgctggagaaggaggaggagataatgcggggtattccaaagacgcaagtatcgaagactgccaggacgcttctttgcgccagggtgcgctgcgtgtcggtatcgacccgggtatgacagatatcgtcactatagcatcttctgacggtcgagtcgagtctttcagctctgcccgctttagcgaagcagctgggtacaataccagcaatcgtcgcacaaacaaatggaatgccgatacgcaagacctcgtgaagtccataccatcgccgactacgagcagtatgcacgacatgcaggaccatgtcagaggttacctcagcgcgctcccgacccttcaacaccgagccaacagaggttaccgatcgatgcgattctttcgatatgtgggcaaacagaagacgattgaaaaggtatgctatttgattgctccaaaagcacagaagaaaacgattgaagaaaaggtatgcgatgtgattgctccaaaagcaaagaagaccgttgttggcttcggcaactggtccaaccagggctatggcatcagtcgttcgtgttctggaccagtgaaagagatcaggaagtgcctttcacgtcgtcagaatgttctgttcaaaaacgtcgacgaacgcaacacttcttgtacttgccacggctgcttccagaagctcgtcacatgaaggcagacagcgtcgtctggcgcagagttcaaaacgagccctccgccctcatcgacggggctcctacaacaacaacaacgttgagaagcagaagacggtggtgaagaacgttaaggtccacaaagtactgcactgtcgcaacagtgtcaaaagcgcatcatccaatgtgcgctgtggtgcaacctggaaccgagacgtgaacgctgccaagaaccttcttctgcttctgacgacgtggatggacgggaaagagcgaccagcggcattttgtgtgccctcctcatcgcccaccccaaaaaccacagtttccggagaggcaaatgtgggcgctcaaccaaccgacccacctgggtcagttagcagcttacaattgttatcctctgggccagcttaaatgctgaaatacgggatgaaggacacgaaggattgggaccttgatacaaaacctttagctgaccaacccaatcaattgggttcaagggtcaccggtaagggtgtcccataaattctgtctctgactgtatcacattttagtgaacgtgttagccaattcagtccatgacttgcaatcggcagggtgtcgcatgtctcgtccaatgaaattaattgtgagttggttaggcgaacggaggaaacatgatcggataacgcacgcacggcggcggatgtcgagatgatgctgttgatgttgctggccacgcacccactcgcactcgtattgtcacgacacatgacgcatcatccatcctcacacagccttacacacgcgaatctgtccaactgcgactcattcaatgcgccgaacgaaccagaattcgcccccccgtacacacacgtggtggtggtgcaatgcatttgttcaggccaacaaaaatggggagacgttgattcattttgttcgtccaccgagtgtagagacatatcgacaaaacggaagaaaaagtccaatgatcgacactttgcaatatagtgtgttgcacggagtattatgtgcactgggtcctgcagacagtgtccggttggcatcatgctcgaaatctcttaaccattccgttatgagtttggcaagtcttgagactttgataccaatactacgggagcgattgaaggaggcttgttggtcactattacaagctgggtattgtgttggagtcaaaaatacacttgccagttccatatcgagcgcgaattcgatgaaacattcacttacacagataagatgttacacgaatgtgattatttcgtcatgggtgcacctgaaacaaggatgtatcgctttcaagctttgattagggaaactgtggtcaacaacatgaagatgtttggagaagtcttcgacaggtacatcatccatacaaatgcacggctgcagagaaagggcaatcgcccaacaatccgtgcgaagaagattgaaaaacatttcgctagatgcgccgaacaattatcacgagtcgcccaaaccatgagttcagatactacagtcgacggaatactaaaatgaaaccgcctcgtgtacggcacaccttacggtgtagcaacccactgggttgggtgggtggtgaacgttttggtcacgcgaaattgctatccaaaggaccgtaccagcagactgccgctgggaagacggacctgcaagactcgatgctgccggtgctcagtaaacatcgtgcagcgaatgagcagggtgaacccggcagaagcaagcaagtacgaggacgacgacgccttcctccagggaggcgccggctccgtcaccttcagagccatgcagggcatggcactgcatagccggacctgcgtcagggtcctcacggagaggggcgtgccgctgccagaggaactacggacgcactgtcaagattcacaatggccatgtactcggggccagccacatctggatccatcaaaagcaagcagacatcggcgtgaccagccttcgcagccaccatcaaggcccagctgtcgctagcgttcgcccgggccctgaactcaagtccagccactgctggatccatcagcagcttgcagacatctgcgtgacctgccttggcagccgcccacaatgctctgctgtcgaaagtgtacgccatggccctgaactcaattccagccaccgctggatccatcagcagcttgcagacatctgcgtgacctgcatgggcagccagccacaatgcccagctgtcgctagaattagccctggcatgaactcaagtccagccaccgcaggatccatgagcagcttgcagacatctgcgtgaccggcattcgcagccgcccccaaggcccagctgaggtagagttcgccagggcccctgaactcaattccagccacctctggatcacatcagcatcttgcacacatctgcgtgacctccttcgcagccagccacaaggccctgctgttagagagagttcgccctagcccttgaactcaattccagccaccgctggatccatcagcagattgcagacatctgcgtgacctgcattggcagccaccctgcccagggcccagctgtcgctagagttcgccacggcacttgtactcaattccagccacctctggatccatcagcagcttgagacatctggtgacctgccttggcagctcacgcaaggccactgctgtcgcttagagttcgcctggccctgaacctcaactccagccacctctggatccatgagcatcttgcagacatctgcgtgacctccataggcagcctcacgcaaggcaaagctgttgacagagttagccagggccctgaactcaattccagcaccgctggatccatcaacagcttgcagacatctgcgtggaccggccttggcagccacatagagaagattgttttcattttgggtcgccctcaattgtagggcccccctcaacctgtacaagaggattggacaccaagcatactgctagaaggtcggcgcgccccccctttcgccatcatctctccaaatcgctgtggtggttggatcagtccggtaaggggccatccagaacactcttttgcacagagtttacacactaatacaactctttgggttggaagagaatagggcaatccgacaagaatgtcatggggaactttctaataaggagtggaaacgtgatcgcgtgttcgatgcatgttcgatgaacggtgtgtacaggatgtataaataaacaatgagttgggataacacccataaactggttgccacttgcctggcgtttatctgcaagcggcactttcctggactggaaagcgacaagcgggcaagctgtaagagtcattgcctggcggtatctgcaagcgttagagtgttagaggaaactggccggggatctgcattatgttatcaagaccacatgccgccatcctcacacacgccgcctgggtgctgtagagattgttgattaccacaaccactcacttcattccagcacgcacttatcacagcaaactgcggaacactgtcgacttataaggcaatcatccacctccagccatggtcgtgctgccaatttctcctcacaccagtgaacatcccacgcacaagaccattcatggcatcaatattttgggtggtggcaccgattacaaactcttccagaaaaatcggccgggaggcaggaacgcccattaatggtgatgcaaaacaccatgcggaactgtattcaagataaagagggaattacagggattttcatagatttgaatttatgatgttctttactttgtctatgaaactgttacaataaccacctagatcgcttttaaattcagggctatgtatcaatgatttgttttgaagatatttcaaccattgattactcacaatcaaccattaaatgcaacttttcatcttattgcttgacaaggttcatcgttaatattgctgtgtagattaaatgggccgtataacacatctgcaactcattctatataagtttgtacccattgttaattgtaagttttaataaacttgtatattaatgagcgttcctgcctcccgctatttttgactgtggtgcgacaacatgtatggagaggaatggggatttccttggtgctgctatctaacttagcgagtcgttccaggaggaggctctaaatccctgattaggaaatttttaaaaaaaatcggcgggcgacaggacgccccactttattacgtttgggtgtacggttggggtgtttcgccaacactcgacggaatactaaaattacacggagttacggtacacctgcggctgttgtcacctcctgttgtcgcgaccccggaggggcggaccgtattgttgtctacaacaaatacgagttttatttatcaacaacacacgagatgcatgtgggaaatggacaagaggtcgtcctagacccatcaattccatgcccgtgcagcctttgctattgtgagagagaaagcgcgatccccgggtcgagtaaatgcctgtttcggaggaggaatagaaaaggtcctcgtgacctctgtgtaccagctcgatcgaattttgagaatcatcgacaagggaagtggcgaagccacccctcctgtgcttctcttgtgcgcctttatgtattgtacaacctccctaagtggtcgcaatcagcgacctttggcatcgttttcgatttcgtgtgaccaaaacgttcaccacccaacctaagcttacgtctgctgaacaaaacatggatcttgtaaacacgttcttttttttacccgtctcccacgacatacgagtcgttttgaactcattgtcacagaacgaaacgtcctctttgaaaattctttacacgatgcgaacatggcccccgtgggaactgccaacttctcccggtccaggcttcagcttacaaagtgttgctattacagatgtcgaggagctcatcaatactgtcacgtcacaaattcaaaatcatgatggaattggagaagacgatcttggacacaggacgccttcgcataacttcagttgccgacctccctgacattgcggtcgcatccactttggtttagggggaatggcgaagaagaatcttgaaacagccgcgtgaccatgataaccgcctcataaatgtccgacaatccgacatgatcggtcgcaagaacttgtgggtcgggggaatgtacgacagcagaatcttgacacaggacgcgtgaccatggatacatgccaccatcaatgccgacatcccatgattgtctgtcgccagcactgttcgtttggagagtatccaagaagaatattgacacatgctgcattcgcatgcccccctgaatgccacaagcacgcatcagtgccgacatcctccagattattcgtagcaagcacttgctcgttcggagagagttcctaatgagaatctcgaccagggagacgttgccctgtttcaccccccaatcaatgccgtctccccagagtaattcggaggcttgcaagacgcattgccgcctcgaaaatgcatcggatcgttatccagcatccgttcggcaaggaccacggcaccgatgtcgcattgcatgcggaacgtgtggtcttgtcgagggtttgcctctcgaatgcgagctccagacgatcggccatgcgaaacccgccgcggatggcctttgtggtgcaccaaacattgcgggttctcgccgcagagcgtcgcgatggacacggatttcaagggaacggtaaactctcaacgtggaaagatggagaagaagacaccgacaagacgaagacatttctcgttcgcggtggtggttgtgagccaaaccgaatgactagcggttttccaaaaagaggagatcatagggggctgtttaagtacgagaatcgatcaatctttacactcggctgtgaaaattgttgtgtacaggtcacactggaggcgtgtattttacagagttcaaatcagtcatgggatgtgagtatttgggggcggccttggagtgagacccatcctttttacactcgacggatactaaatgaaaaccgcttttggagtgtacggtacaccttgaggtctccgttatcaaccgtgagataagagaaacaatgctcaaacaatgtattcttgttgctaatggcatatattaaatggatataactcagttttgcaacacctccattcaatcgacacaaatctccacacaacttgtatgcattgtcagcaatggactacactaacaggcaagttcgccaaatattgaaaaattgcgaacggctaatcaaatggtatacaaaccaacgaaaaacaaactgaactcctcgatcaatcatttcagactacaacgtttgtacggaaccatggcctttcagaatttgcaatcaaatcatgcaattacccaatcttctacatgacaatgtccgaagatgccgatttgctggaatgtgacattttaataccatcgtttctcccgccacatgtataaattgtccaatactatgcatgactcctccgcgacaaacggcgggacactgtcgacccatacgtcccactctacagggttcgaaaacgttatgattcttatgaagagtttgacctaatccggcaagctcacggttgaaggagcccgcaccagatgcctggctgatgtcatgtgtagcgtttttcacggaccccacgtcttgcgcatcgtggcagaaaaacatgggttcgcataccgaataaaatagcttggtttacataagcgcaaagcccaaccttcacgggatattatacgagataatccattaaactatgcttacatcggactaaatagcacattcgagacggtgtcaaattatggaacaaaggggtggggatgagtaaatccagtagactctgtgacggtacgttacgacttgctatccagacaaacattggaattggtacgtggtcagcagaaatcctgaaaagaaacccctcatacatgggatattatacaagccaaccccgataaaccatgggactggcgtggattgagcggcaaaccccaaatttcatatgggatgttattaaagccaccctgctcaacatgggactggcgtgaattgagcgccaaacccacatatcacatgggtattataccaaccaacccagatactaaaccatgggtggtataatatcagccaataaacccttgcgtcaaaatggtttatgtcaaagccaaccccggacaaaccatgggaactggtgtggattgacgcggcaaaccccgcctcacatggggaggatcttataccaagccaccctgataaaccatgggtattggtttatttatgagccacaaccaccccaaattcgcactgggatattgttttccccccacatcaacccgaccaacactatggaattggacccctgggataagccaaaaccccaatatcacttgggtagttttacagcccacaccctgataaaccatggattgtcactggatcagcgcgaaaaccccaatcattcaccatgggaatgttgcatccacccgacaaacctggatggccctggtacagcggcacccccaatatcattgggcattttatcaagccaaaccccaccaaaacatggatttggtatgggtcagcaagaagaaacccccaacatcacagggtatatagccacagccataccccgacaacccatggaattggtactggatcgcaaaaaacgtacactacccatgtgacttttatccaaagccaaccccgaacaaacatggatggctggttgtggattgagcgcaaaccccatatctgggagttgtcgtgagcaaacgcgataacccatggaattggtagagttgagctcaaccaccaatatggtgtatctacccaagcatttgcgatatcatcgtcgatggtaggcagcagcaaccattcagaaaaatatgggatacgacaatacaaaccgagttatatgttgtcacaaacaggttcttaggattataatgaaatggtttattccatcaatttaaattatttattatctttcaatcgggccaacaaaatgtatcctcgatccacacgatcgtacgcggtggcttgcgaactccatcaagcgagtatgtagtcgatgagctcagccatactcgtctgtattatcccggctgtccctcacatgcaaagcaggaaggggcaacacaacgcaagtcactatctctatatgacgaatgcaaaggttgaaacaaaataacctcgcatctcgttgtttgccacaacaagatgcaaggaggatcgttgaacacacggcatgtggccgcgataatgggctcggcgtcctcaaatcccgagtagtaacaacatgatgtacctggtatcctgattgctgccgatcgctttcacaaatgaatcagtgttgcggagtccaagacagcgtcagactggttgcaagatgaaaatgcacgtcacgaagttggttgtttgtttgatccactctcagtggtgagggcatcggaaggctcagccgcaaaataacaatgaaggcaaaaactgttcctctgtgaggcatgtgtcgcttgcgacaacatcctccaagtggacacttcgccaccgttggtccgaacggcgcgggaggggatccatactgcacacaagacgatccggcacgagtcctcgtgagtttgccaccgtggaatcaacagatccacagtcaaccttcttctaagggcccgagcatcaccacgacatgaccaagttgagtgggttgtaagcaaacgcgaaaccccgtgctgtggtgccctggtaatccaacacctcacattcttgcccccaatggttccggcttcacgcatgtgcacccacaagtccttcgaatgtgaccctcggaaacataattgtaatccacatacaacagaagtgccttgttttgggatttaaatggcgaggaggattcggttgcttgatggatggggaaagcgggacgagtcgggtgactcatgtctggcggcaaaagttgatgatgatcttgcctctttcctctcctccccctcccttctttcgtttctctccggttttattgaaatatatttctccctaggatgtgggacccgtacacaaaaaacgcccgcagaggatgcaaaaagaaagacggatcaattctactaacccagggccagctagtgttggtgtatatgaaaccttcagcaactagcacgtcaagctgaacttgctgtcccttcgttttcccccaaatattatggagggcaatataaggtatattccagtcaactgaagggcaatcctttagatgatgagatgcgaatagagcattgcttgagtaccggtgtgtgtcgtatcaggaggacgaaaaaaaatattgactgtgtcttcaaagtttaaatatttatgagcgtgagcgtgtgtgtgtgtgtgtgtgtgtgtgtgtgtgtgtgtgtgtgtgtgggggggggggggggggggggacctaatgaaatcaactgtaagatagatcgtcttcagatgagctaactaactgtcagaaataactaactgtcaggacagaaattgttctcctctttcacattacatcaataaaacccctgattagtttggggaaccagaagaaacacaaaattttagcttcccatagccaaccagccagccatatgatattaaaggcatagctagactacgtcttcaagctcacaatttgaacgatgaatctgataggagtaccctcgttatagtagaacttgcaggtgctgtgaatcctgtgatatggtggatgtgtggtttacggtagaagagtggaagaaaatgaaatgtcctttatattccgaggataggaattcgcttcttgacaaagtgaactcctaggcagcgtcgcaagcgacgcggaaaattggcatgtaggttgttctcataataccactgtgcaggggcgagtctcaccctctgcgtctgaccccttacattgccgctgtttggccccggaaaaaaatgctcaacactcactcataccgccatggcagtgtgccaatcccacccatgcagccgtggtagtaccccaaacccacccatacagccatgcaa

SEQ ID NO: 301 - DNA, 20849 bp, unidentified
  misc_feature 1..20849: note = Fanzor polypeptide
  source 1..20849: mol_type = other DNA
gccatcaaggccatgctgtttatatggttcgccctggccctgtactcaagtccagccaccactggatccatcaaaagcttgcagacatctgcgtgaccttcctttgcagcctcacacaaggcccagctggccatatggttcgccctggcccttttctcaagtccagccacctctggatccatgagcagcttgcaaacatctgcatgacctttcgttgcagcctcacacaaggccctgctgtctctagagttcgccctggccctgaactcaattccagccaccgctggatccatgagcagcttgcaaacatctgcgtgacctttcgttgcagccgccaacaaggccctgctgtcgctagagtttgccctggccctgaactcaattccagccaccgctggatccatgagcagcttgcagacatctgcgtgacctgccttggcagcctcacacaatgccttgctgtcgctatagttcgcccaggccctgaactcaagtccagccaccgctggatccatcagcagcttgcagatatctgcgtgaccttcattggcagccagccacaatgcccagctgtcgctatagttcgccctggccctgaactcaagtccagccacatctggatccattagcatcttgcagacatctgcgtgaccttccttggcagccacatagagaagcttgttttcattttggttcgccctcaattgtaggaccccgttcacctgtacaagaggattggacaccaagcatactgctagaaggtcggcgcgcccccctttcgccatcatctctccaactcgctgtggtggttggatcagtccggtaaggggccatccagaaaatctgttgtgcagagttttacacactaatacaatctttgggttggaagagaatagggcaatacgatcaagaatgtcatggggaaacgttgggaatggaaacgatgatcgcgtgtgcgaatgcatgttcgatgaacatgtttgtacaatgcgtgcaagcgcacaggatggtataaataaatactgagttgggataaaccctataaaccctataaaccctataaaccctgggttgcacttgcctggcatgaaagcgacaagcggcacttgcccggcggtatctgcaagcggtacagaatgggtgttcctgcctcctggcgatttttttgaattttccaagcagaagttagagccgtacaaacgactcactcactcgccaaccagagatttagttctccgtggaattgcgattccgaccagaccaggctccgaaaccagtcaaaatacctccgtgaggcaggaactgtactggtgcaaattgtcaatacaacagatattgtcttcaggagattgacacaaaacattcaaggacatagaagttacatcttcaaagtagcctgaaaagtcaaagtgctggctcacatcgtgcgcatcaatcattttcaaagagtttcctgcctcatcataatcaaatatttctgctacatctggaattattgggcacacgcagcgagaaaactgaacacattgctgaaaagtttgaggagagtggataaatacatgctctacggtggcaataaacgtgtctttcctacactcgggcaagggaattatgttacataatatgccgagtcccccaaaatcctcttgtatgtgtttatcttctacacttcgctcgacactgcgttctgtaaagaacctgtcagcttgtaatcaattgtgcgtcctaccacaacttccagtttgcaatatttctttggcctcgcaagaattccggggcgggttgggtacattgtaaagcaattgtggatgttaatggctgcatttaggtcacggtttacaaacaacttgctgttctccatggtggaactgcaccatagcaagcctcgaaccgtgcgcccttctttttcggactgcacactctggaggacggtggtgctgtccttgtgccagatctttgtggtacggaattcgtcaatgacggcaactctccccttgaaacggtcgctaaacgcattgaacgcgctcgttgtagggacagaaagttcacccttgccaccaggggcaaacttagaagaaccgtatgcgatgacaattgttttcctctcaccgacatccgcctggacctcgttgaagaagcgtgctaagacacgtttcttgccaccgtagagccgcaggcgctgcgcgccccaccgcgacttggacatctccccccatcgagaatcccaatggttgaccattacagtcacgtaagcatcaaacgactctagagatgtgcgcttgggactgttgtccttcaggtcgtcaaggcagtcctggatgttagacaaccacttcttggtcggacctctagatttgaagaccccgctctcaacgtagtaccgctcccgcgtgagtctcttgctcccgaactcgcagtgcatcttcctcttcctaccccccttatctttttcttcgaccttatttttcttccaagtcaaaaaggcaatgttgcagcggccagggtcgtttgcaacgaccaccacattggggtcggactcggaaaactcgcggagagtcttggtctgcttcttaatcgccgttccgtcgtccttgattgaaatctttttcttctcggccctaagaaagtgggtacaagccattacgccgtcagtgtctatggtgcatgtaaacacacctttcccagaagaacggatgttttccacatcgaagaccgactcccagtgctccttgttcgtcagcgtcttttcgagactctcgacgagacccacgtccttgaggacgcccagtaggccgtcggtgtctatcgtgatgaaggagtgcttgactgttgggatgggagcgatgttgaccagcttggcgtagccctcgtcctctgtggcctcgaggtatcgattgataaagacgttgtaccggatcatcttggcgctgttggaaacgctcttaagccactgtcggttgatcttgtcccgtccgatgatcgagtgctgaatcttcagaaacatctttgttcactccggtaggagcgaatgtatcgctatgaggtcttcctttactccccaagagtggatatcgtagaggaggtatcggtggaatacggtattcgtgtaatccggttgtacacttttttagtggggtttgagatccacctcgagactgtcatgtggcttacatttgcaagtatagccactctcctcaaactttgcagcaatgtgtacatgtgtacaacaatcgaccgtctgtccaagttgtacatagagaattgtaattgattcaatatactgtaacattattgaccggtctgagtgtaacacaagacctagctgctgtcaagattcacaagggccctgtactcggggccagccgcctctggatccatcaaaagcgagcagacatcggcgtgacctgccttggcagccgcccacaaagccctgccgtctctagagttcgccctggccctgaactcaattccagccaccgctggatccatgagcagcttgcagacatctgcgtgaccttcactggcagccgcccacaaggccctgctggcgctagagttcgccctggccctgaactcaagtccagcgactgctggatccatgagcagcttgcagacatctgcgtgacctttcgttgcagcatccaacaaggccctgctggcgctagagttcgccctggccctgtactcaagtccagccacctctggatccatgagcagcttgcagacatctgcgtggcctgcattggccgcagcctccaaggccatgctgttgacagagttcgcccgggccctgaactcaagtccagccaccgctggatccatcagcagcttgcagacatctgcgtgcccttcctttgcagcctcaaacaaggcccagctggccatatcgttcgccctacccctgtactctagtccagccacctctggatccatcagcagcttgcagacatctgcgtgaccttcccttgcagccgcccacaaggccctgctgtcgatagagttcgccctgcccctgaactcaattccagccacctctggatccatgagcagcttgcagacatctgcatgacctgcattggcagccgcccacaatgcctagctgtctctagagttcgccatggcccttagctcaattccagtcaccgctggatccatgagcagcttgcagacatctgcgtgaccttcctctgcagcaacccacaaggccctgctttcgctagagttcgccctggcccttagctcaattccagccaccgctggatccatcagcagcttgcatacatctgcatgaccttcccttgcagccgtccacaaggccctgctgtcgatagagttcgccctgcccctgaactcaattccagccacctctggatctatgagcagcttgcagacatctgcatgacctgcattggcagccgcccacaatgcccagctctctctagagttcgccctggccctgaactcaagtccagccaccgctggatccatcagcagcttgcagacatctgcgtgaccttccttggaagccacatagagaagcttgttttcattttggttcgccctcaattgtaggaccccgttcacctgtacaagaggattggacaccaagcatactgctagaaggtcggcgcgcccccctttcgccaacatctctccaactcgctgtggtggttggatcagtccggtaaggggccatccagaaaatctgttgtgcagagttttacacactaatacaatctttgggttggaagagaatagggcaattcgatcaagaatgtcatggggacacgtaaggagtggaaacaatgatcgcgtgtgcgactgcattttcgatgttcatgcatgcaagcgcacaggatggtataaataaataatgagttgggataaaccctataaaccctgggtttcactttcctggcatgcaagaggcaagcggcaagaggcacttttcctggcggtatctgcaagcggtatagaatgggtgttcctgcctcccggcgattcttttgaattttcaaagcagaagttagagccgtacgaacgactcactcactcgccaaccagagatttagctctccgatgaatttcgattccgaccagaccagtttccaaaaccagtcaaaatccctccgggatgcaggtcacacgaaatcgaaaactatgccaaaggtcgctgattgcgaccacgtaggggtaaggttgtacaataaacgtaaaggcgcacaagagtagcacaggaggggtggcttcgccacttcccttgtcgattctcaaaaatcgatcgagcggtacccagaggtacgaggactgcgattctctccagaaacatgcatttactcggaccgggatcgctcttctgctctcacaatcgcaaggctgcactgcatggaattgatgggtctaggacgacctcttccatttgcccacagcagctctgttgttgttgatgaataaaaactcgtattgttgtagacaccactcggtccccctccggtggtcgcgacaacattaggttacaccgcaaggtgtgccgtacacgaagcggtttcatttaagtattccgttgactgtagtgcaaattgtcagtacaacagatattgtcttcaggagattgattgacacaaaacattcaaggactgttacatcttcaaagtagcctgaaaagtttgagtagagtggataaatacttgctctacggtggcaagacccagctgctgtcaagattcacaatggccatgtactcggggccagccgcctctggatccaccaaaagagtgcagacatctgcgtgcccttcctttgcatcctcccacaatgcccagctgtcgtgagagtccgcccgggccctgaactcaattccagccacctctggatccatcaaaagagtgcagacatctgtgtgacctcctttctcgcccacaaggcccagttgttgacagagttcgcccgggccaagacccagctgctgtgaagtttcacaatggccctgtactcggggccagccacctgtacatccatcaaaagcaatcagacatctgcgtgaccttccttggcagcctcacacaatgcccagctgttggcagagttcgccctggccctgtacttgtgtccagccaccgctggatccatcagcagcttgcaaacatctgcgtgacctgccttggcagcctcccccaaggccctgctgttgatatagttcgcccgggccctgtactcaattccagccaccgctggacccatgagcagcaagcagacatctgcgtgacctgccttggcagcagcccacaaggccctgctgtgcgtagagtttgccagggccctgaactcaagtccagccacctctggatccatcagcagcttgcagacatctgcgtgacctgccttggcagcctcccccaaggccctgctgttgatatggttcgcccgggccctttactcaattccagccaccgctggatccatgagcagcaagcagacatctgcgtgacctgcctttgcagccgcccccaaggccctgctgttgatatggttcgccctggccctgtactcaagtcctgccacctctggatccatgagcagcttgcagacatcggcgtgaccttccttggcagccagccacaatgccctgctgtttatatggttcgccctggccatgtactcaagtccagccacctctggatccatcagcagcttgcagacatctgcgtgaccttccttggcagccgcacacaatgccctgctgtctctagagctcgccagggccatgtactcaattccagccaccgctggatccatgagcatcttgcagacatctgcgtgaccttccttggcagccgcacacaaggccctgctgtcgatagagttcgccctggccctgtactcaagtccaaccacagctggatccatgagcatcttgcagacatctgcatgaccttcattggcagcctcccacaaggccctgctgtcgctagagttcgccagggccctatactcaagtccagcaaccgctggatccatcaaaaacaagcagacatcggtgtgaccttccttcgcagcctcacacaaggcccagctgtcgctagcgttcgcccgggccctatactcaagtccagccacctctggatccataagcaggttacagacatctgcgtgaccttctctagcagccgcccccaaggctctgctgttgatattgttcgcccgggccctgtactcaattccagccaccgctggatccatgagcagcaagcagacatcggcgtgaccggccttggcagcctcacacaaggccatgctgtctctagagttcgccagggccatgtactcaagtccagccaccgctggatccatgagcagcttgcagacatctgcgtgacctgccttggcagcctcccacaaggccccgctgttcgtagagttcgccagggccatgtactcaagtccaaccacatctggatccatcagcatcttgcagacatctgcgtgacctgcataggcagcctcacgcaaggcccagctgttcatatggttcgccttggccctgaactcaattccagccacatctggatccatgagcagcttgcagacatctgcgtgaccttccttggcagccgcccttaatgccctgctgtttctagagtttgccagggctctatactcaagtccagccacctctggatccatgagcagcttgcagacacatgcgtgacctgccttggcagccagccacaagaccatgctgttgatatggttcgccctggccctgaactcaattccagccacctctggatccatcagcagcttgcagacatctgcgtgaccttcattggcagccacatagagaagcttgtttttattttggttcgccctcaattgtagggccccatcaacttgtacaagaggattggacaccaagcatactgctagaaggtcggcgcgcccccctttcgccatcatctcttcaactctctgtggtggttggatctgtccggtaaggggccatccagaaaatctgttatgcagagttttacacactaatacaatcttggggttggaagagaatagtgcaatacgatcaagaatgtcatggggacacgcaaggagtggaaacgatgatcgcgtgtgcgactgcatgttcgatgtaactacatctttctttattactttaagtacagaatgggttttcctgcctcactgcgatttttttgaattttcaaagcagaagttagatccgtacgaacgactcactcgccaaccagagatttagctctctgcggaattgcgattccgaccagaccaggctccgaaaacagtcaaaatccctccgggaggttgcaacagttgacttgtttgctttccgaaaataagtaaacctaacaggaatttgcatgtaatgggcgttcctgcctcccggcgattattttgaattttcaaagaagaagttagatccgtacgaatgactcactcgccaaccagagatttagctctccgaggaattgcgataacgaccagagcaggctccgaaaccagtcaaaatccctacgggacgcaggaacaaatcagggccgatagttctaagggagtacatacagctagggacatttgattgtgggacaccttttattttggggatttgaccaattcaagctttgtaaccgatcttgtcaatacagatactgtcttcaggagattgatacaaaacattcaaggcctgtacagacacagaagttacatgatcaaagtagcctgacaagtcaacgtgttggcttacatcgtgcgcatcaataatcattttcaaagcgttcctgtaatcaaataattctgctacatctggaattattgggcacgcgcagcgatattttcgcttgagcaaactgaacacattctcaatagcgttgaactctggactgtaaggaggtacaaagagcgggcgtattcctacagaatcgaacgcagagatcgtctcctttgaatgatggaactggatattgtcaaggacagcgacagtaccctgctttacatgtaactctgatacaaactgtacaaattcgactttcttgcaattgtgatcaaggatcttgtaatgaacgatacctttgacagaaacggcagcgacatcttgatagaggacagagacgtcacaccctctgcaagctgagacattgtcaagaatggattggagtcgatcagtttttttatagcaaccttgatatcttcggtaatgacgctcgcccgtttcttccaatgatgttttatattggctttggtgacccaacgttggagtgacgattttgatactttgtacgacagactaactttcctcaagctacgattatagtatttgtagtgaacaaccgcgcgatgtcttacctctgcatcaatcatgataacgtgcacgtattagggtataaggaaattgtccgttagtatggtatcaccaaaataataatcactccctctcgatgggggtggtgacaaacaacggagatgacgacgatctggtcatcatggtggtcaagaagacgcttaattctttgtgcatggatgtatcgaggcagcagatctgctcaaggatccaaagcatggtactcgtaatcaaccacgcagttgcagaggcatacttattcgcaaattttcacataaccagatgcctagatgatggagactttgatgtcaagcagttgccgcacctggatcggaacttctactacaggtgcatacttgcggtctcgatatccaatgtccgaaatgatacgctggaccagagcttgaaagatagcatggttgctttcgacgctctcaggcctgcaggctacttaaaggtggatgtttgtcaatggggacaggtaatcgcagacgtctcaatacaaatggcgacgatggcatgcaacagcgtctgggcaaacgtggacagggttgtaatcaagtacctgcgcttgaaacatccctcgttgaagaaacatttcaataagattgtcaaggcagtggtccagtatcctgactcggatatcgacaaaatcatcccagcgggtctcgtgcatgcgaacctcatcaaagacgttgtcagacgcctgagagatctcttgccgctgccaagggggaagcagttcaacactcgagcacacctgacaatgagactgtttcatcacgtgcttacagagttgggagcggatctaaaagagaaaacaacaaaaaaacgcccccgtctgttcagtatccttccacgcaagagcggcttcaccatttcttacgtccctatatcgtccatgacactcatgaagcttctaagcatgggcgattcgccgctcgagagcgtccgtggcgatggacgtcacgagaatcattccatgttgtggagaaagtacttcaatgccaaggacttgagatgaaagggtctcgttttgacaaccgaatcctcagcgacggcaaaggggtctccgtccaaatgaagcatcaggtgggtaaagatatcgctggagaaggaggaggagataatgcggggtatcccaaagacgcaagtatcgaagactgccaggacgcttctttgcgccagggtgcgctgcgtgtcggtatcgacccgggtatgacagatattgtcactatagcatcttctgacggtcgagtcgagtctttcagctctgcccgctttagcgaagcagctgggtacaataccagcaatcgtcgcacaaacaaatggaatgccgatacgcaagacctcgtgaagtccattccatcgccgactacgggcagtatgcacaacatgcaggaccatgtcagaggttacctcagcgcgctcccgaccctccttcaacaccgagccaacagaggttaccgatcgatgcgattcttttgatatgtgggcaaacagaagacgattgaaaaggtatgcgatttgattgctccaaaagcacagaagaaaacgattgaagaaaaggtatgcgatgtgattgctccaaaagcaaagaagaccgttgttggcttcggcaactggtccaaccagggctatggcatcagtcgttcgtgttctggaccagtgaaagagatcaggaagtgcctttcatgtcgtcagaatgttctgttcaaaaacgtcgacgaacgcaacacttcttgtacttgccacggctgcttccagaagctcgtcaacatgaaggcagacagcgttgtctggcgcagagttcaaaacgagccctccgccctcatcgacggggctcctacaacaacaacaacgtttgagaagcagaagacggtggtgaagaacgttaaggtccacaaagtactgcactgtcgcaacagtgtcaaaagcgcatcatccaatgtgcgctgtggtgcaacctggaaccgagacgtgaacgctgccaagaaccttcttctgcttctgacgacgtggatggacgggaaagagcgaccagcggcattttgtgtgccctcctcatcgcccaccccaaaaaccacagtttccggagaggcaaatgtgggcgctcaaccaaccgacccacctgggtcagttagcagcttacaattgttatcctctgggccagcttaaatgctgaaatacgggatgaaggacacgaaggattgggaccttgatacaaaacctttagctgacctacccattgggttcaagggtcaccagtaagggtgtcccataaattctgtctctgactgtaagtagtcaccaagtcataaaacgcttgagagcaccgcaattcatgctgacactccacctatgacacaggtgacatacaatactggtgcaaatttgtcttcttacattaaggaattcaagtttcatcaagttttgtaaccgatcttgtcaatacaacagatattgtcttcaggaatctgcctaacacaagacctagctgctgtcaagattcacaagggccctgtactcgggtccggacgcttctgtatccatcaaaagcaagcagacatcggcgtgaccttctttggcagcctcacgcaaggcccatctgttgacagagttcgccctggccctgaactcaactccagcctacgcttgatccatgagcagcttgcagacatctgcgtgaccgtccttcgcagccgcccccaaggccctgctggcaggagagttcaccctggccctgaactcaattccagccacctctggatccatcagcagcttgcatacatctgcgtgacctgcattaacagccgcccacaatgcccagctgtcgttagagttcgccctggccctgaactcaagtccagccacctctggatccatgagcatcttgcagacatctgcgtgaccttccttggcagcctcacacaaggccctgctgtcgctaaagttcgccagggccctgaactcaattccagccaccgctggatccatgagcatcttgcagacatctgcgtgaccttcattggcagccgcccacaatgcccagctgtcggtagagttcgccctggccctgaactcaactccagccacggctggatccatcagcatcttgcagacatcggcgtgaccgtcctttgcagccgcccacaaggacctgctggcggtagagttcgccctggccctgaactcaagtccagccacctctggatccatcagaagcttgcagacatctgcgtgaccgtccttggcagccgcccacaatgccctgctggagctagagttcgccctggccctgaactcaagtccagccacctctggatccatcagcagcttgcagacatctgcgtgaccttccttggcagccgcccccaaggccctgctggcggtagagttcgccctggccctgaactcaattccagccaccgctggatccatcagcagcttgcagacatctacgtgaccttcctttgcagcctcacacaaggccctgctgttgctagagttcgccacagccctgtactcaattccagccaccgctggatccatgagcagcttgcagacatctgcgtgacctgccctggaagccacatagagaagcttgttttcattttggttcgccctcaattgtaggcccaccttaacctgtacaagaggattggacaccaagcatactgctagaaggtcggcgcaccccccttttgccatcatctctccaactcgctgtggtggttggatcagtccggtaaggggccatccagaaaatctgttgtgcagagttttacacactaatacaatcttggggttggaagagaatagggcaatacgatcaagaatgtcatgggaaaacgttaggaataccgatgatagcgtgtgcgactgcatgttctacgaacatgtgtgtacaatgcatgcaagagcacaggatgaaaacctaaataatgagttgggttaaactctataaaccctataaaccctgggttgcactttcatggcatgcaagcggcacttgcatggcggtatctacaagcggtacagaatgggtgttcctgcctcccggatatttttttgaattttcaaagcagaagttagagccgtacgaacgactcactcgccaaccagatatttagctctccgcggaattgcgattccgaccataccaggctccgaaaccagtcaaaatacctccgggaggcaggaacaaatgtacaggtgcaaattgtctttcttacttacattaaggaattcaagtttcatcaagttttgtaaccgatattgtcaatacaacagatattgtcttcaggagattgacacaagacattcaaggactgtaaagacatagaagttacatcttcaaagtagcctgaaaagtcaaagtgctggctcacatcgtgcgaatcaataatcattttcaaagagttcctgcctcagaatcaaatatttatgctacatctggaattattgggaacacgcagcgatattttcacttgagcaaactgaacacatttctgaaaagtttgaggagagtggataaatacttgctctacggtggcaagacccagctgctgtcaagattcacaatggccttgtactcggggccagccgcctctggatccatcaaaagcaagcagacatcggtgtgaccggccttcgcagcctcacgcaaggcccagctgttgacagagttcgcccgggccctaaactcaagtccagccacatctggatccatgagcagcttgcagacatctgcgtgaccggacttcgcagcctcacgcaaggcccagctgttgacagagttcgccagggccctgaactcaattccagccaccgcaggatccaacaaaagcaagcagacatcggtgtgaccggccttcgcagccgtccccaaggccctgctgtcgctagagttcgcctgggccctatacttaagttcagtcacatctggatccatgagcagcttacatacatctgcgtgaccttctttggcagccgaccccaaggccctgctgtcgaaagtgttcgccctggccctgtacttgagtccagccacctctggatccatgagcagcttgcatacatctgcgtaaccttcctttgcagcctcacgcaatgcccagctgtcactagcgttcgcccgggccctgaactcaagtccagccacctctgtatccatcagcagcttgcagacatctgcgtgaccttctttggcagccacccacaaagccctgctgtctctagagttcgcccgggccctgaactcaattccagccacctctggatccatcagcagcttgcagacatctgcgtgaccttcattggaagccgccctcaaggccatgctgttcatatggttcgccctggccctgtacttgagtccggccactgctggatccatcagcagcttgcagacatctgcgtggccttctttggcagccgcccacaatgcccagctgtcgctagagttcgccctggccctgaactcaagtccagccacctctggatccatgagcagcttgcatacatctgagtggcctgcattggctgccgaccccaaggccctgctgtcgctagaattcgccccggctctgaactcaagtccagccacctcttgatccatcagcagattgcagacatctgcgtgaccttccttggcagcctcacgcaagccctagttgtcgctagacttcgccagggccctgaactcaagtccagccaccgctggatccatcagcagcttgcagacatctgcgtggccttccttggcagccagccacaatgcccagctgtcgatagagttcacccgggccctgaactcaattccagccacctctggattcatcagcagcttgcagacatctgcgtgacctgccttggcagccgcccacaatgcccagctgtctctagagttcgccagggccctgaactcaagtccagccacctctggatccatcagcagcttgcagacatctgcgtgaccttcctttgcagccacccacaaggccctgctatagtttgccagggccctgaactcaattccagccacctcttgatccatcagcagcacgcagacatctgcgtgacctgccttggcagccgcccacaatgccctgctgtcgttagagttcgccatggatgaactcaattccagccaccgctggatccatcagcagctagcagacatctgcgtgaccttccttggcagccgcccacaatgcccagctgtctctagagttcgccagggccctgaactcaagtccagccacctctggatccatcagcagcttgcagacatctgcgtgaccttcctttgcagccacccacaaggccctgctatagtttgccagggccctgaactcaattccagccacctctggatccatcagcagcttgcagacatatgcgtgacctgcataggcagccgcccacaaggtcctgctgtcgatagagttcgcccgggccctgaactcaagcccagccacctctggatccatcagcagcttgcagacatctgtgtgaccttcctgtgcagccgcccacaaggcccagctgttgacagagttcgcctgggccctgaactcaagtccagccacctctggatccattagcagcttgcagacatctgcttgacctgccctggcagccacccccaaggccctgctttctctagagtttgccagggatctgaattcaattccagccaccgctggatccatgagcagcttgcatacatctgcgtgacctgcctttgcagcctcacgcaaggcccagctgtcgctagagttcgccagggccctgaactcaactccagccaccgctagatccatgagcagcttgcagacatctgcgtgaccttccttggcagccacatagagaagtttgttttcattttggttcgctctcaattgtaggccccccttaacctgtacaagaggattggacaccaagcatactgctagaaggtcggcgcgcccccctttcgccatcatctctccaactcgctgtggtggttggatcagtccggtaaggggccatccagaaaatctgttgtgcagagttttacacactaatacaatctttgggttggaagagaatatggcaatacgatcaaccctataaaccctataaaccctgggttgcactttcctggcatgcaagcggcacttggaactctgctaattatgcttttaagcttgttgatgtcccttcattcggggaactgactggattgtttgatcagtatcgtcttcttaaggttaaggtaacgtgggttcctcactttcgtgatcccacatccggcggaccagatacatccaacatgacagcaggtcctttaatctattttactagatccgatgatggcactcaaaacttgacgactaaacttgaagcttttcaggactcttccattaaaggagttgtggatccttattcggaatttagcgtcactcttactcccaaagtacagtttgaagtacaaaccgcattaactattaatgggcgttcctgcccctgggccgaagccgaccaagcaaattctctaggtccaccagtcatgagccctgaaccctagtatcaggctaatctggtggcagtattaccctagagaattgcttgaggcgatactagatttgcttgagactgatactcgactataaaagcaagcgtatctgcaagcggtatttacaagttagttacatcttcaaagtagcctgaaagtcaaagtgctggctcacactggctcacatcgtgcgcatcaataatcattttcaaagagttaaatatttctgctacatctggaattattgggcacatgcagcgatattttcgcttgagcaaactgaacacatttctgaaagtttgaggagagtggataaatacttgctctacggctctacttcattcggggaactgactggattgtttgatcagtatcgtcttctttaggttaaggtaacgtgggttcctcactttcgtgatcccacatccggcggaccagatacatccaacatgacagcaggtcctttaatctattttactagatccgatgatggcactcaaaacttgacgactaaacttgaagcttttcaggactcttccattaaaggagttgtggatccttattcggaatttagcgtcactcttactcccaaagtacagtttgaagtacaaaccgcattaactattaatgggcgttcctgcccctgggccgaagccgaccaagcaaattctctaggtccaccagtcatgagccctgaaccctagtatcaggctaatctggtggcagtattaccctagagaattgcttgaggcgatactagatttgcttgagactgatactcgactataaaagcaagcgtatctgcaagcggtatttacaagttagttacatcttcaaagtagcctgaaagtcaaagtgctggctcatcctggctcacatcgtgcgcatcaataatcattttcaaagagttaaatatttctgctacatctggaattattgggcacatgcagcgatattttcgcttgagcaaactgaacacatttctgaaaagtttgaggagagtggataaatacttgctctacggtggcaagacccagctgctgtcaagattcacaatggccctgtactcaagtccagccaccgctggatccatcagcagcttgcagacatctgcgtgaccttccttggcagccacccacaaggccgagctgtcgctagcgttcgcccgggccctgaactcaattccagccacctctggatccatgagcagcttgcagacatctgcgtgaccttccttggcagccgcccacaatgccctgctgtctctagaattcgccagggccctgaactcaagtccagccaccactggatccatcagcagcttgcagacatctgcgtgacctgccttggcagccgaccccaaggccatgctgttgatattgttcgccctgcccctatacacaattccagccacctctggatccatcagcagcttgcagacatctgcgtgaccttccttggcagccccccacaatgccctgctgtcgttagagttcgccagggccctgaactcaagtccagccaccgctggatccatgagcagcttgcagacatctgcgtgaccttctttggcagccgcccacaaggccctgctgttgacagagttcgccctagccctgaactcaattccagccacctctggatccatgagcagcttgcagacatctgcgtgaccttctttggcagccgcccacaagactcagctgccgctattgttcgcccgggccctatactccagtccagccacctctggatccatcagcagcttgcagacatctgcgtgaccttcctttgcagccgaccccaaggccctgctgtcgttagagttcgccctggccctgaactcaattccagccacttctggatccatcagcagcttgcagacttctgcgtgaccttcctttgcagccgaccccaaggccctgctgtcgttagagttcgccctggccctgaactcaattccagccacctctggatccatcagcagcttgcagacatctgcgtgacctgccttggcagccgcccacaagacccagctgtcgctagtgttcgccctggccctgtactcaagtccagccacctcttgatccatcagcagcctgcagacatctgcgtgaccttccttggcagccagccacaatgccctgctgtctctagaattcgccctggccctgaactcaagtccagccaccactggatccatcagcagcttgcatacatctgcgtgaccttctttggcaggcaccaacaaggccctgctgtcgctagagttcgccacggccctgtactcaagtccagccacctctggatccatcagcagcttgcagacatctgcgtgaccttcattggcagccgcccacaatgcccagctgtcgctagagttcgccctggccctgtactcaattccagccacctctggatccatgagcagcttgcagacatctgagtgaccttcctttgccgcatcaagcaaagccctgctgtcgctagagttcgccgcggccctgaactcaattccagccaccgctggatccatcagcagcttgcagacatctgcgtgacctgccttggcagccgaccccaaggccatgctgttgatattgttcgccctgcccctgtacacaattccagccacctctggatccatcagcagcttgcagacatctgcgtgaccttccttggcagccccccacaatgccctgctgtcgttagagttcgccagggccctgaactcaagtccagccaccgctggatccatgagcagcttgcagacatctgcgtgaccttctttggcagccgcccacaaggccctgctgttgacagagttcgccctagccctgaactcaattccagccacctctggatccatgagcagcttgcagacatctgcgtgaccttctttggcagccgcccacaagactcagctgccgctattgttcgcccgggccctatactccagtccagccacctctggatccatcagcagcttgcagacatctgcgtgaccttcctttgcagccgaccccaaggccctgctgtcgttagagttcgccctggccctgaactcaattccagccacttctggatccatcagcagcttgcagacttctgcgtgaccttcctttgcagccgaccccaaggccctgctgtcgttagagttcgccctggccctgaactcaattccagccacctctggatccatcagcagcttgcagacatctgcgtgacctgccttggcagccgcccacaagacccagctgtcgctagtgttcgccctggccctgtactcaagtccagccacctcttgatccatcagcagcctgcagacatctgcgtgaccttccttggcagccagccacaatgccctgctgtctctagaattcgccctggccctgaactcaagtccagccaccactggatccatcagcagcttgcatacatctgcgtgaccttctttggcagccaccaacaaggccctgctgtcgctagagttcgccacggccctgtactcaagtccagccacctctggatccatcagcagcttgcagacatctgcgtgcccttcattggcagccgcccacaatgcccagctgtcgctagagttcgccctggccctgtactcaattccagccaccgctggatccatgagcagcttgcagacatctgagtgaccttcctttgccgcatcaagcaaagccctgctgtcgctagagttcgccgcggccctgaactcaattccagccaccgctgtatccatcagcagcttgcagacatctgcgtgacctgccttggcagccgaccacaaggcccagctgttgacagagttcgccctggccctgtactcaattccagacacctctggatccatcagcagcttgcagacatctgcgtgaccttcccttgcagccgcccacaaggcccagc

SEQ ID NO: 302 - DNA, 21236 bp, Chlamydomonas sp.
  source 1..21236: mol_type = other DNA
tacggcacaccttacggtgtaacctaatggtgtagcaacccacggggcagtggaacaccaatacgattttgaatcaacaaattgcaggatgttaacgagaatatcgtggttcttttttagatcacggctctccatcctgcagactccgtatcgttcttttgtcggtactttcgagagtgtccattgaaggaccagccgcacttaagcgatcgcctcttccccagtaccgtggcccaaaagaacacggggtctttgttgatgtgcaatgcacacccacctcagttccgagaacacttggatgagaaccaccgtaccacattaaacaagtggcggagcccctttcacctcttccccccagcggagcgaccgggggcgaccggaggggagcccccacaaaggattccgcgaggaaccgagcgggtgggcgaccggaggggagcccacagttcacatcaagcattagacactactgtgtaactaactgtcaagtcttacacaatgtgtatgttgtttgtaaaagattcacttgtttgtaacacttgggcttattatcactgtaacgcttgggcttctttctcactgaaagtcatcggagtgcactgtaacgcttgagcttatcactggaacacttgggcgttccgaggtgtcgtctcaagcagactaacttcttgagtatgaaagaggaatcgagggacacacggagggggcaggggaattgagttgcggactcagtcgcaccgaaaataaacttgtacggagaacagtaattgaggggatgatatgatatgatttcatcagaatggttgggctttacagttgttctcaaataaagtgggacacaccttcaaatcaatcatccagactgcaggtcaagctgctgcagctgtcgcgcacacgcagtacatgaacataatcatggaccacgcctgataccagcagacatatgtgtacgaacgggaccgccgctgggagaagacggacctgcaagactcgctgctgccggtgctcaggcaaatcgtgcagagaatccacctactttagatgctttgccacgaccttttttttcgactcagtactacctcctactttttgatatgactttttgttcgcaccaccagtttgatttgcgttagctaatgcatcatctatacgttttgtttctgttgcagtttgatttgccttccttttgtctcctagctcttgcaatttgttcaaattgttggctaattctatattatcacgttctttacgttctgtttctggtttttttgaaataaactcaaacatttcattatacaaagatgaaaaaaatcaacgcatctgaagaggagaataagggtttagttaaagagaataccctttaacgaacattattctcctcttcacagccagcaagacacatacatacattttatgattgttcggtcatgttcctacacattgaggaggacgtccgcgcgtgcaacgggagcctttctggagatggccgttgtcttcgcatgcaaacggcggaaacatgtcctcgtctccaaaagacgtcttttcagaggtgttcatgtgaacacgtttgaaatagggattgatgtgagacatcggggtctgggcaatccccatctttgccgttgttgagcaagagaaggttgcaacaggagcgaacgtcttgaggcgcaataccccacgttcagtggaggtacttgcatctattctgtgccctgatctgcagcgaccctttcgtggcgtgccgttgcaccccgagtgaaaactttttatatataatatatatatatttcaatgataaagacgtcgagaaacggaatttgcgatgatgggaaatcccgagtattgtacaaggatgatgatgtgaaaagtaaaactgttggcctattttttgttaaaaagaagaacaaaacagggaatatgaaactagtactttataagccattggacaataaacgggctgcaaataaacaaaaaggtggggcttttgaaacaaaaacaactagtagtgtaattgtacagaactcaaccgaatttaatgcctgtattaagtatatagaaaatggtagtggttggggtgattttaagattgttaaaatgggccaagacatgaaatatttcggtaatcgatttcagaatttggtagatcacattaatagccaaaccgaatacccgtaccatataatgagtgggtattaacaatcagtcatcctacaagtagggctgacaattgccaatgaattcgtcaattcaaacataagtgcttgacatgacagtaacattacaatcaagaacaacctatgaatttgacaaggaaagtacttcacaaaaaacaaactcactaggggttgtcggtcgtgttcgaaggaagagagaggagaacaaaacaaaaggaaattatgcagtttcggggatcgtcgggccttttatcatgtccggcgatcgattgtaccgccgcaagcactacacaggatttgggtgagggggcttacgttttttagaggaaaggacggcggaatctgtgtcgagtcgagtcgagtcgagtcgagtcacacacgtttaaccactgttcagccaggcctcgtgtggcgttcgcgacgggtgggacctccgcaaggtgtccaaggcggttaagatgatcttgaacgccgtgggtctggatatggtgagcgagaccacgcgcgcgcaggtcaagggcaagtgcaccaaggaggagaggaactaccgcctgtgcccggagagtgtctcccggatgctggagctcttgaaacttcgtcttctgcgcacggacctcacgccgccgccgctgccctttctggccacgagctgtccatatacagccatagtccatcggcaaacaacggattgtattcaacaagcggcggagcccctttcacctcttcccccaagcggagcgaccgggggcgaccggaggggagcccacagttcacatcaagcattagacacactactgtgtaactaactgtcaagtcttacacaatgtgtatgttgtttgtaaaagattcactgtaacacttgggtttattatctctgtaacgcttgagcttctttctcactggaacgcttgggcgtttccgatgtgtcgtctcaagcagacttctgcttgacaactatgtcgggagtatgaaagaggaatcgcgggacacacggcggcacctgtcgagtcgagtcacagagcgaccgacctctcgcatcaggcggcacctgtcaagtcatcatacacgtacatacgcaaacggcggaaaactgtcgcatccacaccgtccgtccgttcgtccattcatgacacacggatgcggtggcggattctcgtccctcatcgtctcgtatcttagtcctcgaattaagtgtaaacgagcattcttcagtgtaaatgccgccagttagggccgggttttagttttgaaacactggagggcgaggtgttgtccagcgctgtattggaccacctgaagtggttgttgtcccacgaaacagaggtggctgtgttgttgttctgcggccatggcatgtggcaggggtcgccgcagcacggtagtctagtgtgttcattcaagcagctggtcacagctgaggcaattgagtgcgtggcggcgaagttcaaaggcacatttgtgaggttgctgaacatgtgcgaggccgagggggagtctatgtggcaggatgggcaaggtaccagggacgcagtaaggctgcgaggtgctcagatgcaagggggggcaggcgcgccaagcacctactactgcatgacagtggcagccacgcagcagtttggcaagaccactggtaacagccggggcagcaagttcggtgttgcactggggcgcatgtttgatcaggaggtgctggtgacgtacgatgggttcgagacggcattggacaagtattggagtggggcgcaagtacggatgacgcacgctttccggggtgtgttcgggacgcccgcttccccggtgggttcttgttgcatcactaatgatgatgcgggttctgagtctgaggtggagttctgagtctgaggtgcctggggaagggttgcaacagttgactcgttttctttccgaaaataagtaaacctaacagagtggggagtgaagtgacgtccactttcttggataccccatcaacgtctctacccactctgggtttaatgtacccggatgatagatgcaggcaggaagggaggttgttgtcagttgtgcaggggagggacagcaagacgccgccgtcaggagaacaagagacacgcacgcacgcacgcatggaacacacacgcacgcaaacggaccgcatgcaaattcacagggttttaggtacatacaggcatgaccaaatgtctcgtctctaagaaatatatgtataaaaaaaagaggttttactaactaaactaactaactgactgactgaatgactaaagctggctgagggacggggagcaaagctcaattgagagatctatagcagcgcgcttcttagcgaggtaagactcacgctgggagggcctctttgccactttgccaccacatgaagtcccatgctgcgtgatgtcatcccaaaaacgagtgtaaacaactttttccaaaaacacgagcgtattattaattcacggtctccctctttcttcatggcgagtcagtagcagaatcactgtacacaccaccacccagtgacaacaccccaacgttgccaaaaagcaacgatctgcaagttcgattataaagggtgtcccactttatttgagaatgactgtatagaatgacagattacgcttcggacatcactgtgtcgggtacgtccgacttgatttgcactggggtctaagatgttcatcttgatacaattgaaaagcaaaaaacattggaattggcccgactcatgagaggcctcgtgcctgaatggggtagtgattacatcgaacgatacattcctaacgagctccagtgctagttgcacaacaacattacattacattacattacattacattacattacatgttaaagtctacttgacaccgcgagggtgtatgagactctgtgctttaaacaaaaagaaaaagcacccacaaagcaaaaaaccccattacatcaggggtgtgtcgaggacaaacaaaccaaactcccaaccaccgttttggtggcgtaggtattaaaccccttagagcaggacccagatctcaaccacttacagtggcggaggtaagaagctaacaaatgagaagtctcaagaacaaaaaaaaagggataataaattacggtgccactaagcagtccagggcttcctgtcttgctcttctacaagtagaaagatagtcggctaggttgctccaaaaagacttagtgccatttccattcataaaggttctgaatgtggaatcgcagaattccacattccatacggttaagtcggtatcctcatggacatgcctataaatatctgtaaacagattctggtagcggaggcgaatatcattataaaaagggcactcaaacatatgcatttcatcctcagacaagagaacatggatggatgaagatggattctggtggggatttgacaaagtctgtgctaggaagtataagcagactaacgtcattattcttgctacgaagcatcacggacttgggacatatgaacataaagtactggtcactctaaatagttcggtacaagtggtgtgggaagacgatttatcgtgatcaaggcatgattgcatgcacttgcatgattgcatgcatgcaccatctaggaatcatgtctgagaaacgtttttcttgctgttttttctgtttcttgataccagacttgtggtaaaaagctccgcgtgtaagcttccatgtcttgcttttgtcgtctgccagatacgtgactgtagcgatgtgtttttcgaatgggtttttctacaggggggagggcgggcaccgcggagcggtgcagtggaattcagctgctgactcacacgcacgcacgcacgcaaacggagggggaaattcacacggtacggtacagtacagtacagtacagtacagtacatacaggcaggaccattttttatcgtctctaagaaatgtagcaaaaaaaagagtatctaaataactgagtatctatataactaaagctgctggctgagggacagggagtgaagctcaattgagagctcgatagcagcgagcttcttggcgaggtacgcctcacgcttggagggagtctggttcatgcacgctaggtgcgcgcacttgccagtggtgaaggtcccaccattggggttgcttaagagcacctgttttctaccacacgggttgccgtgaatggtgacagcagtgcagcccagggtgggggagtaccccacgatggtcagatcgccgtgtttggagccaacaggaagctcgttctttagaacggaccccccgcaacgaccaacacgaccggaggccaaggaggaggaggggggggccgttgaaaacgagacaccagaagcagcaggaacagcaggagcaggagcagcagcaggagcagcagcagcagtagcaggagcagcagtagaagcagaagcagcagtagaagcagccggagcagcaggagccacagagagtgacaccgtggtgcgggggcgcttggttccaccggaactctcctctgacatgcaaacgtcctcggtggggacgtcgtcctctgggagggcaagggcactggcgagggcaagcaaggaggaagcagcaggagcagcagcagaagcgacggcattcgcagcagcgacggcaacagggagaagcattagctgtaaaggctttttctccgctttgtgaggagaatctaatagaaacttagcgtgcgcaattttcattgcgcagacagggtctgcgaggcacgcaggaacgcggggaaatgaaattatcttgtagcagatgtccttcaattgagggacggtgggtttgctggatagcttcgttcggtccgtcgttaggaccacttttaatatacaggtatcattcacgaatgatgtgatctcggtagacatgttgttggcagacatgttgtttgtagacatgttgttggtagacatgatatcagttgagttggggtttatcagttgttgttgttgttgttgtggtggtttcaaaggaaggaaaaaggcgtcaatttttttttagcatggaaatgcaacggatgctcagataaaaacaacaaataggggggggggaacggaccgaatcggaaacgcggatgaggcaacgcggaccccgcgcaccaaatagactacatttcgaaaaaaaacgaaacgattttctcaacagagccagcacaacaacaacacacgtaacgtaatcgccaaattcactcactgaaatgcaaagctactttcggagttcgctggatgctccctaacacactgagttcttcgtgagcgaagaattggagtcggtacttggttaagattgacatggctggggtgtgtgtggcttggactgggtgcgtcaagtagggcgcgcgctgaacacgtgtcttgacaactatgtcgggagtatgaaagaggaatcgcgggacccacagagtgggccacaggaattcagctgctgactcgcggaaacacgtgtcggatctgacctgcttacactcgtctttcatgggcgcgcggaaacacacgtgtaggatatgcctctgtcacacatcccctgtgggtcacacatcccccggaatctggtaatgcgactgctggtcaatttgaaccatggccactccccaacccctgagcttttcccgaatggcatggcggtgggaatggcgctccaccatgccgtatgtgcccctagccctgtcgatgtcgtcatccagatcagaacatgggactgtccggacagcgaacctcctcaagacactaagctccgggctgtgaacatgtgttgagaggaacatgatgagtattgtgccctccctacaatcactcgacgtacaatatatatttcgcacctcacttcattcagctggctctccagattgcccactttcttgcgcaacctacggacaagttctaccaaagcctctttggtacccgcgcgctcgagctcatcatcttgcatgttctccatccttacgatcaaagatttttttttaataaaaggcctaaggcagagccttttaattactttaaatttattggaaatctttaaacagtgcaagggctcatcagcctcacacataatgggcaagttacgaccaactgcagcctatgacaaccaactgcaacccatgagaagcctcattccacattcagtaccatgcagttaccattcctagtgcagtctgttccatgcagcccatgcggccagtgcagatctgtgcagccccatgcatcctatcaagtagccccctgggtcaatggattggtgggtggaacgtgtgtacaagtggagagccctcgtgtgatacatgctcttgaacaccaagctaagctcatttacctcagttcgctattccctcactcaacaatctgatcctccctcgaattcgtcgtaacgagaggagaaggcgaatctgcgcagcaaatgagagtcacaacaaacaaactttgagatttgagacggcggcttttgtctgacgattcctcttttgacagaggaactgctcgtcttcgcaagcggtggcggctaccttgattgacagcactcccatcgatccgataggtaagccaacctcgagtgtgtactcagacatcggggtctgggcaatccccatcaatgatgctgtcgggcgtaagccgcatactgcactcgaggctcgatgaatgatgctgcatatagaaaggaggtcgtgtgtgaagtaagagagagagagagaggagaacaaaacaaaaaggaaattatgctgttttcggggatcgatgtacgcatacagctagggacatttgatattgggacaccttctattttggggattctgaaaagttgaccaattcaagatttgtaaccgatcttgtcaatacagatactgtcttcaggtgattgacacaaaaaattcaaggcatctaaagacactgaatttacatgttcaaagtaccctgaaaagtcaaactgatggctaacatcgtgcgcatcaataatccttttcaaagcgttactgtaatcaaatatatctgctacatctggaattattgggcacatgcagcgatattttcgcttgagcaaactaaagacattctcaacagcgttaaactctggactgtaaggaggtacaaagagtggtcgtattcctacagaatcgaacatagaaatcgtctcctttgaatgatggaactggatattgtcaaggacagcgactgtaccccgctgtacatgtaactcagatacaaactgtacaaagtcgactttcttgcaattgtgatcaaggatcttgtaatgaacgatacctttagcagaaacggcagcaattagtgtcaatttggacattcgcaatgtcctagaaatttggatatttaaacgtttgccgcgttgacagtaccctctgcgacaagtgtcaccaatgtaaaaacccgcctcatcgatgcttaacaaatccgatgtcggaacggctaaatactccttacaaaaacggtcgacagaagatttgtggtcattcttgtgccgaactgttttgcatgcgcgcttgcgggtgtaaccaagtttgcgtgtgtagcgtccacaagtttttggagacatcttgacagaggacagagaagtcacaccctctgcaagctgagacattgtcaagaagggattagagtcaatcagttgttttatagcagccttgatatcttctgtaatgacactcacccttttcttccgatgatgttttatattggctttggtgacccaacgttggagtgatgattttgatactttgtacagcaaactaactttcctcaaactacgattatagtatttgtagtgaacaaccgcgcggtgtcttatctctgcatcaatcatgataacgtaggaaatgtgtataaggaaatgtgggtgcaatattatatcaccaaaagaaaaagaatactaaccccctcttaatgggggtagtgcaagacaaaggagatgacgatattaacatcagcgtcgtcaagaagacgcttaattctctgtgcatggatgtatcgaggcatcagatctcctcaaggatacaaagcatggtactcttaatcaaccacgcagttgcagaggcatacttattcgcaaactttcatatcacaagatgcctcgatgatggagactttgacgtcaagcagttgccacacctggatcggaacttttattacaggtgcctccttgcggtatcgacctccaatgttcgaaaggatactctgggccagagcttcaatgataccatggttgctttcgacgccctaagacctgcaggctacgtgaaggtggacgttcgtccttggggacaagtaaacgcagacgtctcaatacaaatggcgacaatggcgtgcaacagcgtctgggcaaacgtggacaaggtcgttatcaagtacctgcgcttgaaacatccctctctgaagaaacatttcaagaagattgtcaaagcggtggtccagtacccagaatcgaaaatcgacacaatcatcccagaggtcctcgtgcatgcgatccacatcaaagaggttgtcagtcacttgagggctctctttccgctgccaagagggaagcagttcaacactagagcgcacctgacaatgcgattgttccatcacgtgcttacagagttgggagaggtcggacgagtggatccgaaagataaaaaaacaaaaaaaagtcacccccgtctgttcagtatccttcctcgcaagaacggcttcacaatttcgtacgtcccgatatcgtccatgactttcatgaagcttctcagcatgggtgattcgccactcgagaacgtctctggcgatggacgttacgagaaccatacaatgctgtggcgaaagtactttaatgtccaaggtcttgagacgaaaaggtctcgctttgacaaccgaatcctcagcgacggtaaaggggtatccgtccaaatgaagcagaagggtaaagaagaggtcgttgaagaaggagaaaacgcaggctatcccaaggacgcaaatatcgtagagtgcaaggacgcagtgggtgcgctgcgtgtcggagtagaccctggaatgacagatatcggtagcatcttctgcaggtcgcatcgagtctttcagctcggctcgctttagcaaagttgctgggtacaatacaagcaagcgtcgcacctacaaatggaatgacgagactcaagacctcgtgaagtccattccatcgcctaatacgagcaacatggtcgacctgcaggaccatgtcagagcttatctcaaagcgctcccgatcctcctacaacacagagccaacaaaggctaccgatctatgcgattctttcgatacgttggtaaacagaagacgattgaaaaggtatgcgatgtgattgcaccaagggcacagacgaccgttgttggcttcggcaactggtccaaccaagggtatggtatcagtcgttcatgttctgggcccatcaaagagatcaggaggtgcctctcacgtcgtaagaatgttttgttcaaaaacgtcgacgaacgcaacacttcttgtaaatgtcacggctgcttccagaggcttgtcaacatgaaggcagacagcgtagtctggcgcggagtttgcaaagagtccccaatcgacgggtctataactgttgagaagcagaagatggtggtgaagaacgtcaaggtccacaaagtactgcactgtagagacagtgtcaaaagcgcatcatccaatgtgcgctgtggtgcaacctggaaccgagacgtgaacgctgccaagaaccttcttctgcttctgacaacgtggatggacgggagagagcgacctgaggcattctgtgttccctcgcctccccccaaaaccacagtttccatcgaggcgagtgtgagcgctaaaccgaccgacccacctgggtttgtcagcagcttgccttgttatcctttgggccagcttaaatgctgaaatacagagatgaagggcaaaaatatgtactcgcctttagctgatctacccattgggttcaagggtcaccggtagggcgtcccacaaattgcggctccgactgtataagagatccgtgatctgtaagtacattacgccccctccattaaaaaaaaatagaggactcatgccttactacagtggcactgcagggtcaatagcgaatcacgtacaaactttgttgtgtggaggaccgacacataaaacgagttgcgtttgtgtgttccctgatgcaggcgatgcggtgaaagagttagaagtagccgaagcgttgcttgacatgggatggaatgtgacgaaagtttggttgatgactcgcgatacattgccatccacaattatgcgtttgtctggacgctgccctgtagaaacatttcatggttacaatgagttgacgatcgctttgcgatccattatgtccatgacttcatccggagcaccgaaggaagtgctggtacccggcattcaccaaatgcatgtgtcgtacacaagtcaggaaattcttgatatttgcaatcactttgcaacctgtcatgcacttcatcaccaagggtttcttaagcatggttacatcaactttgtgagtattccgcaatactttcccatccgtactacgcccccatggatgaacgacctagtgatcgaagaaggacagcatgtatacatgtcatcatgggctgcccggctggcattctatgtggggcaactggcgagacggtacccacaactcgaagtgccgcttgtcctgagagaggtgagcgaactgcattcctccagcatccacgataaatacctttccatcccgacacaaaactccagcaacagtgtgcatgggaccttgcatgctgggggcaaaagttcctgcacagggctcccagatcccgtgttgtcctgaagctttgtagcacacggaatcatcaggaacaagaccaatacacaatttttaaggatattagaatagtaatatagggacccagccccagacaaggcaatgcatgtgcagtgactgagcatggccgaaatgtacacgaaagcccaactcgatgatgccgtggctgttgccgcggctgatgccgtggctgttgccgtggctgatgccgtggctgcagagcgcgtgcgtgctggcgctgttcagcgagcgtacaaaacgctactggctcagacggaggagtctgcgcatgagcaacatcgtctactgaaccaggcgctgagctcggtttccaagcaggacgaagagatcgagaacctcaagtgcgtgctgcttgctcgtgcactcatgaatagacgcggtgcgcgttgtgccccacaatgcatgcaatacaataacatctctctgtgctgacccacacacatgactaattcaattccatgcgcgatgtaggtccatggtgtcaaagggttgcaacagttgactcgtttgctttccgaaaataagtaaacctaacagtgtataaggaatttgcatgtactagatatcagaatgccatgtatggcaaccaacgcttctgtaaatgaggcatccgtattgtcgcagccgacagtgtgtgtgcttactcatgtgatgtatattgttgggcgtaggcagactggaaagagcttcatgatcacaaacgaaataggggatggtgaatccactttggtggtttgtgagacagaccatgacgtaactcatcataaactgcattccccaattgcaattatgagcatgcgagacaccctggatagcctaatcgggtttaagattatagttttggacaacgtcattttcaattcgacagacagtctactacaagatgctatatcactgcatgtcaaaactggaacacggttaattgtagcagtttcacatccattcagtatcccagctgatggcgatgggataattatacaactgagtgaatacaaagactcatgtggcttgcaatgcctaaacaaattaaaagccaagtatgaattccagctggccgcaaatgtgctgaataggaataagatgcacaccaccacgcaagcggcggagcccctttcacctcttccccccagcggagcgaccgggggcgaccgaaggggagcccccacaaaggagtccgcgaggaaccgagcgggtgggcgaccggatgggagcccacacttcacatctactgaaatcacacacacacacaaacacacacaagcgacgccgcggatgatagatgcagcaatcatcatcgaaccctcaaggaccgtacagagtgcccaagtagcttttcccagcttttgaagttgcgagtctaacggttccctagaggaggaactgcttgtcttcacaagctgtggtcggcttccttgacagcactctcatcgatccgagaggtaagccaacctcgagtgtgttatcagacatctgggtctgggcaatccccatgaatgatgctgtcgggcgtgagccacacacttcactcgaggctcgatatcatcatgatcatgaagatttgttaagcaaaagaagtggatgatttctcaattttggatgttcccccctccgtttacactcgtttttcgaaagccgccgtgcggagagagagaggagaacaaaacaaaaggaaattatgctgttacggggattgtcgggtcttttatcatgcccctccctcatctcatcaaggacggcgacttttgcatcaggcggcacctgcattggcggagccgagtagtcactcacagggatactttcgcatcaggcggaacctgtgtcgagtcacatcacagagagaccgaccactctcatcacggcggcacaggtgccactatggccctccccatcaaaaaataacgaaagtaacaaaataccaccgtaccacattaaacaagtggcggagcccctttcacatcttcccccaccgggggcgaccggaggggcccccacaaaggagtccgcgaggaaccgagcaggtgggcgaccggaggggagcccacagtgtaacatcaaccagcagacacactactgatttacggaacggaaatcacacacacacacacacacacacgcgacgccgcctcggacatggacagcatcagcaaacttggttcatcgtgacacctcttcccccccccccaaagattttcatatctatctacagtcggcggaacagtaaaatgaaacatccaaaaaacggtataaggcggtgacaatcatatattgtatgagtggatggtcctataaaatgacccgtccagcaaagaaacctccttacatgacgcattgcacatcaacaaagacccgtgttcttttgggccacggtactggggaagaggcgatcgcttaagtgcggctggtccttcaatggacactctcgaaagtaccgacaaaagaacgatacggagtctgcaggatggagagccgtgatctaaaaaagaaccacgatattctcgttaacatcctgcaatttgttgatttaaaatcgtattggtgttccactgccccgtgggttgctacaccattaggttacaccgtaaggtgtgccgtacacgaggcggtttcattttagtattccgtcgactgtaagcactgctcaatttacaactccctccaacatgatcaaatctgtgttcatgaagaactcgatgcaaacaacaacttcaacttgacacagaagatgatacatacatgatcgataatgtcggcagtcgtgcggattgcggggatcacgatgacttgcgcatactcattctcacacggaggcttaaagcagactcctgctcgattggtttctgaagggggagcgcgggcaccgcggagcggggcagaggatttgattggattggattcatttgatgactcgtgtacactgtacactcggacaagggaattatgttacataatatcccgagtcccccaaaatcctcttgtatgtgtttatcttctacacttcgctcgacactgcgttctgtaaagaacctgtcagcttgtaatcaattttgcgtcctaccacaacttccagtttgcaatatttctttggcctcgcaagaattccggggcggattgggtacattgtaaagcaattgtggatgttaatggctgcatttaggtcacggtttacaaacaacttgctgttctccatggtggaactgcaccatagcaagcctcgaaccgtgcgcccttctttttcggactgcacactctggaggacggtggtgctgtccttgtgccagatctttgtggtacggaattcgtcaatgacggcaactcgccccttgaaacggtcgctaaacgccttgaacgcgctcgttgtagggacagaaagttcaccattgccaccaggggcaaacttagcagaaccatatgcgacgacaattgttttcctctcaccgacatcctcctggacctcgttgaagaagcgtgctaagacacgtttcttgccatcactgtcttgctgcttgcaatagtgctgtgaactgcctccctgcttatttcggtgttgcttattgtctcgatgcttgctgcgttgctgcatactgctaaatgcttattgtggtgctgtttattgtcatgctgcttgcaatggtgctgcgtactcctcgatgcttattgttgtgctgcctactgttaagctgcttacagtggtgctgtgtactgccttcctgattattgttgtgttgcctattgtctcgatgcttgcagcgttgctgcatactgctaaatgcatattgtggtgctgcttactgtcatgctgcttgcaatggtgctgcgtactcctcgatgcttattgtggtgctgaccactgtcttgctgcttgcaatagtgctgtgtactgccttcctgcttatttcggtgttgcttattgtctcgatgcttgctgcgttgctgcatactggtaaatgcttattgtggtgctgcttattgtcatgctgcttgcaatggtgctgcgtactcctcgatgcttattgttgtgctgaccactgtcttgctgcttgcaatagtgctgtgaactgcctcccctgcttaatttcggtgttgcttattgtcttcgatgcttaagctgtatgcctgcatactgctaatgcttatgtggtgcttctttactgttgtagctgcttgcaatggctgctgcgtactgtccttcatgcttagtattgtgtgcctactgttttttagcttgcttaagtggttgctgtgtactctgccttcctgatttgtgtgtgttgccttatggtctcgatgcttacagagttgctgcatactgctaaatgcgtagtgtgaatctgcttactgtcatgctgcttgcatggtaactgcgtactcctcgatgcttatgtgttctgaccactgtcttgctgcttgcaatagtgctgtgaactgcctccctgctaatttgtccggttgcttattgtctcgatgcttaagcgtgcattctgcatagctgctaaatgccttattgtggtgctgcttactgttgtcagtggccttgcttgcaatggcgctgcgtcttccttcatgcttattattgtgttgcctactgtttagctgcttacagtggtgctttgtactgccttcctgattattgtggtgttgcttattgtctcgatgcttgcagcgttgctgcatactgctaaatgcttattgtggtgctgcttactgtcatgctgcttgcaatggtgctgcgtactcctcgatgcttattgttgtgctgaccactgtcttgctgcttgcaatagtgctgtgaactgcctccctgcttattgtggtgttgcttattgtctcgatgcttacagcgttgccgcatactgcttacatgcttattgtggtgctgcttactgtcgtgctgcttgcaatggcgctgcgtcttccttcatgcttattgttgtgctgcttactgtcttgctctgtccagtggtgctgtgtgctgactacctgcttattgtggtgttgctcattgtattgatgcttgcactagttctgcgtactgcttacctgcttattgtgttgtatcttattgctttgatgcttgcagccgtgctacgtgctgcttacaaggttatgcaggtgctgcctgctgtcttgcttcttacaatggtgccgcttactgcttactttactattgtgttgttgcttattgtcttgctgcttgcagaggtgctgcgtactgcttacatgctgattgtggtgttgcttactgcctccctgattaatttttgcagagcagcttacttcctacctgcttattgttgtgctgcctactgttttacttattgcctcgatgcttccaccgctgcgttctgcaacctgactcactatctgactcacagcctgtctaacaacctgacttactatctggctcttatttatttgcagggacctgtgctcttatcggttgcaggattattgccccctctcaatgcaggtgcggcacattttgcgacgttgtatagccaagggaattaattcacttgattaaatgggcaacatttgattcatctggtacctgacgctcaaccttctaggccgggcagttacctgctggcagcttgcaagttggttaatctgttttcactgggccctattagtgttagcaaattcctgcttaccaccataatcttaaatcttctcgttatgcctgaaatgcagtcagactctgtttgtacctcaagacggcacacagtttggcaactaagtagaggccatgttagtgacattgaaaactatttagcttgcaagatggtcaatatgcaatcacattattgttatacttcattactaaattgccatgtgtaggcacctgaactagcttgcaaggatacaaatatgtattcacctgacccgcatgcttctgaaacacaccttcataactagatacaaatctgaatggaccagaacgagcttgcaagctagttcatctgcattcaccagactctcagccttctgggcgagttggcaacatctaggcatctgaactagctattggtaactatctatataattatcaattaactaacatagtacctgattatctgactggcttgcgaatgtatgtatgaatctccttctgtgtatgcatgtcttgcaggccaagaggagggatggatgtaatcggaatggcaagattgctggcatgaagtaactacaaatgctgatgatgtacagatatagattcagcgaggacggagagaaatgatgatcgggttgacttgctagcccccttccttccctctctatgcggtcggttgtacttgctagttttcttctttgactctctatgtcgtcatgtggactgtctagtcctcttccttgactctcctagcggttggttttccttgcttgtcacatttcttgcctcagtggttaggttgccacacctccggtagttggagtaccttcatgcctccttccttgcctcctattaggttgggtataccttgggttatgcaggtttcatattggacctgatcagacttgtcctacatgctattgacatacatatttggttggatgcatagagatccttgtgaaagacactccgaaaaatatcgaatctgacacatggggtcgtggtatatccctctaaattgtagatgctgtgaaatggggatgctggacggagaatatcctcttagtagtagaggatggacagcacttcttgatggaatgtcacgtgtactcttaggatttcttggggtgagaactttgaaagcaccccgagtggatttaacagtttatagacttgttagggctcaccccttgattgtaaactgacatacacgatttgttgcatggatattttatgcttgtaaagtgcccaagtctcattccagactagagatttgcgccatactacatcctttgagaaacgcaataacctcaacccagactaaagagttgcgccagactacatcctttgagaaacgcaatgaactcaacccagactaaagagttgcgcaagactgcatcctttgagaaacgcaatgaactcaacccagaccaaagagttgcgccatactacatcctttgagaaacgcaattaactcaacccagactaaagagttgcgccagactgcatcctttgagaaacgcaattaactcaacccagactaaagagttgcgccatactgcatcctttgagaaacgcaatgaactcaacccagactaaagagttgcgccagactacatcctttgagaaacgcaattaactcaacccagactaaagagttgcgccagactacatcctttgagaaacgcaattaactcaacccagactaaagagttgcgccagacaacatcctttgagaaacgcaatgaactgaacccagactaaagagttgcgccagactacatcctttgagaaacgcaatgaactcaacccagactaaagagttgcgccagactacatcctttgagaaacgcaatgaactcaacccagactaaagagttgcgccaggatgaacatactatgccaactctgcgactggacagtcaacgcagaataaacggtccacaatcgtccacgtcctgatcctctaaatcgacgaggaagcgtctattatgcgctactatcgcaatgcaacgcattcaagttggacgtccggaaagctgcagtgcgttcgaattccgtcaaagagtccacccacgtggccctaagtcacgtgatcactgagtcatgctctagggcgcggagcgccttccgtacaccattagtcattaacctgataggcgcaactgcgcaaccgaacgggaacctttacgcaaccccgcgcaaaacgggtcgttccctgagtggtaggggatgtcgagtagcttggaaggaacgtcttcgtggtaggagtagaagggttcattccgagtagctcgtgtctatgtacgcaacgtgtgcattgtgagagatgaggcagtacatgtgtatggtactgtatcatgtgcgttcgtcacgtggcttacgggtacggtgtacccgtatgccttgctggacgtccagattacccgtgaagggttctgtaccgttacactccccccccttcagaagagatgcggaccccgcatctgatcgtaataaaggtgggatgtgaataccagtcgtagtcgtatgtgccgtgctcaaaatatacttgatggatcaagttggtttcggagacaaccatttaacatcccttttgagtactccgggaaag

SEQ ID NO: 303 - DNA, 21236 bp, Chlamydomonas sp.
  source 1..21236: mol_type = other DNA
tgatgaatcaacaagcgaagagagtagacgtcatgcgtcaaaagaagaccctgagtaggaatgtacagttgttaccgttgttaccgttgttacaatttagttggttacactgtttatgaagaagatgagaattcagatgatgaatcgtcttgaaaaaataaggatatcatgaattaataattaatattaccatgttaccaatgataccaataaaaagtaagtatattaaaatgtcacttttcactttacaatatgaaaaatgaaaaatgcaattttctcataaccctattaaatctgtggtaacgttggtatcgttggtatcgttggtgacatggtttatgaagtgaggaagataattcagatgatgaatcaacaagcgaagagagtagacgtcatgcgtcaaaagaagaccctgagtaggaatgtacagttgttaccgttgttaccgttgttacaatttagttggttacactgtttatgaagaagatgagaattcagatgatgaatcgtcttgaaaaaataaggatatcatgaattaataattaatattaccatgttaccaatgataccaataaaaagtaagtatattaaaatgtcacttttcactttacaatatgaaaaatgaaaaatgcaattttctcataaccctattaaatctgtggtaacgttggtatcgttggtatcgttggtgacatggtttatgaagtgaggaagataattcagatgatgaatcaacaagcaaagagagtagacgtcatgcatcaaaagaagaccctgagtaggaatgtacagttgttaccgttgttaccgttgttacaatttagttggttacactgtttatgaagaagatgagaattcagatgatgaatcgtcttgaaaaaagaaggatatcatgaattaataattaatattaccatgttaccaatgataccaataaaaagtaagtatattaaaatgtcactttcactttacaatatgaaaaatgaaaaatgcaattttctcataaccctattaaatctgtggtaacgttggtatcgttggtatcgttggtgacatggtttatgaagtgaggaagataattcagatgatgaatcaacaagcgaagagagtagacgtcatgcgtcaaaagaagaccctgagtaggaatgtacagttgttaccgttgttaccgttgttacaatttagttggttacactgtttatgaagaagatgagaattcagatgatgaatcgtcttgaaaaaataaggatatcatgaattaataattaatattaccatgttaccaatgataccaataaaaagtaagtatattaaaatgtcacttttcactttacaatatgaaaaatgaaaaatgcaattttctcataaccctattaaatctgtggtaacgttggtatcgttggtatcgttggtgacatggtttatgaagtgaggaagataattcagatgatgaatcaacaagcgaagagagtagacgtcatgcgtcaaaagaagaccctgagtaggaatgtacagttgttaccgttgttaccgttgttacaatttagttggttacactgtttatgaagaagatgagaattcagatgatgaatcgtcttgaaaaaataaggatatcatgaattaataattaatattaccatgttaccaatgataccaataaaaagtaagtatattaaaatgtcacttttcactttacaatatgaaaaatgaaaaatgcaattttctcataaccctattaaatctgtggtaacgttggtatcgttggtatcgttggtgacatggtttatgaagtgaggaagataattcagatgatgaatcaacaagcgaagagagtagacgtcatgcgtcaaaagaagaccctgagtaggaatgtaccgttgttaccgttgtaacaattagttggatacccctcctatcactcttgttcacgtgcgtgcttttgtgatcttgcgatctcccccgcacacctcgcttctcatatcgcacacattgaagcgcatgatgatggaacatcccccctcccaaccctgcacacccaagcttctcggatctgaaaagaagggtctaaataccgttttcgtgtacgtgtgtcttcgcttcgaatgtggatacacaagaggatggatgagaccaagttttttctactcgtcttcaatcacatgcaaatcttgtggcatacgggccttgtcccgtaaacttggcagtgtggaaacacgcacgacacccacgaaagtcacaacaaagctggcgacattccaatgatttgtcattatttgtctgccgtcgatgatgtcgacgggatgcgatggcgttggaatggcctcaccgcggtacatgatgtcactgaccatgtctgtcagcttttccttggcagctgcaaatgcctcctccatcgtgcctccggcgccaatcgcacatcgcacatcaggcacggtaacctcatggcaggaatatccatcttcgggacggtaacatgtgttgtaaaccccccagaattcataagaatctaggtatcgtgaaggtatcctccaccaagggtgcatttgcgcttatctcgttagccgttatttcaatctttcgaacagcttgctgtgcctttctcttacgaaaccttcttatccaacggcgcaagcaatgttcaactttgttgtgccagaaaatggtgaacgagatgtcaaaggccttatctcgttgtgtgattgtatgcgcaaacaatgtattggggtcaagagcggtgacacatgggtactggttcaagttcaattgtttcatgtaaacacgctcccccatccaatcacggatgacgatggatgtgcctttttcccataacagtcggacatccttggcaatcacggtgcctgtccccgaaagcaccatgcacgtgtccttcgggggccaccaatcctgagaataaaatcggaacatgatcgggttgagcatcttagtagttctcaaataaagtgggacaccccttataatcatccagactgaagatcgttcgttgctgatgatgcgatcgaagaactctgccgccgggctgaggtcaccgaggcagctgctgctgtgtctcctacaacgttaacatcctgcaatttgttgattcaaaatcgtattggtgttccactgccccgtgggttgctacaccatttggttacaccgtaaggtgtgccgtacacgaggcggtttcattttagtattccgtcgactgtagccatggtcatgttctctacagtggccatcatcaggagtttcttgtgtacataagggggaatcgtgtgtttactgtactcagggacaaaatatttgacgaaatgcgttggcatctcccgcagtttgatgatgatgatgaagaagagtcagatcatcatcaattttgccgccatgaacatgagcaaccgactctccctcttcaccatccagcagcaaccgactctccctcttcatcatccagaaacaaggcacttctgttgtatgtggattacaattatgttcctagggatcaaattcagaggactttgtgggtgcacatgcgagaagcaggaaccatgttgggcaagaatgtggatggtttggatataccaggtcaccacagcacgtgggttcgctttttgcacccactcgactttcatgtcgttgtgcttccggggcacttgaagaaggtggagctgatggatctgttggatgatcacatggcaaactcacatgatgactcggtgctcgtgatcgtcttgtgtggtcatggatcctccggtcagctcgttctgaccaacggtgcgaaggtgtcactggaggatgtgtcacatgcgacaatgcatcacagaggaacagttttgcctttcatgttattttgcggtgcgaggccttccgatggcctcaacccactgagagggatcaagaacaacaaccaacttcgacggtgcatgttcatctttgcaaccgataacgctgtcttggactcgcaaacactgaatgcatttgtgaaagcgatcggcagcatcatggataccaggtacattcaatgttgttactctgggattgaggacgccattcgcggccacatgcgtgtgttcaacggatcctccttgcatcttgtgggggcaaacaacgagatgcgaggttatttgtttcaacctgcattcgtcatgcatagagaatgcattcgtcatgcatagagaataggtgagcttggcttgtgtgccccctgcttctgcatgtgagacaccgggatatacagacgagtggctgactcgactacatgatccgcattgatgaggctgcgcaagccaccgtggcgtcgtgtggacgaggagtacaatttgaatcaacaaattgcaggatgttaagttgagcagccggccaagcgcatcaaatgcgtcacatgcgtcattgagaccataaaacatcccctctatctcatcagagtaccgatgctgaggagcacgggagaggtattcgaaacccatgttgtctgccacgatgcgcacgacgttgagtccgtgaaaaacgctacacatgacatcatccatggcagcttggtgggggctccttgacaccgtgagcttgccgggatgctcaaactcttcataagatatcataacgttttcggggggccttcgaaccctgtggagtgcaacgtaggtgtcgacagtgtcccgccgttttcgcggaggaggcatgcatcttattggacagatgatacatgtggcgggagaaaacgattggtattaaaatgtcacattccagcaaatagacaaatcggcatcttcggacattgtcatggttgagaagatttgggtgccacattgcatgatttgattgcaaaattctgaaaggccatggttccgtacaaaacgttgtagtctgaaatgatttgatcgcggagttcaggtttgttttcgttgttttgataccatttgatgagccgttcgcaattgatttcaatatttggcggatacttgcctgttgagtgtatccattgcataacaatgcatacaagttgtgtggcaagatttttgtcgattgatggagggtgttgcaaaacttgagttatatccattttaatatatgcattagcaaacaataatacattgtttgacgcattgtttcttatgcctcggttgataaacggactaaaaggatgtggtctcactccaaggccccccaaaatacagaacgaacgcgagaagcatcatcagcatcgtgacagacgcctcctccgcgaaaacggcgggacactgtcgacacatacgtctcactccaaggccccccaaaatacagaacgaacgtgcgaagcatcatcgttccattctgacaccaaccatggaagttaggggatctcaaagtttgtttgttgtgactttctttccatttgctgcgcagattcgcatctactcttcgaaagccgccgtggcccgtgtgagaatgaatggacgaacggggggcccgcacagttttttagctattgtgttctctcaagtgcaagtgcgtccgtagttcctctggaagcggcacgcccctatccgagaggaccctgacgcaggtccggctgtgcatggccatgccctgcatggctctgaaggtgacggagccggcgcctccctggaggaaggcggcgtcgtcctcgtacttgcttgcttctgccgggttcaacctgctcattcgctgcacgatgctcctgagcaccggcagcagcgagtcttgcaggtccgcctttgcccagcggcagtcccgtccgtacacgtacgtctgctggtagcagtcggggtccatgatgatgttcatgtactgcgggtgcgcggggttgaagtgcgatagctgcagcagcttgaccaggttgtacccgcactcattgaattgagcgaccgagaggaactctgactcgggcgtgacctcctccccgaaggggtgcatgtcctccaccggtgtcgtagcagctggagatagcgccgccgcatctggagcagtattgttgttgttggtggtggtggtggtgttggtgaaattttcgcatgtaacgacatagttgttggtggccaacccgaagctgttgttgattgtgaaagtgtgttttttacgcaacgcctccagttccgcttgcatttcatcgatccgattctcgaggtactccatgcgcttctccatgaagtcaacatcaacagctcccttggggtgagacctccgcttgtgtgaagacttcgaataccggttactgaactgcttgtcacacaactcgcacgcgaacaaacaggaggggggcgtttttttctccatggtgcatttctccatgaggagagaacccccttatgtttgttacatcatttgattgaccgaaaaattgtatgaagaatgccggaggctcacatcaatccctattttaaacgtgttcacatgaacacctctgaaaagactctccatctctgtaacaacaattatttcaacaaaaaataaatactgaagaatgccggaggctcacatcaatccctattttaaacgtgttcacatgaacacatctgaaaagactctccatctctgtaacaacaattatttcaacaaaaagtaaatactgaagaatgccggagactcacatcaatccctattttaaacgtgttcacatgaacacctctgaaaagactctccatctctgtaacaacaattatttcaacaaaaaataaatactgaagaatgccggagactcacatcaatccctattttaaacgtgttcacatgaacacctctgaaaagactccccatctctgtaacaacaattatttcaacaaaaaataaatactgaagaatgccggagactcacatcaatccctattttaaacgtgttcacatgaacacctctgaaaagactctccatctctgtaacaacaattatttcaacaaaaaataaacactgaagaatgccggaggctcacatcaatccctatttaaaacgtgttcacatgaacaataatatgctgacctcaataagatgcatatcgataacttgttcaaggtgtgcgacaatctttacctatcaggccaagaagcagctctcaaccaccaactttgtaaaacgttgcaattcaagattgttgtgaactgcacaaaacacaaaccgtacataaaaccaaggaacccccaacacaacatacattaagggtgctgttgaagacaactgcaggcaaaaagaggtcacgaaactcacatcccatgactgatttgaactgtaaaataaacactccagtgtgaccgtacacaacacgtttcacgacgagtgtaaagattgatcgattccctgtactttaacagcctcagagacccccctattctcctctttttggaaaaccgctagtcatcggtggtggctcagcaaccaccaccgcaaacgagaaaatgtcttcgtcttcgtcggtgtcttcttcatctttccacgttgagatgttaccgttcccgttgatccgttccatcgcgacgctctgcggcgagaccgcaattttgtgcaccaacaaagccatccgcggcgggttcgcatggccggatcggctggagctcgccatgcgagaggccaaaaccctcgacaagaacacactgttccgcatgcaatgcgacctcggtgccgtggggacttgcgaacggatgctggataacgaggccgatgcagtttcgatggcggcgatgcttcttgcgaagcctccaaactactctggggagacggcattgattgggggctgtaaacagggcaacgtctccctggtcgagattctcattaggaactctccgaacgagcaagtgcttgcgacgaataatcatgggatgtcggcactgatgcgtgcttgtggcattcagggggggcatgcgaatgcagcatgtgtcaagattcttcttagatactctccgaacgaacaagtgctggcgacagacaatcatgggatgtcggcattgatgtgggcatgtatccatggtcacgcggcctgtgtcaagattctgcttcgacattcccccgacacacaagtgctggcgaccgatcatttcggattgtcggcattgatgatggcgtgtttccatggtcacgcggcctgtgtcaagattcttcttcggcattccccctacacacaagtgttggcgaccgaatgtcatgggaggtcggcactgatgtatgcgaatgcgtcctgtgtcaagattcttcttagatactctccgaattccatcatgatttgaatttgtgacgtgacagtattgatgagctcctcgacatctgatgaaggcaacactttgtaagctttctttccccattctcgagcctggtttgctgcatctttgttaaactcgggttgaatgctgactttgagccactctgtgctgttcaatcggctgaaggagaagtgtgaagagtacgggacagtgttcttgcatgtgctggagcattacacaagtcagacatgccctatgtgcggtttcttaaacaagtgtggaggagagacatacacctgcaagaactgtcaattcacatgcgacagagacattgtgggggcagctggcatcttcctgaaggcagttcgaacagaaaatccctgttcgtaaaggaaagcatccccgggggagttgacccctatgatacccctatggagaaaacacaccatatctgaacataacaggaaaccccaaacagtaatatacaagtattattaacttacaattatacaatgggtagcaaacttgataggattcgtgcagatattatatcggccattaaatctacacaagcagatattaacgatgaaccattgtcccgcaatagaggcaaagttgcctttaatgttgattgtgatgtaatcaatagtatgaatatcattcaaatcaaatcattgatacatagcccggaagttaaaagcgatctaggtggttattgtaacagtttcatacagctagggacatttgatattgggacaccttatatttggggattctgaaaagttgaccaattcaagatttgtaaccgatcttgtcaatacagatactttcttcaggtgattgacacaaaaaattcaaggcatctaaagacactgaatttacatgttcaaagtaccctgaaaagtcaaactgatggctaacatcgtgcgcatcaataatccttttcaaagcgttactgtaatcaaatatatctgctacatctggaattattgggcacatgcagcgatattttcgcttgagaaaactaaagacattctcaatagcgttaaactctggactgtaaggaggtacaaagagtggtcgtattcctacagaatcgaacatagaaatcgtctcctttgaatgatggaactgtatattgtcaaggacagcgactgtaccccgctgtacatgtaactcagatacaaactgtacaaagtcgactttcttgcaattgtgatcaaggatcttgtaatgaacgatacctttagcagaaacggcagcaattagtgtcaatttggacattcgcaatgtcctagaaatttggatattttaacgtttgccgcgttgacagtaccctctgcgacaagtgtcaccaatgtaaaaacccgcctcatcgatgcttaacaaatccgatgtcggaacggctaaatactccttacaaaaacggtcgtcagaagatttgtggtcagtcttgtgccgaactgttttgtatgcgcgcttgcgggtgtaaccaagtttgcgtgtgtagcgtccacaagtttttggagacatcttgacagaggacagagaagtcacaccctctgcaagctgagacattgtcaagaagggattggagtcaatcagttgttttatagcagccttgatatcttctgtaatgacactcacccttttcttccgatgatgttttatattggctttggtgacccaacgttggagtgatgattttgatactttgtacagcaaactaactttcctcaaactacgattatagtatttgtagtgaacaaccgcgcggtgtcttatctctgcatcaatcatgataacgtatgaaatggtataaagaaatgtgggtgcaacattatatcaccaaaagaaaaataatactcaccccctcttaatgggggtagtgcaagacaaaggagatgacgatattaacatcagcgtcgtcaagaagacgcttaattctctgtgcatggatgtatcgaggcatcagatctccacaaggatacaaagcatggtactcttaatcaaccacgcagttgcagaggcatacttattcgcaaactttcatatcacaagatgcctcgatgatggagactttgacgtcaagcagttgccacacctggatcggaacttttattacaggtgcctccttgcggtatcgacctccaatgttcgaaaggatactcttggccagagcttcaatgataccatggttgctttcgacgccctaagacctgcaggatacgtgaaggtggacgttcgtccttggggacaagtaatcgcagacgtctcaatacaaatggcaacgatggcgtgcaacagcgtctgggcaaacgtggacagggtcgttctcaagtacctgcgcttgaaacatccctctctgcagaaacatttcaagaagattgtcaaagcggtggtccagtacccagaatcgaaaatcgacacaatcatcccagagggcctcgtgcatgcgatccacatcaaagaggttgtcagtcacttgagggctctctttccgctgccaagagggaagcagttcaacactagagcgcacctgacaatgcgattgttccatcacgtgcttacagagttgggagaggtcggacgagtggatccgaaagataaaaaaacaagaaaaagtcacccccgtctgctcagtatccttcctcgcaagaacggcttcacaatttcgtacgtcccgatatcttccatgactttcatgaagcttctcagcatgggtgattcgccactcgagagtgtctctggcgatggacgttacgagaaccatacaatgctgtggcgaaagtactttaatgtccaaggtcttgagacgaaaaggtctcgctttgacaaccgaatcctcagcgacggtaaaggggtatccgtccaaatgaagcagaagggtaaagaagaggtcgttgaagaaggagaaaacgcaggctatccaaaggacgcaaatatcgtagagtgcaaggacgcagtgggtgcgtgtcggagtagaccctggaatgacagatatcgtcacggtagcatcttctgcaggtcgcatcgagtctttcagctcggctcgctttagcgaagttgctgggtacaatgcaagcaagcgtcgcacctacaaatggaatgacgagactcaagacctcgtgaagtccattccatcgcctaatacgagcaacatgtccgacctgcaggaccatgtcagagcttatctcaaagcgctcccgatcctcctacaacacagagccaacaaaggctaccgatctatgcaattctttcgatacgttggtaaacagaagacgattgaaaaggtatgcgatgtgattgcaccaagggcacagacgaccgttgttggcttcggcaactggtccaaccaagggtatggtatcagtcgttcatgttctgggcccatcaaagagatcaggaggtgcctctcacgtcgtaagaatgttttgttcaaaaacgttgacgaacgcaacacttcttgtaaatgtcacggctgcttccagaggcttgtcaacatgaaggcagacagcgtagtctggcgcggagtttgcaaagagtccccaatcgacgggtctataactgttgagaagcagaagatggtggtgaagaacgtcaaggtccacaaagtactgcactgtagagacagtgtcaaaagcgcatcatccaatgtgcgctgtggtgcaacctggaaccgagacgtgaacgctgccaagaaccttcttctgcttctgacaacgtggatggacgggagagagcgacctgaggcattctgtgttccctcgcctccccccaaaaccacagtttccatcgaggcgagtgtgagcgctaaaccgaccgacccacctgggtttgtcagcagcttgccttgttatcctttgggccagcttaaatgctgaaatgcagagatgaagggcaaaattatgtactcgcctttagctgatctacccattgggttcaagggtcaccggtagggtgtcccacaaattgcgtctccgactgtagacaaagcaaataacatcataaattcaaatctatgaaaatccctgtaattccctctttagcttgaatacagttccgcatggtgttttgcctcaccattttgaaacgaaattataggaaataaccattaattaatgtgaggtcctcattgaaacagagagccggcagcgaggactccagaggtcacagacgatgccgaaggtccggctcctccagcgtgggcagagcccctgggcggagaaatagagcgatgaaatggccggccagggtttaccccgccagcgcgtgtccacattgaccgcatggttgaaggcgctcccgcttgttgtcgttcaaaggagacgatatttgcctgaataccccacccagcccttccccagcgccattttcttgtcccggcctcgagacaatgcccctgaagccccccccgaaagtacgtgctcagtgtgtgttacagcgcccatggaaatacgagtgtaaacagacatgtcagatctgccacgtgtgttcgcgcgcccatgaaaatacgagtgtaaacatgccagcatatcttccacgtgtgttcgcgcgcctcgaagattcacacgagtccgcagctgaattcccctgccccccctccgtgtgtcccgctcatactccctacatttttgtcaagcagaggtctgcttgagacgacacgtgtcccccatgcgcccatgaaaatacgagtgaaagcaggtctgatccgccacgtgtccccatgtgtctcgaaaaatacgaaccctactacttgactattggatccggcaccaccaccttgcaacactccaaagtgttccactctttcggtgcattccagtcggtaaaatacagcatctccaacctgcatcaacaaaaaatggcgttgtctaaacaactgggctcgttgtgggttataaaaaaacgatttaggaatacatctcacccctatgtttttgccaggggtctcgactcgactcgactcgacacaggttccgtcatgatgcgagaggtcggtcgctctgtgactcgactcgactcgacatgtgccgccgcctgatgcgagaggtcggtcgctctgtgatgtgactctactcgactcgacaggtaccaccgtgtgtccgcgattcctctttcatactcctgacatagttgtcgagcagaagtctgcttgagacgacacatcgggaaaaagcccaatcgttccagtgagaaagaagctcaagcgttacagtgaatcttttacaaacaacatacacattgtgtaagacttgacagttagttacacagtagtagtgtgtagtagtgtgtattgtgtagtagtgtgtagtgtgtagtgtgtagtgtgtagtgtgtagtgtgtctgctggttgatgtgaactgtgggctcccctccggtcgcccacccgctcggttccttgcggactcctttgtgggggctcccctccggtcgaccccggtcgctccgctgggggaagaggtgaaaggggctccgccgcttgttgaataatacaatccgttgtttgccaatggactatggctgtacatggacagctcgtgacccgaaagggcggcggcggtgtctgcgtgaggtccgtgcgcagaagacgaagtttcaagagctccagcatccgggagacactctcctggcccaggcggtagttcctctcctcctgagttctcttgcccttgacctgcgcgcgcgtggtatcgacatggtgagcgtgaccaagcgggtgcaggtcaatggaaagagaactcaggaggagaggaactaccgcctgtgcccggagagctgtacatggacagctcgtggccagaaagggcagctgcggcgtgaggtccgtgctcagaagacgaagtttcacgagctcgagcatacggcagacactctccgggcacaggcggtagttcctctcctcctgagttctctttccattgacctgcacccgcttggtcacgctcaccatatccagacccacggcgttcaggatcatcttcacagccttggacaccttgcgcaggtcccacccgtcgcgaacgccgcacgatgcatggctgaacagcctagcggtgtttgcgtagtcgctgaacatctgtgttcccttgagcttggcgtcgaacaccgtcatcatgttcgggatgattgtctcagtgtcgaacggggacgaaaaccgatcagatcagctagtgtctcctctatcaacacgatcttcagaagattggggtgcaacggcacgccacgaaaggggcgctgcagctcagggcacagaagagatgcaagtacctccacggaacgtggggtattgctcctcacgacgttctcgaatatcttggcgaccattcgagagacagtcttctctctctccttctctcgctcaacaacggcaaagatgggtggcacgtcctcggtgcagcaatcaaggttgtcgacgccacctgtccacacgtactggaatacgacattggccatctcccgaaagacggcacctgcatcacccgcgtcaagttggtagtactcgtatccaacgtctagacggtgcttgactcgagggtaatctccgctaaggtaccggagcagggcagtctcagcctccacacaagcacgcggattaagtacgtggattgcgaatatcatctttgagttcttcgggtactgagaaagtcgctgaccaaagggcttcgacgtccggccaaccttgacgacgatctcatctttctgaatgaacttgtgctcaaccaacgcgtacacgacattggttgtcatgtgcgccatgatcgctgtcgagctgctcctatcccaatgcgcgccgtttacaccattattatgtgcataataatgcgctattgaagaggatgatgatgatgatgacagtgttccgccgtttgcgtgtgatagagtgcgtgcgtgagaatgagtgagagtgggcatcatcatctcgacagcagccaccgcgacgcgtgtgtgaggatgcggcatgtgtcgtgataaagtgcgttatcctatctatctatctatcctatcggacagcataaccagagtgcatctcttgcacacataatgcaccgttcaccagatgccaactttgaggaatgacggtatgcatccacatcatgcacattaccttacgtcctggggtagaaatcgaaacctgtctgatgagaatgataccatgtttatttttcacaagcataaaaaatcaagacttgctttgcgcaccctatctcttctgtgtaaaacagaaacaatggataacttcaagaagttggatacaagcatgtatgtgtgtttcacagtttcaggcgatacgtggaatgacaagtgcaacaagtttactttacatggaacggtggtattcgattatgaggatgttatgttatgtttacttattttcggaaagcaaaagagtcaactgttgcaaccttttaaaatatgtgtaaaactgtatacaccaacatgagatatgtcccgacaaaaacaagcgaaaaagtgaatgtggttgtgaatggcaggactgtcgaacgaaccgtgtacttggtaaagggaactcgatgctattccaaacgcgattcgacaacacataaaaccaagtacgtccccatagggaaaacaaaacaggtggggggtaatcgtaattacgataatgcttggcaaacaccaaacaaccaagtaaagcaacatacaagtatattgaacaatattgatattacaaaaataaaggcagaagagaaagagcaacaacataaccgacaaaggaatggaatgcaggcgcagagaaataattataacctggaaaaaatatctgaggagtatgatatgcaaaaaaattcgcaaaatgcccaagaacagaaccgacaaaggaatattttaaagataaattgcaaaaggatggaatgcaggcgcatagaaataattataacctggaaaaaatatctgaggagtatgatatgcaaaaacattcgcaaaatgcccaagaacagaaccgacaaaggaatatttcaaagataaattgcaaaaggatggaatgcaggcgcatagaaataattatgacctgaaaaatatatatgaggagtatgacttgcaaaatgcccaagagcaaaaaaaaaaaaaggaaacaagaagaagaagagaataatacgaaagcgcaacaacagaaccgacaaaggaatactttaaatataaaattgcaaaaggatggaatgcaggcgcagaggaataattatgacctgaaaggctccaaatcagaatcaaatggtcgtattcctacagaatcgaacatagaaatcgtataacttcacagcaggctccaaatcagaatcaaatggtcgtattcctacagaatcgaacatagaaatcgtataacttcacagcaggctccaaatcagtatcaaatggtcgtattcctacagaatcgaacatagaaatcgtataacttcacagcagaatcgaacatagaaatcgtataactttacagcagaatcgaacatagaaatcgtataacttcacagcagaatcgaacatagaaatcgtataacttcacagcaggctccaaatggtcgtatccctacagaatcgaacatagaaatcgtctcctttgaatgatggaactggatattgtcaaggacagcgactgtaccccgctgtacatgtaactcatatacaaactgtacaaagtcgactttcttgcaattgtgatcaaggatcttgtaatgaacgataccttgaacagaaacggcagcaattagtgtcaatttggacattcgcaatgtcctagaaatttggatattttaacgtttgccgcgttgacagtaccctctgcgacaagtggccgcttgcgtacaagttattactaggtgtgaacccggcagcgaatgagtcagcagagatgcgcacgtacccgtcggcgatagagacatttgacggcgacatccacgaaaagtcaccgtaccctacagtaagcgtgtcaacggaatactaaaatgaaaccgcttcgtgtacggcacattttactgttccgccgactgtagtggaagtgtggccatacacaatgagatgtctcattccgtcgagtgtacagtttccattacttgaatagcatggtgtatgggatagttgttgtcacaactgcaatggacatcatgttgcgatatgcctttgaaaccgcaatccctcgtgtagggtactcgaagaacctctttttcatcatgattttagcaatgacaaaccctaaaactgtcaagatgagcgtttccatgccgaagtcgatgatcatgtcggagatgaatgcgctgtcaatgacaaacgtgtttgatgacttggcatatgtgtacatgacaatcaccagtgctacaaaaatgatgacctggatgataatgtcgagtaccaagaaaataaggaggaatccgctgtcgataatgagtttgtcgataatgggtaatggataatgaggttgtcgataatgagtttgtcgataatgagaagtgtggacctacattataacaatcgattatttacaccatcatgtatcctttgaaaacccctctcaaattttcgtttctctaggtgacgtcccaggtccgtctcttgctgtaggtgacgttccaggtccgtgtccgtctcttctcttaggtgacgttccagttccaggtccattcccgtgtccgggctggccgcgacgtgctcttcgacgaacatagccacggcgtcgttcgcgttcaagtacatcgcactggtcttctttaacgaatcgggcatatcgaacttgtaagcgtatgcaaacgcgtgtagaagggtgcgtaggaactccatgcgcatcgctcccattcaagtcattcaaggaagactctacaagccctgcgtctcgtgggaagaggaatttgtcggcgtccgcatcatcctcgtccacaaaccgactgacgtagtcgagttttcgtatccgtcgttggactcccgagtcagaacagtcgaccatcgtcggtgcgtcgcacatgatgtgtatcttgtgttgcgggcggaagtgtacgatgtcgctggagtgcaagaggcggtgggtgatgccttccccaccggtcttgtgttgcgggcggagaaagcttacgatgtcgctggagtgcaatacaccggtggtgatggcttccccaccggtcgtcatatccttgaggactccggaatttaagacttcgtcgtggtttggctctgtgcaatacataatgcggacccccttccgcgtcgaaaactgtggtatcgggcgacattgatcgatgcgtttctttcttgtcagcatttccacgccgaatttctggatgtagtctcccaatacgatctccatgacttcgaagaacttggtcttcccgttcgaggtggacgcgtcggagccgccggtgtgtatgtgaaagagctcttgtccactgtcaccgtacagctgtctagcaaatgtgtggatgctaaacagtttcccgccgtttgcgtgtgtcctcctatacattcgacagtgttccgcagcttgtgtcctccgatacattggacagtgttccgccgtttgcgtgagtactccgatgacttgacgcaggcgttccgaatgaatccggtatttgagtaatttcccttacaagtctgatgcttgatgtgaactgtgaactgtgggctcccctccggtcgcccacccgctcggttcctcgcgaactcctttgtgggggctcccctccggtcgcccccggtcgctccgctggggggaagaggtgaaaggggctccgccgcttgtcctgaggagacaagaccaggtctcaagctgacataatgatattaataatccgcttcactccagttgtaccgtactctagaaagcggtttcattttagtattccgtcgagtgtaccatacatcttaatcgattccacaaaccctggtgggaacaatgccgatggcatgattgcgtctttcttctgcaatttctgacgcgaactccggtgatactggacagagctgactcacatctaatggatcgcgagtgaatggatcggtggcacttgcacgcacccatctttctatccaacaacggtcatacagatgaccagcgggtgagacggctggctgatctggccactggtgcgatatggaacatcggaacttgaacgggacataaaattcaacacgatctactgcgtggatgagaactatacggttgtatgcccgcatcagtacattgtcccaatgtacaatcctggttgtatcagatacaagggttcgtgctgcagcgatcagcctatgaatcaaactgtcatcatccagatctagggcccacacatccgacagagattgtatatccgcttgctccagcaattcagcagtccacccattgccgaccattgccaactcccgcagagcactgcttccaagcattctttggaatatagcagagctattcctttaagacctgcgagcgtttgtgaagtgtgctgtgctgatggttgtttatactgaagaatggttgtttacacttcattcgaggacgatgatccgccaccgcatccgtgtgtcatgaattgcgtgtgtacgtgtatgatgacttgacaggtttctgcaactaaattcccctgccccactccgcggggcccgcgatccccctatcgatatacaatagcgcttgtctagcagatccatgcttgacatttgatcaccggttgcgattactttaccgtgttttccgtcatctatgagtatcttagagagtatcgacttctttgcgatgcgagcgatcgatcgtcccccgtaagtcgacatcgttccgccgactgtagtggtcgctctgtgactctgtgattcgactcgacacaggttccgccgtgatgcgagaggtcgctctgggagtctgggagtgggagtggggggtgggggcatatcctgaagacacagagtcacaagacacacagtctctgtattgacaatatcggttacaaaatatggttgacttggtcaacttttcataatccttaaaaaaagtacaatgtaatcatcaactgtccctatgagcttccgtgccgaacttgatcaccatctgcctgcattcgcagcagctttggtagctctgcatggtccagcttagctaatctaggggatccccttcactgtaggctcattcctgttggtgacatcatcattcctgttggtgacatcatcatcattcctgttggtcctgattgtctccccgacgattccccttccacaattcttgcattggccatcaaagccgaaattcctccgagctttacaaacatcgcaatacgcattcggcatttccctgcatgggggggagggagacgcattggtttagttccctgcgccagatgtctgagtacgcaaaaaatccagatgtctgagtacgcaaaaaatttagatgtctgagtacgcaaaaaacccagatgtctgagtacgcaaaaaatccggcaatcaatgtaatgtaatgttttctacgccaacgaaaggccgttgtgggttcgttggtcgtcactcaactcgtaatgagtgcccccgtaattgctttaaggttgagaagctgatattaccgtaaaccatataggtacctttggaattcaaatcaatactactgaccatacgtatccccattgatcgtttaccagataattacttattccaatctaatctgacatcaatcctcatctgttggttctgaaaagacgagcttccttagcaccaaccaacccatgacgcgctgcggcggctttggcggcgtcaattccgtcgcacaccacccgcgcatttagagggccgaacaggagtgtaaatgggggagtgacaacccattccatcccatcctacttgtcaaatcaatctcgaaccatcattaccatcctccatcatgtacaatttgcctcgagtgaagtctgtcgtgaaagactcgcctcctttcacgatgattattgacgctgttgtcctcgaatttgtcgcgtcgtgaatccgatgacaagagcgtcaataatcatcgtgaaaggaggcgagcccttcaggattggaaggcgtttgcctgcttgataatacgagaccgcatggacttcag

SEQ ID NO: 304 - DNA, 21125 bp, Chlamydomonas sp.
  source 1..21125: mol_type = other DNA
cgcttgggaggtgaagcaaagtgcaggggagttgcgctctgcgaagcacatgcgcactcgatctcttttttgaggggaatctaaggtagaaacaatccaatcgattatgtataaagtgaaaacgataatacacggcattactactacaatctcacaagcattactaagacaaatcactcaggtagtatgggcactaaggctgaagacaatacgggatcatcatttacctctgctaatgactctgctactgctactgcttctgcttctgatgcccccatgaaaaaggggcagtccatgctatcaaagaggcggtacagacagatagaagaaaaattcaaggagatactcatcggagtcagcaaagaagaaaacgaaggggtcatcctagcaaggctactcacagaattcagggaaattatgcagtttgacccggagggaccaacgtatggagcaagggacacggcaaaacagtgcgaataccaaagaaacagaaatatggcaatcaaagatctggcaaaaatagtgagggaaaagcttaaagaagaatcatacaatgtttattaaacacccgatatgtcatccctcgatgttcttctggcggcggcacatgtcaataacttccctgcccccaccgaggcaactcacggtgccatgggggaccccatgttcggatcgtttgcgatccctgactgcggacctcaggcacaggcgttccgcgaggcatacgtgcacgcgctcagggatgagggtcgacccctgtccatcgtagagacccatacagacacatcgccaatcatagttgacctggacatgcgacagaacacccctgagcgcatgtacacacagaagcacatcgagaacttcatggacgcgctcgtgtcggccaccaaatactttgtagaccagcagcacatggacgtagtgatcctcgagaagccaaatccaagactcgacaagaaacacttaggggtgtacaaagacggtctccacgtggtcatgccaaatgtaatcacacacacacagatacaacttgccatcagggagcacttcgtaaacgatatgaccgaacataggacgtacgagagcaccatttgcatccctggaatggccgaaatggatcccggaaagatatatgacaaaagcgtgatcaccccgggaggcaggtggttcttgtacggatccaagaaaccggatgagacccacccgtggaaagtcactgcctggtaccaacttgatactggagcaggctcgctcaagaaacttgacgtacagaacatggatcttgatacactcgtgcagaatctgagcatccgtgtgcatccgcacggggggcacagcatatacaccaaatacggtcaggaggaaatcgaccagtacaagagccaaaacgtgttagagactaaaaagacattcgactcgcagcatggaaggaatgtggaatccatatacaatctcgtggacattctagacgcacaaagagccagcggatacgattcatggctgaaggtcgggatggcgctgaagaatacagtcgacgcaggaaccgacactcagcgcctcgatatatggaagtcttttgcaaaaaaatgccccgataagttctgtgacaccaagcacgaacaggtgtgggcaaatctgaagccgacaaatatcactctagggacactccgcttccttgccaagcaggatgacccgatggggtacgccgaatggatcctaaaatgggacaacgccaacaaacagggcgaggaaatagacaaggatcgcatcatcaaagacctcaaggtaaagctagaattggcaattgacaacatggtatcattgaatgtcgtaaacgatagcatcgagttcaagattgacaacggagcgaaaggagccatccacaagaacaaatacatggtggaggtagatgacatatattatggatcgatgatcaacaagttcccaatccatgaagacccagggttcatcaagaacgtgcctatcgaccaaggaccatacgaatgcgagctgcggaccatggatggcaaaacaattaacagtgccatcttgaagagcaccgacggcttgcaaatcgcattaatgaatatgggaagtgacaaccaatacgtaaatgtgagatccaacacgagcaacgcaactatccgagacaagcaggtcatcaacacaatccataacatgatcttcaaggcgcaagagtcccacgcgaagaacatgtaccggatcacgcagaacatcttcctggtcaacaacggcaccatcaacatcaacatgaagaggggagatgatgatgatgatgatgactcgttttcgtcctcaatcaaagaggatacgttggcggagaagttcatggaggccgcaccagaattcttcaccagaatcaagtgtgtgccaaaactcaacaggaaagaatgcgtaggtgacatgtactactgcgaccctgctaccaatcgctggtcgaacttaagcaacttgatgataatcaaagtaatcaaactcgagttcaaatccaaattccctgctgagaagaataacaagacgaataagaagattcgggggtttgtcgacacggttaaggggcgttctgtgttacttcaagccatcgcacttctcgtcctagacgaaacgttcaccgataacctcgatgtcaaccctgacctctttgcggtcaacaacggtgtatttgacagcttgtcgagggacaacgtggttttcagaaacgtagagattaccgacaatagtagcaggtgtgcgaagtgggattaccagggagaggaggacaaccacaacctccaaagatgcaaagaggagctagacgacttctttctaaaaattctgccagtggaagaggagcgtgacgtcgtgctctcatttttcgcaggtctcctaacaggtcgacgcgatgagaagaaattcctagccttcaccgataaaacatccggagacaacggaaaaagtacccttatgacgctcatgggcagcttcttcagctcgtacaagagcagtaatggaaaaaaaatcctgacaaaggggtcgtttgcaaggagccgggatgaccacgacgcgggtctcgaggccatgaaaggtctcaggctactggtggcagacgaaatgaaatccaacatccctctggacgaggcgttgatcaaaaacattgcggggggggagggtgtgtgtatcgaagggcgctcatgtggctctgcggactctttcgaattcatctggcaggctggggtcgtcatggtattcaacgaaggcgattgtccaaagttcgacggaggagacaacgcatttgtcaaaaggatgatcgtggttcccatgcgctcaaactttgtgcaacaacccgacccagagcacgagaacgagtttgagcgacggaaccttaccaaaatattgcccacttggctgtcggcgctggcgcagctgttcatagagcacttaagtcgaccggggcgctcaagcatcttcgacaaactaccggtaacgatgaccgagtggaagtctggtattgcggacagcgccaacccccttgccgagtggctcgaggaggtggtggaggtgacgggggagtattcggacgtggtgtgggccggggacctcaaggcccggtggatagagtcccactatggacccgcggcagcagtcttcagcaacaggctggtcaaggcattcttttctggaaaacagggaatcgagtggaaagatagtgcaagaatcgagacaatatgcaaaaagggagtgataagggggtgtaaattgttgttggttagacacgattgaggaggcatgctttagcatcatcatcatcctcgtcaaacatcgtccatctgacgcgatcgaacacacgccggatttcgaaccctcgtacactcgtagacgagtataaataagtcagcgtactcttattcactaaacgacaacaacacacttcttcattcgatgcattcacggtactgatgctgagggacgagacggtcgagcaacgccttgacatcgtggacacggatggtctcattggcggggaccgtcctcaaggtcctgtggaaggattatgtcctattacagtcggacacatctcgtccacaatatcagacttccactctgtcataatagagtggaagtctgatattgtggacgagatgtgacgtcttgtcagcttcagtcttcaacaccaagctggtcaatggtatttgttctttgttctttgcgggcaaacaatagaatgcaagaatcgataaaggggtgtcaacttgtttcactgtacatgtacacacgcaaacggaggaacacaacactcactgtcgacgacgatcgaaaaacatctgagtacacgcgcaaagagaggaggaacaccaatgtcagccaatgtccatcaatcagactgaatacacaagacacgcacgcacgcactctatcacgacacatcatgccgcatcctcacatgccgacagcagacaacaagtcgtggttgtgtgtgcgaggcgaagtatgacagtcgcgcaaggtatgctctgcgccccgttctgggatcgttcaagcagacagtggatgatggttgttgccacctgggtggcgtcttgtgcgcaaggacctcacgccactcaacgcgcacgccaccgatgccctttcgggtcacgagatgtccatgtacagacagccatagtccatcggcaaacaacggattgtattcaacaaacgcggagcccctttcacctcttcccccagcggagcgaccgggggcgaccggaggggagcccccacaaaggagtccgcgaggaaccgagcgggtgggcgaccggaggggagcccatagttcacagttcacatcaagcattagacatacacactactgtgtaactacagtcggcggaacagtaaaatgaaacatccaaaaacaaataaaacaaatagacaaccgtttttttattgtctatttgttttatttgtttcagcttggttgggtatccagggccaccacgtggaggtgctgattttggccccgttttgtttctttttttttcaaatacttgaaacagaaacaccttctcatccagattacttcttggtgtgggacatccctttgcgtgttaacacaggcttggcgacgaaagtcgggttgtcgtaaatgacgaataccttgggtcgggacgcaatgatcgcgaagacgtcagagattccaaacatttcgtatgacagatgcagtatattaaggggtgtgaggaggttgttgttgtattcctaacgttccgaaaaacctttcaatttttttgtatttaaagattctcagaccacgcgatcgaggactcggggatgataacggcactcacctgccatagctggtgcttagccaactgcttcaccaacttaattccgttcttgcgggtctcgtaagaagtctcaatcgtgtctacgaaacggtcaacaagaacgtcacttgtaaaagcacactgacgcaggcaactgaacttttcgaaagaaagaatatcctcgatgttcttgctactacacaactgagctagggcaatggacaaattacccttcgtagtgctcataaccacttgaaacccctcgcaactgatgttcatatgcaaaagggggatgatacccttcacataatcactcgagtgaaggaagccctccttctcggaaaaatgaatgccgtgtgattgagcgttcaacatgaacacacccagcttagctgcaaaagtcgcatctccagaagtcttctaacgttttgaagtagaagaggaattgcggggtgttgaagacattttacatacacatgtatacatgtatataaaaatagcctagttcctccggaacgactcgctacagtcggcggaacagtaaagttgtatacaggatggacacaaagacttttcatgcgctccggcgtgatccagagtttgtgatcaactcgttcactaccgccgtgatgccttcgcattcgaacgccaagctgtgatatgaatcgtcagcatggcacaccgtatgtgtgccgaaactacgcagtgtggcatacaatccgatgcggtctccgacatgcaactgcgtgtccccagtggtgcatgacaggctgcatgtgccctcgccagcaccactcgtgtcatagatggtggtgtaacgaggcacaaacactgtgatggtccgtggtggcaggaacaccgcctcgtccacatcaaaccatttcttgatcatgtcccttcgtagggcggctaccgcatgccatgtgtgttcgtcaccaattttgagttgcagggtggcaccggtcttgaatgtgccgtcgcctgacagactgaatatctgcacgatttctcccataggaatggtgacaaaggcgcacgggacatgactggggaacttctcacagacaccggtggcatctgccccgatcacgatcataatgtatggtaatatgatgtatgtatggtaatataatgtatgtcggtaaacccttacagttgttctcaaataaagtgggacacaccttataatcatccagactgcagatcgttgcttttgggcaacgttggggggtgcagcaggttgaagaggttctcgaagatgatattccgagtagcctctttggtaaaccgttcaaccgtctgtgtccccatatcagtatcagggggtgggggtgggcgaaacgcgagaggacgctctctcccaaagacttgtttcactgccccgtgggttgctacaccattaggttacaccgtaaggtgtgccgtacactccagaaagcggtttcattttagcattccgtcgactgtatctgtatgaaggtcagatgagcaaactccagtgttgccaagttgctgcagatctgcaattgtcaggttgcatttcatgcatcggtatggttgtaattctgccatttctagcagaccacatttccaaatgtgtttgcccctattgcggtttagaaggtcttcgctgagtttgaactcgggatgttgcattattgtcctcccacgcgggtgttgcattctggggatgatatccatttagttgtagagattcttatattatttatcaattccaaaataatggcattcttgttctcagttttttaggtcttaaaaaatgatccggatgtcagggtcaagcaggaacagaaacaatgcactcgatcaatgcgtgtgtccatctagagaatatgtatggaagagggggatgcagagggatttcattttagcggtttaataattgtttcaaatgtttcattacccactctcctgactcttcagatacgcttactacaaaactaaacagcaatctggtccagaacgacgaacatcttcctaatcttcgtcggcacatactgagcttcgatggtagaagatgctgcgcgtagcgcattcgcgtctggctcccctaccatacttattatgttctctatcacgtcaggtggaattgatgacaatagggttgggtccaactgtctggcaagacatgtgctttcgtttgggcagaagcggatcacggaatcgcccacaacagcgtcggatgcaatgaggcgggttagtctcctttctaatacattccactccacataaatctcaacaatgcctgccccccgtctaggtccatccttattgttctcccatgctcgcatgtgctccaacagtgtcagtctcctcataagctcacaaacgagtccgttgagattgcatttgcggatatgaatattctcatgccacacttcttgagggtctaagggtatgctatcgtccttgacgtacgcctcgaacgcattgcgttgtagaaacaaaacctgcaaacggtcaggaaatccaaacaattgacgcacatcggcataccttgcacattgcactccaatgttcaacgatttaaaacccaccttgtaaggcatacttgattacatatgcacagctttttactccttatgttgagcagtcagtaccaacatccaggagtcattcctcgaatccgcgattcatctttcattaactgccgtctcaagcaggcgtctgcttaacaaactattccggtatcatgaaagggaatcgcgggacccacggagtggggcaggggaattcagctgcggactcgcgaaaacacgtgtcctaggatctgacttgtccatcggaggaggacacacgcaaacggcggaacactgccgaatgtatcggaggacgcacgcaaacggcagaacactgtcgactgtatcggaggacacaagatgcggaacactgtcgaatgtaatgatgcgggaggggggcggctccatgttcatgtccctaaaggcgcagcagacaagaaaacgctatatataaacgtacagagacaaagtgctgacgattgaatgcaatctcatgcatctcaatgtcaaagcaatccaaagaatccatgcacgccggcggatcctcgtccagactcatcacgcacacgcacggaactgatgcggcggcggcggcttatcgcccagccccatcacgcacagcagaggcagcgtctcgtccatccttatcacacatcatgccacgcggcggcttgagaatgccacactggaaatcgatcgtcattgattgcagcataacaacaacacggcgttaaaaagggaattacagcgtgtccactttatttgagagtaagagcacatgatggcgtccgtgaagactcgtcgagccttgttaatttttccaagttactacgtagacgggttgggacccatgcttatgcacacattgcaagagtgtggtacgctgccaagggacttgaaggggtacagatgtggcggagccatgaaggaccatgatgtttttgtcaacaaggttttgggttctggtatggagatcaatgttctcgaaggcaccgtgtgccggaggaccgtcatggaccaattggcttggttgttggagccatcagtggacgttgctcttttgttattctgtgggcatggcatgaatgaggggtcgccacgtcacggtacattggtatgttcttacaaacagctggtgtcatctgaggccatcgatgcggtggtggaagcgcaacgtttttgcggcacactcatccgcgtgctcaacatgtgcgaagcagatgccattgcccccggcactggtctgccgttccagcacggaagatctttgcgtgacgcagcaagagcagatcatgatgcacagttccatcgcgttgcacacaaggacgtgatgttgttggcaactgggcattttgaagaaacggcaggtggcaagtcaggaacacccgtcatcgctgccctgggcagaatgtttgacgcagagtcgatcttaacctacgagcgccttgatgagctcttgcagaggcactggcctggtggcagtgggagggtactgctgtatcctgcaatgttgtaagggatcttcggatggccggctaatggttcacaggtgagtggcgattctgcttgacaataagtgggtatttacatggaatcgttttcaccccatacagctagggacatttgatattgggacaccttatatttggggattctgaaaagttgaccaattcaagatttgtaaccgatcttgtcaatacagatactgtcttcaggtgattgacacaaaaaaatcaaggcatctaaagacactgaatttacatgttcaaagtaccatgaaaagtcaaactgatggctaacatcgtgcgcatcaataatccttttcaaagcgttactgtaatcaaatatatctgctacatctggaattattgggcacatgcagcgatattttcgcttgagcaaactaaagacattctcaatagcgttaaactctggactgtaatgaggtacaaagagtggtcgtattcctacagaatcgaacatagaaatcgtctcctttgaatgatggaactgtatattgtcaaggacagcgactgtaccccgatgtacatgtaactcagatacaaactctacaaagtcgactttcttgcaattgtgatcaaggcgcggtgtcttatctctgcatcaatcatgataacgtatgaaatgatataaagaaatgtgggtacaatattatatcaccaaaagaaaaagaatactcaccccctcttaatgggggtagtgcaagacaaaggagatgacgatattaacatcagcgtcgtcaagaagacgcttaattctctgtgcatggatgtatcgaggcatcagatctcctcaaggatacaaagcatggtactcttaatcaaccacgcagttgcagaggcatacttattcgcaaactttcatatcacaagatgcctcgatgatggagactttgacgtcaagcagttgccacacctggatcggaacttttattacaggtgcctccttgcggtatcgacctccaatgttcgaaaggatactcttggccagagcttcaatgataccatggttgctttcgacgccctaagacctgcaggatacgtgaaggtggacgttcgtccttggggacaagtaatcgcagacgtctcaatacaaatggcgacgatggcgtgcaacagcatctgggcaaacgtggacagggtcgttatcaagtaccttcgcttgaaacatccctctctgaagaaacatttcaagaagattgtcaaagcggtggtccagtacccagaatcgaaaatcgacacaatcatcccagagggcctcgtgcatgcgatccacatcaaagaggttgtcagtcacttgagggctctctttccgctgccaagagggaagcagttcaacactagagcgcacctgacaatgcgattgttccatcacgtgcttacagagttgggagaggtcggacgagtggatccgaaagataaaaaaacaagaaaaagtcacccccgtctgttcagtatccttcctcgcaagaacggcttcacaatttcgtacgtcccgatatcttccatgactttcatgaagcttctcagcatgggtgattcgccactcgagagtgtctctggcgatggacgttacgagaaccatacagtgctgtggcgaaagtactttaatgtccaaggtcttgagacgaaaaggtctcgctttgacaaccgaatcctcagcgacggtaaaggggtatccgtccaaatgaagcagaagggtaaagaagaggtcgttgaagaaggagaaacgcaggctatccaaaggacgcaaatatcgtagagtgcaaggacgcagtgggtgcgctgcgtgtcggagtagaccctggaatgacagatatcgtcacggtagcatcttctgcaggtcgcatcgagtctttcagctcggctcgctttagcgaagttgctgggtacaatacaagcaagcgtcgcacctacaaatggaatgacgagactcaagacctcgtgaagtccattccatcgcctaatacgagcaacatgtccgacctgcaggaccatgtcagagcttatctcaaagcgctcccgatcctcctacaacacagagccaacaaaggctaccgatctatgcgattctttcgatacgttggtaaacagaagacgattgaaaaggtatgcgatgtgattgcaccaagggcacagacgaccgttgttggcttcggcaactggtccaaccaagggtatggtatcagtcgttcatgttctgggcccataaaagagatcaggaggtgcctctcacgtcgtaataatgttttgttcaaaaacgtcgacgaacgcaacacttcttgtaaatgtcacggctgcttccagaggcttgtcaacatgaaggcagacagcgtagtctggcgcggagtttgcaaagagtccccaatcgacgggtctataactgttgagaagcagaagatggtggtgaagaacgtcaaggtccacaaagtactgcactgtagagacagtgtcaaaagcgcatcatccaatgtgcgctgtggtgcaacctggaaccgagacgtgaacgctgccaagaaccttcttctgctgctgacaacgtggatggatgggagagagcgacctgaggcattctgtgttccctcgcctccccccaaaaccacagtttccatcgaggcgagtgtgatcgctaaaccgaccgacccacctgggtttgtcagcagcttgccttgttatcctttgggccagcttaaatgctgaaatacagagatgaagggcaaaaatatgtactcgcctttagctgatctacccattgggttcaagggtcaccggtagggtgtcccacaaattgcgtctccgactgatataataccagtcccatggttgttctgagtaggcttgtacaatatcccatgtgatatttggttttgtgctcaacccaccccaatcccaaggtttactgggggttgtaatgacaatatcaatcgttattgtagggtttctgctaatccagaaccagtcccatggtttatctgggttggcttgtataatatctagtgtgatgttggggtttctgctgatccagttccaatcccatggtttgttgggattggattcgatgatatcccatgtgatattggggtttgagcttaataaactccaataccacttgtgttccatacatttgacccgtctcgagatgtggttatttatttccgctgaaatcattattatgattgttaaattgtaataactaaaaatagacaccggatgctctaaatcctgaatagaaatttaaaaaaatcggccgggaggcaggaacgcccattttatatcaaacggcggaacgatgtcgatactcttgggggagcacttattggatgtgattcgatgatgatttgtgtctccttggtggattggatgtgacgacctcgtccagcattataaagggtgtcccactttatttgagaataactatagaatgacagattacgcttcggacatcactgtgtcgggtacgtccgacttgatttgcactggggtccaagatgttcatcttgatacaattgaaaagcaaaaaacattggaattggcccgcctcatgagaggcctcgtgcctgaatggggtagtgattacatcgaacgatacattcctaacgagctccagtgccagttgcacaacaagagaacatggatggatgaagatggattctggtggggatttgacaaagtctgtgctaggaagtataagcagactaacgtcattattcttgctacgaagtatcacggacttgggacatatgaacataaagtactggtcactctaaataattcggtacaagtggtgtgggaagaagatttatagtgattctgaatcatacgggacatcgcatattttgcatggcagccaatggccccaaatagaaatggggtactcaaagaacagcagtagcaaccacagtgaatgcggttgcgtaagactcaatgcggctttaatcgacgacaagtggaagcgcccttgtattctcacatgctatcaacacccttttcgttgtggagccgaaaatcctcaaacccccccctgcccagtatggacatgccaaggtgtcgaaagccatacagcaggccactatgggcgcgactagacttttgtcctggctaccgcatctcataaacatggacctgaaagaaggaacctcacttggatatgtgaaaatttctcgtatgatcgtgacagctgtgaatcgcggtggacgcgtcttctgtcaagatatccacagccaggaaatttactaagaattggaggaggaagaaaggtggaaccttggcaaaattgtggagttgccgagaatcgaacccggctctgttggtatcggacaccatgagattgacgggaaagaagaaaaacccagacgtagatgcaaaaaaaagctccttatatatattctgtatattactacaacttatgtaaaatctacttcccatatctcgcctttgctcctgcgcccctgtgccagttttcccccagtcttctgtgacacaggatctgacttgtccatcggaggacacgcaaacggcggaacactgtcgaatgtataggagtgtacacaagaggccgaacacggtcgaatggcacacgcaggccctcattgacacacgcaaacggcggaacacgtttaaaatagggattgatgtgagcctccggcattcttcagtatttatttttgttcaaataattgttgttcccgagatggagagtcttttcagaggtgttcatgtgaaaaaaacacccccctcctgtttgttcgcgtgcgagttgtgtgacaagcagttcagtataatgatattattcattggtttaacattaagtttaatgatttcgacaactgtcccagataccggatggactgtggtgttaagcagcaactgcgaaaactgtcggttgtttgcaacatattacatttcttggttggaatgcgaggatgcgagagttgtttttgtcgatgacctatcacatttcgaggtcgacctgctggagttgatcacgaggtttccagcaatcgtttacaaaaaggagatcttcgaaggagccgatgcatacgataagatgcaagaaattacaggtgtcgcgtgggaaggaacaaaagaaagcacaaccacagaggaattgagtatcatacagggcatgaaaaatgcctaaacgacagcgactgcgtcgatgacatcccaactctgcaagtggggttatcatccccagcggagcgaccgggggcgaccagaggggagcccccacaaaggagtccgcgatgaaccgagcgggtgggcggccggaggggagcccacagttcacatgcatgcatcttaccaggcggcacctgtgtcgagtcccactgcgaccactacagtcggcagaacctttgtcgacttaaggaggacgatcgctcgcatcgcaaagaagtcgatactctctaagacaacctgtgatcacatgtcaagcatgggtctgctagacaagcgctctcgtatatcgataggggaatcgcgggccccacggagtggggcaggggaatttagttgcagaaacctgtcgcatccacacgcaaacgtacattcatgacacacggatgcggtggcggattctcgtcctcgaatgaagtgtaaacaaccattcttcagtataaacaaccatcagcacagcacagcacacttcacaaacgaatgagttcctttgacgaaatcaatgaagatgtattggagatcattctagccaatgcgatttcgaacgaatcccacctcaaacaagtgcctctcgtttgcgaaaagtggagatgcgtcacacccctgtgtgtcacaaggatccacctaagacattataacagtttggaatacgcattatcacgcatttgcaggctcaaagagttgaaaataggtgtcaatcgtggggaatacgtaccctaccaatcaatgtcggctatcaaagacaagatccaagacatatcgccgctgtccggcctcgctgcgttggttcacctggacatatcgaacacctacgtgaccgacatatcgccactgtacggactcacttcgttgacgcacctgaacatgtcgcacacctacgtggacgaacacatattatcacctctgtccggactcacttcgttgacgcacctgaacatgtcgcactcacctctgtacaacatacaagctctgtacggactcacttcgttgattcacctggacatggcgcacacacttgtgaccgacatatcaccactggccgccctcacttctttgattcacctagacatttcgctatcacagctttccggactcaccgcgttggttcatctgaacatggcgtacacacgggtgggcgaacacctattatcaccgctggcaggactcacttcgttgattcacctcaacatggagggcacacgtgtggacgacatatcaccactggcaggactcacttcattggtgcacctcgacatttcgaacaccgacgtggacgacatatcactgctttccggcctcacttcgttgattcacctgaacatggcgtccacacgtgtgcacgacagatcaccgctgccaggactcacttcgttggttcacctagacagttcgaacaccgacgtggacgacatatcaccgctggcaggactcacttcgttgacgtacttgaaaaatggatggaatgatgtgtaaaattgttcaacgggtcatccttagtaatattattgttcattttccgtttaaaatagggattgatttgagcctctggcattcaatgggcgttcctgcctcccggccgattttgactggttgctaaacattgtatggagcggaattgtgattccttggtgcttatgtctcaaataattgttgttccagagatggagagtcttttcagaggtgttcatgtggtaagggccataaactgagccgtctactgcgattattaggccaaacggttatgggcttgtgaatataatccggtagtatccatgtcagttgtgttgatgattcattcagatacctacaaaaccgcggggaggcagatgtgatgcagggaatgtattcagttcagcaaactgtgcgtcaatgatgagatggcatgccttccatgcacacctgaggcagcgacacatcgttgcaaagtgctcgcagttgttaaatgcggcgttgtagacaaatggggtttgctcagcatctttgaccagagcgagggcaaggcttgccgagagggtctgatccagagcagccccttcggggtacaaagcctccgcaaagatagagccgttggcaatgaagtcttcgtaggatcgcaaggagacgttggcctgctccttagaaattccccacacatcaacgactgtcgggacttcgatatcccctggtgccaccacttgctgcctgacaaagatgccatggtgcctgtaaccggatgcgtcttttaccatgatctgggcgccaggcttaagcttgccgagcatagcatagccgctcttgtaccgcgtcagggtagcatgtgggtgccagaggtctggtggtgaccaatctggaagcattcgcttgatgtgggcgattgccgatgtgaggatgtcggtaaggggattttcccgagatgccatgtttgtctgaaattgagctgctgactcgtgtgaagcttcgaggatttatgatagagaattatatagggatcttttttatgcgaccgtcattttctcattgcaacaccgggggaggacatgggttttaattcaggacttttattgattgggtataaggatacctggtacagatgggattttaaaatgaggaatccgtattgtcgaagccgacagtgtgtgtgcttacagggttcaatactgtccaagacgcatttaaggttgttcctcacaaacacattccatttgtcatactttgtgtgcataatgggcatttagcatatgcatttgatgacattgaggaggtgcgcattgagccagattttgtgttattgaatgcccttggtctaaaacatcgtgtgtttgtgttgtgtgacaggtttacagatcttactcccaattataggtcgtgcgtgagccacgtcatctgcgcatcaacaagttgcgatgttgttgtaccccattgcaatgatttgctatggctggatttggagagaatgcaatttgcgtttttgttctagattgtgacaaattttccaggaagatcgtcttatctgatacagtattgtgaagacagccaaacactacatcacagtcgacgacaacttaaacttgacaacttaaactcacacacgcgtagcggcggctgctgtcgaatggcacacacaggacactcattgacacacgcaaacatgtagacgaatcctcttcatacagtcgacggaatactaaaatgaaaccgcctcgtgtacggcacaccttacggtgtaaccaaatggtgtagcaacccacggggcagtggaacaccaatacgattttgaatcaacaaattgcattaaaaggaggggcaatccagccagctccaattcaatccgcagtgcggtgcaatccactcatacaatatatgattgtcaccgcactataccggtttttttatgtttcattttactgttctgccgactgtagaatagtatagagacccagccccagacaaggcaatgcatgtgcagtgactgatcatggccgaaatgtacacgaaagcccaactcgatgatgccgtggctgttgccgtggctgatgccgtggctgcagagcgcgtgcgtactgacgctgttcagcgagcttacaaaacgctactggctcagacggaggagcaacatcgtctactgaaccaggcgctgagcttggtttccaagcaggacgaagagatcgagaacctcaagtgcgtgattcttgctcgtgcactcatgaatagacgcggtgcgcgttgtgccccacaatgcatgcaatacaataacatctctctgtgctgacccacacatggtgtcaaagggttgcaacaattgactcgtttgctttccgaaaatatgtaaacctaacagtgtataatgaatttgcagaatgcaaccaacgcttctgtaaatgaggcatccgtattgtcgcagcagacagtgtgtgtgcttactcatgtgatgtatattgttgggcataggcaggctggaaagagcttcatgatcacaaacgaaataggggatggtgaatccactttggtggtttgtgagacagaccatgacgtaaatcatcataaactgcattccctaattgcaatggtaagcgtgcgagacaccctggatagcctaatcgggtttacgattatagttttggacaacgtcattttcgattcgacagacagtctaatacaatatgcgatatcactgcatgtcaaaactggaacacggttaattgtagcagtttcacatccattcagtatcccatctgatggcgatgggataattatacaacttagtgaatacaaagactcatgtggcttgcaatgcctaaacaatttaaaagccaagtatgaattccagctggccgcaaatgtgctgaataggaataagatgcacaccaaagatcagctaagtaatattgtaccgtgtcttagataatacatagactttttatctgatcttgtattttggtactagaaattaaggaaaacgcaaaattcgggtctaagtacaggatattttactgttccgccgactgtagaacccgaaaactttatacacacacgtgactaattgaaccccgcaaccaacaagtcttacaaattttttttatttaaaatatatacactttcattcattcattgaatgccaaaactacctcatgcgaaaaaagaaacgaagagtcgatctgatgtcgtgtgctacacaggtccccgtccacggggaaagaaggacgactcgtacacgtccgaagagttcgtcgcgtttatgaagcatgaggcctctgacaaaaaagaacgaacgcttgatgaatggatagagtgggcaggcgcgctccgcatgaaagcatcgaagtgcagaaaattaacaaaattcaacgaaaaactctcggctgcaagtgaagtcgttgagaaaactgaaaagcccctcaaatcttgtatcgagagcaaatgtcgtagtagttatgaactcatggcgaggctgaccaataattccaaaaccgccatgagctcgttcgataaacacgcaagcaccgcgcgatgcggtgccgtccattgctcgaatgaaggcgtgaaatatggcaaggcgaacaaaaaatgggacgcaatatcgaagagatgcgatattccccgaaagggatgtgccggtgattgttgatgcaggggctgcatttagctgaatccgctaagagacggcgaggtcgtcttgtccacatacagctaccaaggttggcggatcctcacacaaaaggggacgccgtgttcatgggaatttggcctgaattcgggttttctcatctcaccgcatcgggtgtcgcgcacggtgtgataccgacgcacacgtatctaacacaattccgatgtacatctaacacaaatataattcggatctatactaaaactgtctgtacgggggcgaattctggtttgttagctgcttgacaaccctagtggatgtagagatcgcggtattacttaaagcctataattgtgtacacagtatcttgtttgtcactgctttcattttttcatgcacacagataataagcatggacttcactaatacatcaccagctcagctaggcatcatcatcgctgacggagggccacacaagaatgctgcattggctgcacttgtccaaactgctgagcgagctgatgaggcagtgcgggtggcgcatgcggctgttgaagctgccgtagccctgctgcgaaacaacaacaggtatgatttgatttgcgcttgtgattgcacacaggcgggtcatcaactcaacggagaaatcggtgcttcagactgccctgcaagtccttcacatgcattgcatgacagacttcaacagagaggagagcaatgctgtgatcacgatatcgacttggtgcaatatcgtcattcaaccaagtggccatgtcgctctggtgcagggagggattggaaggcgggcatggggttgatccattgcgtcatggagttgtacatgataattggattaatagggaatggtactactttgcctcatggtatcaccggatgaggaagatgctcagaccccctcttttgaaaacaggttagtttgcttagcctaaaaagtctataaaaaatcgcagaattaaattatcactactcaagagaaagtcgtgtgtatcaagccggataggatcaacctgtcaacgaccatatcaaactgtatatcacagtttagtgaacgtgttagccaattcagtccatgacttgcaatcggcagggtgtcgcatgtctcgtccaatgaaattaattgtgagttggttagctgcgttctggtcacaccacttccagaattgttccgccgcagtgagacatgcagaggatccatgtttggcacaatacaactcaccgaacttcagcccaccattgatgtaaattacaaacactttgtttggggaggtttgctccttcgtccaatgctccagcgctacgtacgagtcaacgacttttgtctcgacatggtgcacttgagacagcctaagccactcgtccaccgaatggggttcgatatggctatccatgaaaatcgctgtattgatgttataaccggtttgaatgagggctattaaaacattccactcatgatatccgctgccacactctggaaata

SEQ ID NO: 305 - DNA, 21086 bp, Chlamydomonas sp.
  source 1..21086: mol_type = other DNA
ccggaccaggagaggtagctgtgcctacgggatctatgttcgcttcctgcaagcgcctcttcaaagaggaggttcatgtgacagatgagttcaagacgactctcatgtcttgggaaaccggtgccaagaaggaatgtgtttacaagattccaagtgtccaaataaccacggaaggtcagattcgtctaggttacgagttgttgggtcacaccccattgaaggagactccaaaggtctcttatcgcgaccagttggcggtgagggtgtactgcacacgtaaacaaatccaagaaaaacacaggaggggtggcttagccccctctcttgtcgacaacaactcgatcaagcggtaccctgaggtacgaggactgcgattctctccagaaaccagcaccgggactcggaccgggaccgctcctctgctctcacaatagcaaggctgcactgcagggaactgttgggtcaagggagaccgcttccattttgcagggatgcgtgttgttgatgggctacaaaaaaacatgatggtgttccactgccccgtgggttgctacaccataaggttacaccataaggtgtaccgtacactccagaaagcggtttcattttagtattccgtcgagtgtagattgcgtctccaacaccgagtacagactcggtttagccattctgaggagttcggctgtgctggtgctcaggagaatcgtgcagagaataaaaaaataaaaaaataaaccaccagtttcatttgcgttagctaatgcatcatcttttgtttatgttgcagtttgatttgccttactttgttctcatcatcaagcaaccaacctcaaaactgcttgtcaagtgatatatgtcgccaacgtaccacatttaacaagtggcggagcccctttcacctattccccacagcggagcgaccgggggtgaccggaggggagcccccacaaaggagtccgcgaggaaccgagcgggtgggcgaccggaggggagcccccacaaaggagtccgcgaggaaccgagcgggtgggcgaccggaggggagcccacagttcgcagttcacatcaaccagcagacacactactgatttacacacacacacacacacacgcgacgcatggaacacgcggatgatgtatgggggggagggagcaagacgccgacgacgtcaggagaacaagagacacgcacgcacgcatggaacacgcacacacgcaaacggaggggggaattcacaggggtacggtacagtacagtacactacactcgatcgatgtacgcatacagctagggacatttgatattgggacaccttatattttggggattctgaaaagttgaccaattcaagatttgtaaccgcatctaaagacactattggtaaggtgtgccgtacacgaagcggtttcattttagtattccgttgactgtacgcccccatgctgcccggctggcattcgatgtggggcaactggcgagacggtacccacaaatcgaagtgccgcttgtcctgagagaggtgagcgaactgcattcatccagcatccacgagaaatacatttccatcccgacacaaaactccagcaacagtttgcatgggaccttgcattctgggggcaaaagttcctgcacagggctcccagatcccgtgtagttcctgaagctttgtagcacacggaatcatcaggaacaagaccaatacacaatttttaaggatttagaatagtaatataggcacccagccccagacaaggcaatgcatgtgcagtgactgagcatggccgaaatgtacacgaaagcccaactcgatgatgccgtggctgttgccgtggctgatgccgtggctgcagagcgcgtgcgtactgacgctgttcagcgagcttacaaaacgctactggctcagacggaggagtctgcgcatgagcaacatcgtctactgaaccaggcgctgagcttggtttccaagcaggacgaagagatcgagaacctcaagtgcgtgattcttgctcgtgcactcatgaatagacgcggtgcgcgttgtgccccacaatgcatgcaatacaataacatctctctgtgctgacccacacatggtgtcaaagggttgcaacaattgactcgtttgctttccgaaaatatgtaaacctaacagtgtataatgaatttgcagaatgcaaccaacgcttctgtaaatgaggcatccgtattgtcgcagcagacagtgtgtgtacttactcatgtgatgtatattgttgggcataggcaggctggaaagagcttcatgatcacaaacgaaataggggatggtgaatccactttggtggtttgtgagacagaccatgacgtaaatcatcataaactgcattccccaattgcaattgtaagcatgcgagacaccctggatagcctaatcgggtttaatattatagttttggacaacgtcattttcgattcgacagacagtctaatacaatatgctatatcactgcatgtcaaaactggaacacggttaattgtagcagtttcacatccattcagtatcccatctgatggcgatgggataattatacaacttagtgaatacaaagactcatgtggcttgcaatgcctaaacaatttaaaagccaagtatgaattccagctggccgcaaatgtgctgaataggaataagatgcacaccacagatcagacacggtaaagtagtcgcaatggtgatcgcatatcctaaacttggttggtcagaatcgtacggcagatatcgtcaccgtcgtagcaggttgtgtcgatacgattatcgcaatgattcaagttgggctggctgctgcttcgaatgcacatggcgtctaatgagatgaaaaggtgttgtttcccagtaagggtgttgttgcttatatctaattatttctgggagttcttcaatacgatccaggaagttgtacatgattgctttatcccacagggtcggtgtttttatttgttgaaacagctggaatacgtcttctgcatcttgtaatgtaaagttgttacgaacctgctgaactcggttcttgaaggctctctgattctgatctttgtgaaaaaaaaacattttttacaggatatgcgtaattgatatagaacccgaaaactttatacacacacgtgactaattccctcagaatcgccctctggaagcttctagggaaacagaaaaaaaaaaaaaaaaaaaaaatcggtagtcatggtgtcgattgtttgcttttcgaacctgttgctactacagtcggcggaacagtaataaggtgtaccgtacactccagaaagcggtttcattttagtattccgtcgagtgtagagtaattgggtcatttatagtgtgcaagtaatttgtctcaaaccattttgtgacacctggcacatttgataatgggaaatatgtacttgatgcacaagaatggctcatgatgatatgggatgttgatataaaccttatgtaacagccttatacgtatcgccattcgatgacaaggaggatgctgactgtgtaagaatgttttgtttttgacaaaactcttgaaaaatcacatgcaagggtggacatgctgcatgctcgcggtgtgcatccacatgagaatgaatgaatgtacgtgcaggggggggatgcgcaagccgcctccttggcatgtgtgaggatgaatggatgactcaacatgataaggaactctgaagaaaaacgttacaccgcaaccaacaagtcttagataattttatttttttatttaaaatatatacactttcattcattcattgaatgccacgagtggcaaaactacctcaagaaaaaagaaacgaagagtcgatcagatgtcgtgtgctacacaggtccccgtccacgcggaaagaaggacgactcgtacacgtccgaagagttcgtcgcttttatgaagcatgaggcctctgacaaaaaagaacggacgcttgatgaatggatagagtgggcaggcgcgctccgcatgaaagcatcgaagtgcagaaaagtaacaaaatgcaacgataaactatcggctgcaggtgaagtcattgataaaactttaaagcccctcacatcttgtatcgagagcaaatgtcatagtcgttatgaactcatggcgaggctgaccaataattccaaaccgccatgagctcattcgataaacacgcaagcaccgcgcgatgcggtgccgtccattgctcgaatgaaggcgtgaaatatggcaaggcgaccaaatcatgggacgcaatatcgaagagatgcgatattccccgaaagggatgtgccggtgattgttgatgcaggggctgcatttagctgaatccgctaagagacggcgaggtcgtcttgtccacatacagctaccaaggttggcggatcctcacacaaaagggaacgtcgttcgtgttcatgggaatttggcctgaattcgggttttctcatctcaccgcatcgggtgtcgcgcacggtgtgataccgacgcacacgtatctaacacaattccgatgtacatctaacacaaatctaattcggatctatactaaaactgtctgtacgggggcaaattctggtttgttagctgcttgacaaccctatttgatcgcggtattacttaaagcctataattgtgtacacagtatcttgtttgtcactgctttcattttttcatgcacacagataataagcatggacttcactaatacatcaccagatcagctaggcatcatcatcgcttacggagggccccacaagaatgctgcattggctgcacttgtccaaactgctgagcgagctgatgaggcagtgcgggtggcgcatgcggctgttgaagctgccgtagccctgctgcgaaacaacaacaggtatgatttgatttgcgcttgtgattgcacacaggcgggtcatcaactcaacggagaaatcgatgcttcagactgccctgcaagtccttcaaacgcattgcatgacagacttcaacagagaggagagcaatgctgtgatcacgatatcgacttggtgcaatatcgtcattcaaccaagtggccatgtcgctctggtgcagggagggattggaaggcgggcatggggttgatccattgcgtcatggagttgtacatgataattggattaatagggaatggtactatttaacctcatggtatcaccggatgaggaagatgctcagaccccctcttttgaaaacaggttagtttgcttagcctaaaaagtcgataaaaaatcgcagaattaaattatcactactcaagagaaagtcgtgtgtatcaagccggataggatcaacctgtcaacgaccagatcaaactgtatatcacagtttagtgaacgtgttagccaattcagtccatgacttgcaatcggcagggtgtcgcatgtctcgtccaatgaaattaattgcgagttggttagctgcgttctggtcacaccacttccagaattgtgccgccgcagggagacatgcagaggatccatgtttggcacaatacgactcaccgaacttcagcccaccgttgatgtaaattacaaacactttgtttggggaggtttgctccttcgtccaatgctccagcgctacgtacgagtcaacgacttttgtcgcgacatggtgcacttgagacagcctaagccactcgtcaaccgaatggggctcgatatggctatccatgaaaatcgctgtattgatgttataaccggtttgaatgagggctattaaaacattccactcatgatatccgctgccacactctggaaatacaatgattgataccttacttgtgcatttgtttacataattgagcacattattgacgatgtggttactgtcattgggggtacatgcactattttgtagaacaggtaaaggatgatttgcatcaccctggatttgcattattattatgatttcttattcttttggtgataaaatcatgcaccacatttccttaagcacactttatcatgaaatacaaggtgtcccactactccatgctcgcacacgactggatgattataaggtgtgtcccactttatttttattagagcgcacctaattctcacaaagggttggtcattcgtgttctacgccatgaccgggagcaggttagggtgcaaggtcttactggccgtagcaaggccaaagtaagtagttacaaggtttatattgtacctccgctccggcaatcaatgtaatgtaattggaagttgaaacgctatctttcgcttattctggacaacaagtggaaatctatactttataaacaatcaataaatatgattgacaagtgtttttctctactaatacctgtctgcaccttcgcttttatttacatagctcgactgaagattgagcttgagactgatcgcactcgaaataagtcagatgctgctcgactgaagcttgagactgagcgcgcagaagcacttgagaagcaactgaggtacgaactgtcaagcatgactgccgagcaatggaattccctgaacgatcatgacaggcgtctcattgaggatctttgcaaacaatacggaatctcatttcccaacattcaggagtcattcctcgattcctcgattcatctttcatgagcgcatgaggacacgtgtcgtatcaagcagacttctgcttaacaaactatttagagatcatgaaagaggaatcgcgggacccacggagtggggcaggggaattcagctgcggactcgcggaaacacgtgtcggatccttccattcacgagcgcccccatgtcatccaaatatttgcttgctggtggccatgttcagatggatatcaagaaagtcaagattggagggtcctccatgatggggatatcgccatctgtcgatggtgcatgggaattcttgagtattgtgacatggaaactacccacttggcagtgcagcacaacggtggggctgtgtctgtggatgtatttccagaaccaggcacatttgcatctacatgtgccgtacactccagaaagcggttttattttagtattccgtcaagtgtagaatttgaatgcatacgtggccttcaacatattcacccagtcagatccgtgatggtcatgatactgactgagttgtaagatggtgtctcgaccggctaggggaatgctgcacgggtgagagacagacacgatgacggcacgagctttcgactgcatggcattgtgtaacaattggcggccttgtacattaaaaatatggatgtcatcaaatgctagcacattgaaaccgtcaagtgaaggtgattctgattcagattcagacagtttacacaacgttgcctctggtgtatgtaaagcatggtactccttgttatgttctgtcatgaccaatattagagtgggtggtgaatgttgagaaataagttgagtgatagcgtgactcttcccactttccctgcgccctaaaatgtacattacttgtggcttacaagttgtctgtgggatgctcatttactcacatgactagggaatttgatgcatataataaacgcaaccaaacaagctacagtcggcgtgtccaggaagagaggcgatcgcttcagtgcggctggtacttcaatgggcactctcgaaggtcgaagaccgattaccgctgtccggcttcatttcgttttgtcgccggagcaaacggaacggaggaaacatgtcgggaatagcggatgctggagctcgtgaagcttcgtattcagcgcacggaccaaccattattcatatcccttcattccgtatttcagcatttaagctgatgaaccctatgcagttggatgggtaggcgaagtgtcatgcgacaatacaagaacttgaatcaactgctcccgttcgcagaagaatggacttctcccccttccgcagatcatcgctgatggcttttaggacacgctcaacttggtgggaatgcgcattgatgtcaccagttttgcagacccaagcaaagcactcgcaattccatgcaatcagattgtacttcttccgagcaaactcaggtgattccaccatccacttggcaaggtcaacggcgcgttggcgttcgaatttatcggcctcggagttggcagaggcatacggcacgataccaaaagtcgctcttgctccaatgaactcggtgtgcgagccgatctgtaatcgagcatctcgcatcaacatgtcaccagtcggagacacgaagtgcgcaacctgaggatcttgaccagggccataagggcttatcacaatgccatggtgtgcataaccaaggcgccaccttccgatcatcacgaccacatgatcaccaggcttcaagagcttccaagcatctgtgctaaattgctgcacagttccctcctgggctagagtccagtgtccctgtgactgcccctcaagaagttcaatgaacttagccattcgcctgcgagcacgatgcaacaaatagcgttggtatgtagcaactgcaaaccgaaaactatccggaaacaggcaattttgtgtgtgcacatccaatcccgcccaaactgtagatggtatattgcgcagtgccaacacgtcaagccttggtacaatgtgcatctaaaggtgctacgtctggtggaacgtattgtcacatcaaccagcagacacactactacacactactgtgtaactaactgtcaagtcttacacaatgtgtatgttgtttgtaaaagattcacatgtttgtacactcggacaaactgtgcactgcaacgcttgagcttatcactggaacactttgtctgcaacgcttgagcttatcactggggattgtgaaggggaaaccgcggacaatccctagctagggacatttgatattgggacaccttatattttggggattctgaaaagttgaccaataatgggcgttcctgcctcccggccgattttgactggttgcgaaacatggtatggagcggatttttgattccttggtgctcatgtctcaagctagcgagtcgttcaagaggctctaaatcctgattagaaatttaaaaaaatcggccgggaggcaggaacgcccattcaattcaagatttgtaaccgatcttgtcaatacagatactgtcttcaggtgattgacacaaaaaattcaaggcatctaaagacactgaatttacatgttcaaagtaccctgaaaagtcaaactgatggctaacatcgtgcgcatcaataatcaatatgactgtaatcaaatatatctgctacatctggaattattgggaacatgcagcgatattttcgcttgagcaaactaaagacattctcaatagcgttaaattctggactgtaaggaggtacaaagagtggtcgtattcctatagaatcgaacatagaaatcgtctcctttgaatgattgaactggatattgtcaaggacagcgactgtaccccgatgtacatgtaactcagatacaaactgtacaaagtcgactttcttgcaattgtgatcaaggatcttgtaatgaacgatacctttagcagaaacgacagcaattagtgtcaatttggacattcgcaatgtcttagaaatttggatatttaaacgtttgccgcgttgacagtaccctctgcgacgagtgtcaccaatgtgaaaacccgcctcatcgatgcttaacaaatccgatgtcggaacggctaaatactccttacaaaaacggtcgacagaagatttgtggtcagtcttgtgccgaactgttttgtatgcgcgcttgcgggtgtaaccaagtttgcttgtgtagcgtccacaagtttttggcatcttgacagaggacagagaagtcacacactctgcaagctgagacattgtcaagaagggattggagtcaatcagttgttttatagcagccttgatatcttcttgttggggctagctgttgttagggccagctgggggcaaccgcgcggtgtcttatctctgcatcaatcatgataacgtatggaatggtataaggaaatgtgggtgcaatattataacaccaaaagaaaaagaatactcaccccctcttaatgggggtagtgcaagacaaaggagatgacgatattaacatcagcgtcgtcaagaagacgcttaattctctgtgcatggatgtatcgaggcatcagatctcctcaaggatacaaagcatggtactcttaatcaaccacgcagttgcagaggcatacttattcgcaaactttcatatcacaagatgcctcgatgatggagactttgacgtcaagcagttgccacacctggatcggaacttttattacaggtgcctccttgcggtatcgacctccaatgttcgaaaggatactctgggccagagcttcaatgataccatggttgctttcgacgccctaagacctgcaggatacgtgaaggtggacgttcgtccttggggacaagtaatcacagacgtctcaatacaaatggcgacgatggcgtgcaacagcgtctgggcaaacgtggacagggtcgttatcaagtacctgcgcttgaaacatccctctctgaagaaacatttcaagaagattgtcaaagcggtggtccagtacccagaatcgaaaatcgacacaatcatcccagagggcctcgtgcatgcgatccacatcaaagaggttgtcagtcacttgagggctctctttccgctgccaagagggaagcagttcaacactagatcgcacctgacaatgcgattgttccatcacgtgcttacagagttgggagaggtcggacgagtggatccgaaagataaaaaaacaagaaaaagtcacccccgtctgttcagtatccttcctcgcaagaacggcttcacaatttcgtacgtcccgatatcttccatgactttcatgaagcttctcagcatgggtgattcgccactcgagagcgtctctggcgatggacgttacgagaaccatacaatgctgtggcgaaagtactttaatgtccaaggtcttgagacgaaaaggtctcgctttgacaaccgaatcctcagcgacggtaaaggtgtatccgtccaaatgaagcagaagggtaaagaagaggtcgttgaagaaggagaaaacgcaggctatccctaggacgcaaatatcgtagagtgcaaggacgcagtgggtgcgctgcgtgtcggagtagaccctggaatgacagatatcgtcacggtagcatcttctgcaggtcgcatcgagtctttcagctcggctcgttttagcgaagttgctgggtacaatacaagcaagcgtcgcacctacaaatggaatgacgagactcaagacctcgtgaagtccattccatcgcctaatacgagcaacatggtcgacctgcaggaccatgtcagagcttatctcaaagcgctcccgatcctcctacaacacagagccaacaaaggctaccgatctatgcgattctttcgatacgttggtaaacagaagacgattgaaaaggtatgcgatgtgattgcaccaagggcacagacgaccgttgttggctttggcaactggtccaaccaagggtatggtatcagtcgttcatgttctgggcccatcaaagagatcaggaggtgcctttcacgtcgtaagaatgttttgttcaaaaacgtcgacgaacgcaacacttcttgtaaatgtcacggctgcttccagaggcttgtcaacatgaaggcagacagcgtagtctggcgcggagtttgcaaagagtccccaatcgacgggtctatatctgttgagaagcagaagatggtggtgaagaacgtcaaggtccacaaagtactgcactgtagagacagtgtcaaaagcgcatcatccaatgtgcgctgtggtgcaacctggaaccgagacgtgaacgctgccaagaaccttcttctgcttctgacaacgtggatggacgggagagagcgacctgaggcattctgtgttccctcgcctccccccaaaaccacagtttccatcgaggcgagtgtgagcgctaaaccgaccgacccacctgggtttgtcagcagcttgccttgttatcctttgggccagcttaaatgctgaaatacagagatgaagggcaaaaatatgtactcgcctttagctgatctacccattgggttaaagggtcaccggtagggcgtcccacaaattgcgtctccgactgtagcaaagctcatcgtggaaactccaagtatggctctgcgcaagtatgacttgattcactggaattatgagtgtttcgcatggatttgcaagacaggtggcttgaagcacaactcagaccaggtgtaccgagtgttgcgagttgttctcaaataattttgggacactctttataatttgaatgatatcccatgaaaccagatacaggaggaaagtttgtaaggtgtgtcccactttatttgaaacgcggatgaggcaacgcggaccccgcgcgccaaatatactacgtttcgaaaaaaattgaaacgttttctccagcacaacaaccaacaacaactacaacacacgtaatcgccaaattcactcactgaaatacccgaaatgtctggatccacaacaaccacctctaacgcccgctgcacttgcgctgggaccaaggatgacggtttcccatgttcccggatcgtaactaacggccgtaaatactgccacaatcacgtcaagcaggacgactccttcaaggaggagtccaatgcgtctgaagagccgatgactactacagtcgaagcctacgatgcgctcctgcgcaagctcgagaactgtcggatcaagaatcagacacttatcaagcataacgatgagctgaagctcatctccaagactaccatgcatgagaatatcctgctgaagagtcagctagttccagagttgtccctgtaccactttggacacgacctgctcaccagcctcaatctgccattctgcaatacgaagtgctgcatcgtcctgctcgattcgtccggagctagacagtgcaaaaaaattcgccaggccactggcctgctgtgcaccacgcacgcgtcatcaccaaagcatgtagcagaaaaggtcaacaaggcctacgctacaagctgtttcgagagacacgcgaaggtcatcagcgcatctcagacacagtctgattgcgtagccaagtacaactctgcgtgcgatgacaacaagtacaactactctgcggctgctgctccggcgccgtcgtcgttctcatcatagttcgttcgttcgttcgtgcatacatacatacatacatgcatgcacaagcgaaccaatactttttttctgcttaacaaacctgtgtttttttgggatggtggagcgcgcctcttaaaaatcacgctgctttggagtctcgcatcattatttctttattggacatgcatgatacatagagaaatatgtgtgattcaatacaggtataaataagtgtaacccccacagatgcagagacaaaagcgtgccttgctggtcagccccagttacgccacgactgggttggatatcaggactcgatacgtgatggagaaaacaggagtgctccccagtgacctgggcaagtacagcactgagggttttgcgcgcgacgcagcagtgctacgccgccagttagggccgggtttcagttttgaaacactggagggcgaggtgttgtccagcgctgtattggaccacctgaagtggttgttgtcccacgaaacagaggtggctgtgttgttgttctgcggccatggcatgtgtcaggggtcgccacagcacggtagtctcgtgtgttcattcaagcagctggttacagctgaggcaattgagtgcgtggcggagaagttcaaaggcacatttgtgaggttgctgaacatgtgcgatgccgaagggttgcaacagttgactcgtttgctttccgaaaataagtaaacctaacagtgtataaggaatttgcatgtaatgggcgttcctgcctcccggccgatttttttaaatttctaatcaggatttagagcctcctgaacgactcgctagcttgagacatcagcaccaaggaatcacaaatccgctccataccatgtttcgcaaccagtcaaaatcggccgggaggcaggaacgcccattatgtactaaatatcagaatgccatgtatggcaaccaaagcttctgtaaaattggcaaggcctccgatgcccttggtgtctccaggaccgtcctccgtcgatgggcggataatggcacgatcagaacgatccggactccaggcaaccaacgtctctttgacccaagcagcatccaaggctacctcatcgagcaggaaaaaaaacccagcagtcgtcaagtcattctctacgcacgtgtgtctgtcctcacacaaacaacaacccgacctgctcagacagcaattgttcttgcaaacccatatttctgacaaacattccggatgcgagcaagtcattgaagtcaaggacgtcggatcagggctcaacttcaagcgcccaggacttttacgagtattgggactcgtcacggcaggacttgtatcgtcaattgttgtggcttccaaagacaggttcgcaaggtttggtttcgagctcattgaatggatttgctcgcagcactcctgttcgatcatcgttctcgatcaccaagacggagcccctgaatacgagcttggaaaagacctcatgtccatcgttcaagtatattgttgccgatggaacggtcgaagacgctacaaagtcaaatgccaaacccaagttgaggaccttaaagctgaagctgaacccaacaaaggctcagaaatcgatgctggcagagtttgcagggtgcagccggttcatgtacaacaaggtggcagcacggttgggcgtcggaagcactcacaagtctgtcttccgaattcgagacaggtatgtgacgaacaaggtgaggggggaggggaagatgccaaacccgtacttcaagaatcgccaatggttgcttcagtgccccaaaagcgtacgccaaagtgcaatcaaggctgccttggcaaacatcaaggcttgcttttcgaatctgaaagcaggtaacatcaagcagttttcagctccgttcagacggaagaagacagagcttgagaggggttgggccattgagatggatcagaagaacgtttccaaggatggcgacaaactcttcatcttcaaagacatattgggcaacatgcgctacttcggtagcaaacaactccataagttgatgcctgaggaaaacccgacccacgatccaaaggtccacaaatcccgcttcggcgaatatttcctcgtcttgtctgtagccgccagggacaggagggcagagcggaagcctgtccatccagacaaggttgcaactgcatccatcgacccaggcgtccgcaaaacaatggtcacgtactcaccagagaatgaggaatccttcatgcttggtcagggacaggcatccgaccttgtcaaactcctgctggttcatgacaagctgcagtcaaggttggatactgagaaaaccttacgatcaaaagagaggatgaagataaaaatgcagatgattcgcattcggaagagaattttttacctcaagaaagagtttagggaccagacaacaaatttcttggccgctcgctacgatgtgttgttggtacctcaattggagacggcgaagatgaccatcagtgctgaacgggagctgacaatcaaggttgcccgtcagatgctgactttgagccactctgtgctgtttaattggctgaaggagaagtgtgaagagtacgggacagtgttcttgcatgtgcttgagcattacacaagtcagacatgccctatgtgcggtttcttaaacaagtgtggagagacatacacctgcaagaactgtcaattcacctgcgacagagacattgtgggggcagctggcatcttccttaaggcagttcgaacagaaaaatccccgggggagttgacccctatgatacccatatggagaattcattgtctttcttactacatgtcccccggacccccggatgtgtaataagaaattcataggttcgaggatatacgggtagcttaaattcaacgggagtctacgttgaaggatgggcaaggtaccagggacgcagtaaggctgcgaggtgctcagatgcaagggggggcaggcgcgccaagcacctactacggcatgacagtggcagccacgcagcagtttggcaagaccactggtaacagccggggcagcaagttcggtgtcgcactggggcgcatgtttgatcaggaggtggttgtgacgtacgatgggttcgagacggcattggacaagtattggagtgggtcgcaagtacggatgacgcacgctttccggggtgtgttcgggacgcccgctctcccggtgggttcttgttgcatcactaatgatgatgcgggttctgagtctgagtctgagatggagttctgagtctgaggtggagattgtgtggggaacgtttaaacaaaattcagggaaacctatcattatacatcacggttgttctcatcatcaagcaaccaacctcaaaactgcttttcaatggatgaaccaccgtaccacattaaacaagtggcggagcccctttcacctattccccacagcggagcgaccgggggcgaccggaggggagcccccacaaaggagtccgcgaggaaccgagcgggtgggcgaccggaggggagcccacagtttaacatcaaccagcagacacactactgatttacggaacggaaatcacacacacacacgcgacgccgccgcctccatctcggacatggacagcatcagcaaacttggtctcttcgcctcatcatcatcgtgaccatcagcaacgtctcttccccccagcggagcgactgggggcaaccggaggggagcccacagtgtaacatcaaccagcagacacactactgggttcacaagcaaacacacgcacgtgaagaagagtgataggcgaacggaggaaacatgtcggatagatcggataacgcacgcacgcactttatcacgacacataccgcatcctcacacacgcgtcgcggcggatgctgtcgagatgatgcccaccaaccactctcactcattctcacgcacgcactctatcacgacacaaacggtggctttcgcatcatcctcggtgtccatcctgagtagaacgcctgatgttcgtaaacacagaagtttttaacacattttactgttccgcagactgtaggcaccgcgtgtcagcttccatgtattgtttttctgattacagattcctttgtattcgagtaaaaaatatgtgcattgaaagtacaaacccctatatataaaatgatccgattgtctgaagtctatgcgaaatcacagtcgacatcaaacatcttatatagcgataatgtacccattaaaggagtgcgatcgcgaccaggtgtaaaagaagcaccatcgatgtcatttgaacaagatacagacacaggaatgttcaatgcaacaagtaatgtcttaggatttgctgcaggagcatatactacgctcattgcatcatcttccaatttacaagccaatacgcaaatcacaacatcttcaaatatagtgcctctcaacgacaatgtctcagaattaggaacagtaacaaagaagttcgcaaaactgtatgcaacagatatctatggaacatctgctacatttaacacactcggaggaacggccatctcaagtatcgtcacttccacaagtagcaatgtcgcagccagttctgcagcggtcaaatcagcatacgatagtgccgtatcagcttccaatcagacgtacggcatcggagcgctcgatagtaatggtgatatccttctcaggggcaacttgcgcatctccgaaactgacaatatatacaaaggtacagaggtattcagtagcggtggcggtggtggcggtggtggtatcatcacttccgactctaatattgtccctagtgtgaatgggacacaggatctgggtgcacctgataaacgatggcgtaatctttatttgtctggtaacctcatttctttcggtaacggaatgaacatcgacggatactcttggaattatttggccaattacgtcgttccccagcgtgtcctggaaaatactgtttccacttatctcttcaatggtgctgcacaagatcattcggcatacgtgcgcaatggcgaattgtacatgtacggtcgcaatgattatggacaattgggattgggacacacatccaatatcgccgtacccaccaaagtacccggtatcactaatgcagcattggtagcgtgtggtgaacgcttcactctctgtgttcgcacagacggtaccgctatctctaccggtctgaacaacaatggacaattgggtataggttcgactgtgacgacctcaaactttagtattgtagcaggcgtttccaatgcgattgctgttgctgcaggatacacgcatgcaatgtacatgacatcgaacggtatcgttttgagtgcaggaagcgatgctaatggacaacttggaagaggcgcatcctctgccaatgtcgtgatcaatgcaaatatcgttcccatgctcatgccgaatggaagcaatgtgtctgcacgtgccatttctgctggcgggtaccattcagctgtcctcctaaataacggtagcgcttatctttgtggtaagaatgatcagggacaatgtggtgcatctcctaccctcgttccacaagccaattcattgggtatcatctccacactttcgaatgtggtagatgttgcttgtggacacgaacatacgctcttcacgcgctacgatgggcaagtgctgggattcggacgtaatgatcgtggtcaattgggacagggcaataagacgtcacctgtgacgtctgtggtgcaggtacttgcgggtggaggcgcaggctctagcaacggtttgtccgtcgagatcgcggctggtttcaaccattcggcctatataaaaaatgacaataccatcttcgtattcggtgccaatgataagggtcaattgggattgggacagaccaccaccaaatcgttgacgcctacacaacttgtgggatatgcgggctacgatatcgcatgtggcaggaaccatacggtgatctcgaccacaccggatcctttgacattcaattatactggaaacaatgcattgatcgcgtttggtgataatgcatacggacaggtgggtgataacaatcccaatgtgacgacgcgatggttcccgaaccgtattcatgacggaacgttcaagaaaaagttgggggtgggatgtattacaggttcatccgcctacgttgattcggacggagtgttgttcattacaggttataataataatggtcaactcggagatgaaactataattaacaaaagcacgttcagacccgtttcacgcctgatgaaggaaggaatacgtatcgtagctgttgcggtcggcgaagtacacacgcttgcccttgactcgacgggacgcgtgcacgcatggggagccaacttctacggccagctaggaagaaataataccactcgatcaaatgtcccgatcgatgtctcgagtttcggatctcttgtcggtaaaacgatcgtggccattgcgggcggtcaatatcacacgcttgccctagactctacgggacgcgtgcacgcatggggatacaacagccaaggtcagctcggaaataatactactaccactcaatccaatgtcccgatcgatgtctcgagcttcggatctcttgtcggtaaaacgatcgtggccattgcgggcggcagcagtcacacgcttgccctagactctacgggacgcgtgcacgcatggggatacaacggtcactgcaatctcggaaacaatagtatcactaaatcattagtgccgatagatgtctcgagtttcggatctcttgtcggtaaaacgatcgtggccattgcgggcggcaaccatcaaacgcttgcccttgactcgacgggacgcgtgcacgcatggggatggaacctctacggtcagctcggaaataatactatcactcaatcaaatgtcccgatcgatgtatctagtttcggatctcttgtcggtaaaacgatcgtggccattgcgggcggcaactatcacacgcttgcccttgactctacgggacgcggcacgcatggggatacaacaacaccggccagctaggaaatactactattactcaatcaaatgttccgatcgatgtatcgagtttcggatctcttgtcgataaaacgatcgtggccattgcgggtggcggcatgcacacgcttgcccttgactctacgggacgcgtgcacgcatggggaagaaacatctacggtcagctcggaaatactactaccactaattcattagttcccctcttaatcgacaagaccgcgcgtgactaccatcctcgtgtcttatcgaccggtcttggttctcacaaattgctaacgaatatcggcgttacctccagttcctccctcatggcggtaggcacaaatgcttcccgtcagatcggcgataatacggcgatcgataggtacattcccgtcgatgttggtgttggaagttttggaagtgtcatcatcagttcagcagagagtgttacgcacagcgcgatcgttttacaaagcggtgaagtctggtgctggggtaataatacatatggtcaatgcgggacgaatacagctggtgctgtagtgagcgttcccactaaagtcgttagtatcacgaatgcagtcaaagtcgcatgtggaaacgggttcacattcgtacgcaatgctgacgatacggtcatggcattcggtaacaatgcgagtggacaattaggtgttggaatgagtattgttgcaacatccacattcacacctacccttataagtggattggtaagtatcaaacagattgcggcaggtacatctcatgctgcttccatcgatggctcaggtactttgcgtgtctggggttcaggtatactaggcaaattgggattgggtgatgcttctaataaagatgtacccacaatcgtggatgtgtccttattggactttgccaaagcgacacatgtcgctcttggagg

SEQ ID NO: 306 - DNA, 21770 bp, Chlamydomonas sp.
  source 1..21770: mol_type = other DNA
tgcatgcaatacaataaaatctctctgtgctgacccacacacattactaattcaattccatgcgcgatgtaggtccatggtgtcaaagggttgcaacaattgatcgtttgctttccgaaaatatgtaaacctaacagtgtataatgaatttgcagacagtgtgtgtgcttactcatgtgacgtatattgttgggcgcaggcaggctggaaagagcttcatgatcacaaacgaaataggggatggtgaatccactttggtggtttgtgatacagaccatgacgtaaatcatcataaactgcattccccaattgcaattgtaagcatgcgagacaccctggatagcataatcgggtttaagattatagttttggacaacgtcattttcgattcgacagacagtctactacaagatgctatatcactgcatgtcaaaactggaacacgcttaattgtagcagtttcacatccattcaatatcccatctgatggcgatgggataattatacaacttagtgaatacaaagactcatgtggcttgcaatgcctaaacaatttaaaagccaagtatgaattccagctggccgcaaatgtgctgaataggaataagatgcacaccacagatcagacacggtaaagtagtcgcaatggtgatcgtatatcctaaacttggttggtcagaatcgtacggcagatatcgtcaccgttgtgtcgatacaattatcgcaatggttcaatttgggctggctgctgcttcgaatgcacatggcgtctaatgagatgaaaaggtgttgtttcccagttagggtgttgttgcttatatctaattatttctgggagttcttcaatacgatccaggaagttgtacatgattgctttatcccacagggtcggtgtttttatttgttgaaacagctggaatacgtcttctgcatcttgtaatgtaaagttgttacgaacgtgctgaactcggttcttgaaggctctctgattctgatctttgtgaaaaaaacacattttttacagtatagaacccgaaagctttatacacacacgtgactaattgaaccatcagaatcgccctctggaagcttttcgaacatgttgctactacagtcggcggaacagtaataaggtgtaccgtacactccagaaagcggtttcattttagtattccgtcgagtgtactgctttcagtctttgtcgtgtacgcgtttgttcagtttttttcgtgattccatccacttataccattcatcccatggagtggaattgatgtacgtgtgttcatggacagtgttaagcatgggtttatagagcccatgtatatgggccgctaatgcgaaatgcaaccttgaacagtccatggtatttaagtagggtgtgatcaagcgaccgttgcatcgagcagcaacacaagcctgtatgtacgtattgtagtctgcaacttcttgcaaattgtgaaaaacatggctttgatgaagtccgatgattgcgaattttcccctgatggtgaggatttggggaacaagagaacagtatgtaccgattagcgtaatttgtatgccacgttgttcgatttgatgaacaagatctcgacatggtgagataatgcctacgtatgttcggtcctgatgatgatactcatgcatttcaacccatgttcaataagttgttttgccattgtgagctctgcacaagcatggccagcctctgtgaatactagagtaattgggtcatttatagtgtgcaagtaatttgtctcaaaccattttgtgacacctggcacatttgataatgggaaatatgtacttgatgcacaagaatggctcatgatgatatgggatgttgatataaaccttatgtaacagccttatacgtatcgccattcgatgacaaggaggatgctgactgtgtaagaatgttttgtttttgacaaaactcttgaaaaatcacatgcaagggtggacatgctgcatgctcgcggtgtgcatccacatgagaatgaatgaatgtacgtacagggggggggatgcgcaagccgcctccttggcatgtgtgaggatgaatggatgactcaacatgataaggaactctgaagaaaacgttacaccgcaaccaacaagtcttagataattttatttttgtatttaaaatatatacactttcattcattcattgagtggcaaaactacctcaagcgaaaaaagaaacgaagagtcgatctgatgtcgtgtgctacacaggtccccgtccacgcggaaagaaggacgactcgtacacgtccgaagagttcgtcgcttttatgaagcatgaggcctctgacaaaaaagaacggacgcttgatgaatggatagagtgggcaggcgcgctccgcatgaaagcatcgaagtgcagaaaagtaacaaaatgcaacgataaactatcggctgcaggtgaagtcattgataaaactttaaagcccctcacatcttgtatcgagagcaaatgtcatagtcgttatgaactcatggcgaggctgaccaataattccaagaccgccatgagctcgttcgataaatacgcaagcaccgcgcgatgcggtgccgtccattgctcgaatgaaggcgtgaaatatggcaaggcgaccaaagcatgggacgcaatatcgaagagatgcgatattccccgaaagggatgtgccggtgattgttgatgcaggggctgcatttagctgaatccgctaagagacggcgaggtcgtcttgtccacatacagctaccaaggttggcggatcctcacacaaaaggggacgtcgttcgtgttcatgggaatttggcctgaattcgggttttctcatctcaccgcatcgggtgtcgcgcacggtgtgataccgacgcacacgtatgtaacacaattccgatgtacatctaacacaaatcgaattcggatctatactaaaactatctgtacgggggcgaattctggtttgttagctgcttgacaaccctattttatcgcggtattacttaaaggctataattgtgtacacagtatcttatttgtcactgctttcattttttcatgcacacagataataagcatggacttcactaatacatcaccagctcagctaggcatcatcatcgctgacggagggccacacaagaatgctgcattggctgcacttgtccaaactgctgagcgagctgatgaggcagtgcgggtggcgcatgcggctgttgaagctgccgtagccatgctgcgaaacaacaacaacaggtatgatttgatttgcgcttgtgattgcacaaaggtgggtcatcaactcaacggagaaatcggtgcttcagactgccctgcaagtctttcacacgcattgcatgacagacttcaacaaagaggagagcaatgctgtgatcacgatatcgacttggtgcaatatcgtcattcaaccaagtggccatgtcgctctggtgcaaggcgggcatggggttgatccattgcgtcatggagttgtacatgataattggattaatagggaatggtactactttgcctcatggtatcaccggatgaggaagatgctcagaccccctcttttgaaagtcgataaaaaatcgcagaataaattatcactactcaagagaaagtcgtgtgtatcaagccggataggatcaacctgtcaacgaccagatcaaactgtatatcacagtttagtgaacgtgttagccaattcagtccatgacttgcaatcggcagggtgtcgcatgtctcgtccaatgaaattaattgtgagttggttagctgcgttctggtcacaccacttccagaattgtgccgccgcagtgagacatgcagaggatccatgtttggcacaatacgactcaccgaacttcagtccaccactgatgtaaattacaaacactttgtttggggaggtttgctccttcgtccaatgctccagcgctacgtacgagtcaacgacttttgtcgcgacatggtgcacttgagacagcctaagccactcatcaaccgaatggggctcgatatggctatccatgaaaatcgctgtattgatgttataaccggtttgaatgagggctattaacacattccactcatgatatccgctgccacactctggaaatacaatgattgataccttacttgtgcatttgtttacataattgagcacattattgacgatgtggttactgtcattgggggtacatgcaccattttgtagaacaggtaaaggatgatttgcatcacccattctatgtttgcattattatgatgatgttaagatcctttcttattcttttggtgataaagtcatgcaccacatatccttaagcacactttatcatgaaatacactcattccccaacattcaggagtcattcctcgattccgagattcatctttcatgagcgcatgaggacacgtgtcgtatcaagcagacttctgcttaacaaactatttagagatcaaagattaatcgcgggacccacggagtggggcaggggaattcagctgcggactcgcggaaacacgtgtcggatccttccattcacgagcgcccccatgtcatccaaatattcgcttgctcgtggccatgttcagatggatatcaagaaagtcaagattggagggtcctccatgatggggatatcgccatctgtcgatggcgcatgggaattcttgagtattgtgacatggaaactacccacttggcagtgcagcacaacggtggggctgtgcctgtggatgtatttccataaccaggcacatttgcatctacagttggaatgcatacgtggccttcaacatcttcacccagtcagatccgtgatggtcatgatactgactgagttgtaagatggtgtctcgaccggctaggggaatgctgcacgggtgagagacagacacgatgacggcacgagctttggactgcatggcattgtgtaacaattggcggccttgtacattaaaaagatggatgtcatcaaatgctagctcattgaaaccgtcaagtgaaggtgattctgattcagattcagattcagacagtttacacaacgttgcctctggtgtatgcaaagcatggtactccttgttatgttctgtcatgaccaatattagagtgggtggtgaatgttgagcaataagttgagtgatagcgtgactcttcccactttccctgcgccctaaaatgtacattacttgtggcttacaagttgtctgtgtgatgctcatttactcacatgactagggaatttgatgcatataataaacgcaaccaaccaagctacagtcggcgtgtccaggaagagaggcgatcgcttcagtgcggctgttctctcgaaggtcgaagaccgattatcgctgtccggcttcatttcgttttgtcgcctcagcaaggtgctcgacatatcaccgctggcaggactcacttcgttggttcacctggacatttcgaacaccgacgtggacgacatatcaccgctggcaggactcacttcgttggttcacctggacatttcgaacacagacgtggacgacatatcaccgctggcaggactcacttcgttggttcacctggacatttcgaacacagacgtggacgacatatcttcagcacacggacctcacgccgctgctgccctttctggccacgagatgtccatgtacagccatagtccatcggcaaacagcggattcaatattcaacaagcggcggagcccctttcacctcttccccccagcggagcgaccgggggcgaccggaggggagcccccacaaaggattccgcgaggaaccgagcgggtgggcgaccggaggggagcccacagttcacagttcacatcaagcattagacacactactacacactactactgtgtaactaactgtcaagtcttacacaatgtgtatgttgtttgtaaaagattcacttgtttgtaccacttcggcattaaattaaggagagcttattatcactgtaacgcttgggcttctttctcactgaaagtcatcggagtgcactgtaacacttgagcttatcaccgtaacacttgagcttatcactgtaacacttgagcttatcactgtaacacttgagcttatcactgtaacacttgagcttatcactgtaacacttgagcttatcactgtaacacttgagcttatcactagaacacttgagcttatcactggaacacttgagcttatcactggaacacttgagcttatcactggaacacttgggcgttttccgatgtgtcttctaaagcaggcgtctgctcgacatccatttagggttctgagatggggggcgcggatatagggaggtgttacaggatgatgagtgacggaaccatggaactactcccccggtaggatggaatggctcattttgttcagagtagcttgtaatgggcgttcctgcctcccggccgattttttaaaatttctaatcaggatttagagccgcctgaacgactcgctagcttgagacatcagcactaaggaatcacaaatccgctccataccatgtttcgcaaccagtaaaaatcggccgggaggcaggaacgcccattttgtgttgatatggtttcaattatttactttccaggataataagtgaacaacgcctgtcgagatgaacagcctgatgttgttggtggccaagatcctgggcgtaaagtcagaaggtgctgatagtgacgttttcgccctcatggagggcgcgatgaatgtcatgggcattcacaacttgctcccgcagtcagcccgccgcgttgacatagctgaagttgccacagagctcctttctggcgatcagatcctcattcggacagcgggtagcaatgagagattccatcatggaatctttgttggtcccatttcaggagtgcaggggggtaaaaatctcgtggttgattttgggggctcacaggatgcgggcaaacaagaggccaagatcgggctgcgtacattgggcgaattcatggctgtccccggctggcctgagcttgctgtaatgtgttgggatagcgacacaccagagcttcgggagttctcggcggcactggcgttggggctgcacagggatctgcaagattgctctggcctctatcacttgctgggccgcaactgtgaccactttgcgacatggtgccgtacgctcaggtgggatcagttaagttgtctcgaattgccgctcaggtttacctgatgacacatgcgatgcctttttatccaacacaaaaaatcaaagcctggtttgtttaaaagattttcattttgtttttgttgtgatgtatgtgggagtctgctcaagtccagagcatcgtcggcaatctgacttgtttacacgcgtgcttcgaggcgcgcgaaaacacgtgtcagatctgacctgtttacacacgtattttcatgggcgcaaggaaaacacatgtctgcttgacaaactatttcgggatcatgaaatggaaatcgcgaaacccacggagtggggcaggataggatacatgtcgggcattagatagataggatagcagatgctggagctcgtgaagcttcgtattcagcgcacggaccaaccattattcatatcccttcattccgtatttcagcatttaacctgatgaaccctatgcagttggatgggtaggcgaagtgtcatgcgacaatacaagaacttgaatcaactgctcccgttcgcagaagaatggacctctcccccttccgcagataatcgctgatggcttttacagtcaacggaatattaaaatgaaaccgcttcgtgtacggcacaccttacggtgtaacctaatggtgtagcaacccacggggcagtggaacaccaatacgaatttgaatcaacaaattgcaggatgttaacgagaatatcgtggttcttttttagatcacggctctccatcctgcagactccgtatcgttcttttgtcggtactttcgagagtgtccattgaaggaccagccgcacttaagcgatcgcctcttccccggtaccgtggcccaaaagaacacggggtctttgttgatgtgcaatgcgtcatgaaaggaggtttctttgctggacgggccattttgtaggaccatccactcatacaatatatgattgtcaccgccttataccgtttattgggatgtttcattttactgttccgccgactgtaggacacgctcaacttggtgggaatgcgcattgatgtcaccagttttgcagacccaagcaaatcactcgcaaatccatgcaatcagattgtacttcttccgtgcaaactcaggtgattccaccatccactttcattcgcctgcgagcacgatgcaacaaatagcgttggtaggtagcaactgcaaaccgaaaactatccggaaacaggcaattttgtgtgtgcacatccaatcccgcccaaactgtagatggtatcttgcgcagtgccaacacgtcaagccttggtacaatgtgcatctaatggtgctacgtctggtggaacgtcttgtcacatcaaccagctgacacactactactgtgtaactaactgtcaagtcttacacaatgtgtatgttgtttgtaaaatattcactgcaacgcttgagcttatcactgcatcgcttgagcttatcactgcaacgcttgagcttatcactgaaggggaaaccgcgggctccatggacactgtcagatttcgtgcagcgtagcatcgactttgtcgagctcacctttattcaatacataaggtgtaccgtacactccagaaagctgtttcattttagtattccgtcgagtgtattacgatagctttgcttctatccatttgatgaattcagtgttgccattttgagtcgcaattctgcaaggagcgttgtccatacagctagggacatttgatattgggacaccttatattttggggattctgaaaagttgaccaattcaagatttgtaaccgatcttgtcaatacagatactgtcttcaggtgattgacacaaaaaattcaaggcatctaaacacactgaatttacatgttcaaagtaccctgaaaagtcaaactgatggctaacatcgtgcgcatcaataatccttttcaaagcgttactgtaatcaaatatatctgctacatctggaattattgggaacatgcagcgatattttcgcttgagcaaactaaagacattctcaatagcgttaaactctggactgtaaggaggtacaaagagtggtcgtattcatatagaatcgaacatagaaatcgtctcctttgaatgattgaactggatattgtcaaggacagcgactgtaccccgatgtacatgtaactcagatacaaactgtacaaagtcgactttcttgcaattgtgatcaaggatcttgtaatgaacgatacctttagcagaaacggcagcaattagtgtcaatttggacattcgcaatgtcttagaaatttggatatttaaacgtttgccgcgttgacagtaccctctgcgacgagtgtcaccaatgtaaaaacccgcctcatcgatgcttaacaaatccgatgtcggaacggctaaatactccttacaaaaacggtcgacagaagatttgtggtcattcttgtgccgaactgtgttgtatgcgcgcttgcgggtgtaaccaagtttgcgtgtgtagcgtccacaagtttttggcatcttgacagaggacagagaagtcacacactctgcaagctgagacattgtcaagaagggattggagtcaatcagttgttttatagcagccttgatatcttctgtaatgacactcacccttttcttccgatgatgttttatattggctttggtgacccaacgttggagtgatgattttgatactttgtacagcaaactaactttcctcaaactacgattatagtatttgtagtgaacaaccgcgcgatgtcttatctctgcatcaatcatgataacgtaggaaatggtataaggaaatgtgggtgcaatattataacaccaaaagaaaaagaatactcaccccctcttaatgggggtagtgcaagacaaaggagatgacgatattaacatcagcgtcgtcaagaagacgcttaattctctgtgcatggatgtatcaaggcatcagatatcctcaaggatacaaagcatggtactcttaatcaaccacgcagttgcagaggcatacttattcgcaaactttcatatcacaagatgcctcgatgatggagactttgacgtcaagcagttgccacacctggatcggaacttttattacaggtgcctccttgcggtatcgacctccaatgttcgaaaggatactctgggccagagcttcaatgataccatggttgctttcgacgttctaagacctgcaggatacgtgaaggtggacgttcgtccttggggacaagtaatcgcagacgtctcaatacaaatggcgacgatggcgtgcaacagcgtctgggcaaacgtggacagggtcgttatcaagtacctgcgcttgaaacatccctctctgaagaaacatttcaagaagattgtcaaagcggtggtccagtacccagaatcgaaaatcgacacaatcatcccagagggcctcgtgcatgcgatccacatcaaagaggttgtcagtcacttgagggctctctttccgctgccaagagggaagcagtttaacactagagcgcacctgacaatgcgattgttccatcacgtgcttacagagttgggagaggtcggacgagtggatccgaaagataaaaaaacaagaaaaagtcacccccgtctgttcagtatccttcctcgcaagaacggcttcacaatttcgtacgtcccgatatcttccatgactttcatgaagcttctcagcatgggtgattcgccactcgagagcgtctctggcgatggacgttacgagaaccatacaatgctgtggcgaaagtactttaatgtccaaggtcttgagacgaaaaggtctcgctttgacaaccgaatcctcagcgacggtaaaggtgtatccgtccaaatgaagcagaagggtaaagaagaggtcgttgaagaaggagaaaacgcaggctaccccaaggacgcaaatatcgtagagtgcaaggacgcagtgggtgcgctgcgtgtcggagtagaccctggaatgacagatatcgtcacggtagcatcttctgcaggtcgcatcgagtctttcagctcggctcgctttagcgaagttgctgggtacaatacaagcaagcgtcgcacctacaaatggaatgacgagactcaagacctcgtgaagtccattccatcgcctaatacgagcaacatggtcgacctgcaggaccatgtcagagcttatctcaaagcgctcccgatcctcctacaacacagagccaacaaaggctaccgatctatgcgattctttcgatacgttggtaaacagaagacgattgaaaaggtatgcgatgtgattgcaccaagggcacagacgaccgttgttggcttcggcaactggtccaaccaagggtatggtatcagtcgttcatgttctgggcccatcaaagagatcaggaggtgcctctcacgtcgtaagaatgttttgttcaaaaacgtcgacgaacgcaacacttcttgtaaatgtcacggctgcttccagaggcttgtcaacatgaaggcagacagcgtagtctggcgcggagtttgcaaagagtccccaatcgacgggtctataactgttgagaagcagaagatggtggtgaagaacgtcaaggtccactaagtactgcactgtagagacagtttcaaaagcgcatcatccaatgtgcgctgtggtgcaacctggaaccgagacgtgaatgctgccaagaaccttcttctgcttttgacaacgtggatggacgggagagagcgacctgaggcattctgtgttccctcgcctccccccaaaaccacagtttccatcgaggcgagagtgagcgctaaactgaccgacccacctgggtttgtcagcagcttgccttgttatcctttgggccagcttaaatgctgaaatacagagatgaagggcaaaaatatgtactcgcctttagctgatctacccattgggttaaagggtcaccggtagggcgtcccacaaattgcgtctccgactgtaatgtcgagatgagctcctgctttccacaacaattccgcaatcttaacgtctccttcctcagctgctgatatcagcggtgctccacaccgtttgttgggatcgctaccagctataagcaacaagcgtgtcccgatttatttgagaacagatgtaaagacttggacactactacaataggatgtacgggttgtgaaacccacatcttcattgaaatgaccattgttccaaatcttgatgtattagcaattaaagcattaccaactagaatttgggatttattagacacacacgtacaacaatgcatttatccgacaagattttgtcgtgcaattgcttgcttgcaacgtataataattcgccgtgcacgtaggcggagggcatcatttctccaaatgatagaggaccaagaaactagtcattggacgttggcccctgaaggaaccgaagtgcatgcaactgcagaggcatggaagctcctctcccatggagaccacatcgtcgtgatggttggaggttggcgccatggatatgcgcaccatggcattgtgctcagggagtcccgtctggaccaagacccagatatcgcccacttcacttcaccctcaggagacacacgcatgcgcgatgcccgcctgcaaattgatacctacatcaattttctcgcacgccacacaacgtacggaattgttcaatatacttctccaactgactttgctgacgagcttgtccatcgtaagcgtgctgccaacatagcaaagctcatggtggaaactccaagtatggctctgcgcaagtatgacttgattcactggaattgtgagtgtttcgcatggatttgcaagacaggtggcttgaagcacaactcagaccaggtgtaccgagtgttgcgagacatttgtgatgatatccaaaagggcgacaagtccttcttgcttcgaacggcttctatgtcatctgggtgcacaatatcataaagttgttctcaaataattttgggacactctgtataatttgaatgatataacatgaaaccagatacaggtccgtggttcactacaaatattttttgaggagtctgaggaaagtttgtaaggtgtgtcccactttatttgaaacgcggatgtggcaacgcggaccccgcgtgccaaatagactacgtttcgaaaaaaattgaaacgttttctccagcacaacaaccaacaacaactacaacgcacgtaatcgccaaattcactcactgaaatacccgaaatgtctggatccacaacaaccacctctaacgcccgctgcacttgcgccgggaccaaggatgtcggtttcccatgttcccggatcgtaactaacggccgtaaatactgccacaatcacgtcaagcaggacgactccttcaaggaggagtccaatgcgtctgaagagccgatgactactacagtcgaagcctacgatgcgctcctgcgcgaactcgagaactgtcggatcaagaatcagacacttatcaagcataacgatgagctgaagctcatctccgagactaccatgcatgagaatatcctgctgaagagtcagctagttccagagttgtccccgtaccactttggacacgacctgctcaccagcctcaatctgccattctgcaatacgaagtgctgcatcgtcctgctcgattcgtccggagctagacagtgcaaaaaaaatcgccaggccacctgaagtggttgttgtcccacgaaacagaggtggctgtgttgttgttctgcggccatggcatgtgtcaggggtcgccacagcacggtagtctcgtgtgttcattcaagcagctggtcacagctaaggcaattgagtgcgtggcggagaagttcaaaggcacatttgtgaggttgctgaacatgtgcgatgccgaaggggagtctacgttgaaggatgggcaaggtatcagggacgcagtaaggcttcgaggtgctcagatgcaagggggggcaggcgcgccaagcacctactacggcatgacagtggcagccacgcagcagtttggcaagaccactggtaacagccggggcagcaagttcggtgtcgcactggggcgcatgtttgatcaggaggtggttgtgacgtacgatgggttcgagacggcattggacaagtattggagtggggcgcaagtacggatgacgcacgctttccggggtgtgttcgggacgcccgctctcccggtgggttcttgttgcatcactaatgatgatgcgggttctgagtctgagtctgagatggagttctgagtctgaggtaatgggcgttcctgcctcccggccgattttgactggttgagaaacatggtatggagaggaattgtgattccttggtgctgatgtctcaagctagcgagtcgttccggatgctctaaatcctgattagaaattttaaaaaatcggccgggaggcaggaacgctcatttttattttttgttgaaataattgttgttcccgagatggagaccgtccgtccgtccgtccgtccattcatgacacacggtggcggatcattgtcactcaccgtctcgtggaagtggtgtaaacaactgttgcaaccctttaacgaaccttattctcctcttcacagccagcaagacacacacatacatacattttattatcgttcggtcatgttcctacacattgaggaggaggacgacgtccgcgcgtgcaacgggagccataacgagatcgcgcgcatcgcgaaacgaatacttggaaaccgcatcgctgccgccgcgaggagcacgaacggcaagaagctattatggtacgtattcaacgggtgatggccaagttccaagtcaagcacgagctgtccaccgttgttcgagatcagtctgtaatccacgatctcaatctgagtcccactacaactgtcgggtcatatccatatgtcgagaccccttcctttcccaacagagtgatacaaaatttgtcaaagtgatatggcagcggaacacaatgcttatgcatgtactgcaaaaatgcaatctttaaaattttgtaatccatgtaggcgccggacttcttctcacattgctcgaaaaaggcagcaattatgtcgtttagttgttttgttgtatccataatgtgtagttagttacacacagactcaataatgttacagatcaaaagctttatacagttgttcaattcggcctgaaatattttttctcattgcaggatcgaagcaaacggaacggaggaaacatgtctcataatactcggtgcattagatagataggataggataggatatgatagatagatggatagatagatagatagatagatatgatagatagcgcactcactctatcacgacacaggcggcggcttgcgtatcatactcgtccatctggtctccacggaggcttgctcatcctactcgtcagtttgtccattcattaatcttcacacacaccaaggcggcttttgcaagcagacttctgcttgagaactatgtcgggattgtgaaatggaaacgcgggccccatggagtggggcagtggaattcaactgatgcaggtgccgtctttcgggagatgaccgatgtcgtcttccagtacgtgtggacaggtggcgtcgacagccttgattgcggcaccgaggacgtgccaccccatctttgccgttgttgagcgcgagaagacggtctctcgactggtcgccaagatattcattcgagaacgtcttgaggcgcaataccccacgttccgcaacgggcgtatggttgcagggcgattgtggtcgcgaaggccacaacggagtgtggccgtactcaatgcgacttttttttgttaattgttgtatgtataaatgtcttcaacacaccacaaacgtaaaaagacttctggcgatgctacttttgcagctaagctggctgtgttcatgttgaacgctcagtcacacgacattcgtttttccgagaaggagggcttccttcactcaagtgaacacgtttaaaatagggattgatgtgagcatccggcattcttcagtatttattttttgttgaaataattgttgttccagagatggagagtcttcttttcagaggtgttcatgtgaacacgtttaaaatagggattgatgtgcccacatctcttcgtgactggattctggaatcgtaaccactgcgcatgtacctgagcagtgtcgcctctgcatccacgcacgcttgtgcatctcgaacatggatggcaaaacgcacactataacgtctgtcgccgcctcataccgtttattgggaggtttcattttactgttccactgactgtagggttgcatgcatttctgtattttgcagggtggcgtgaccgagcgtagacatgcccacgaagcaggcatttgccggcggcattctggtgcgtttcgggacgggtgatcaaccctcttacaggtccgtggttcactacaaatattttttgaggatcccccaacgtcgccaaaaagcaacgacctgcaagttcgattataaagggtgtcccactttaattagagaacaactggaagatggctatcaaggagcgcacaaccgagtacattatcaaagggggcgtgacggcaaacactctccgcaattttgccaaacactacattccatggctgagactgtctgacaacacgtatggacactgggacatcagcttcccggtgaatgccaccacgagaaccggccccgtcctgaggggtttgcttttccctttgttcaatgacgcatgtgacgcatgtgatgcgcttggtcggatgctcaaccaggcgccaaaagctattgagaggctatagtgtgttctgatgggatatggcggagctgactcacatacaccaccattcactgtaacacttcggcttctcactgtaacgcttgggattctcactgtacacaccaccacccaatgacaacagagacaaaatggtttaaacggtggtggaaacaggtgtgtgcttggagaggagattgtttacacacatgccacggcggcttgcccatcttccattctcgcacacgccacggcggctttcgcatcctcattgtcgatactcctcaacatgccacggcggcttttgcattctccttgtccactcgtcatcgaatatttggcggagcaggacggggtcctcgcagagaactgcgagtttgaggaagatttcatggagtcgagcgttgccttgttccacatgtatctcgaggaaagcggggacagtaacgatgtgtctgctcacacgcaccgccgcggatgatacatggggtgccaagacaccacacacagagtcaaatggggatgaatgcagtcaggtggtctcacctcaagcagacgtctgcttgacactctcttgcatttttgagggggggagggcgggtaccgcggagcggggcagaggcattcagctgatcccatgcatggggcgactatatcattgtatattggtgttgtgcgcgcaggactgtgatttatttatatcccccaccacggcggcaagcgcatcctcattgtattgtcaatctgactccaaaagacaccacggcggcaagcgcatcctcattgtctcgtacatctgtatccacaagataaaagcgacggaaaagttcagtagtgtgtgttagttactgttggctgtaaacttttctagttttaatgcacaacactagcataactacgttatgccgtgcagaatgacagccaaggggtgcttcttgtacaagaatgccaccgtcaacggcttcaacatcaccaatcagctccaggtccgagtggaggcgatcgacaacgacgatgcaaagatctataccacaaatgagaacggcaacccgctgccgatgcctgtcaacgtctcattgcgcaccggagaggatgtgaacgtcccagtctacaacaatgagttcctcatcgtgtggattgaaagctacgtgctggctgtcggtggcgtcgacatcatgtggctccacaatcagaagaagtaggccttctctgctagcaacggcatcaaagctttctcactgtaaagcgtggtgtatccagtgccatgcagacgtaaaatagcgtggtgtatccagtgccatgcagccttaaaatagcgtggtgtatgccatgcagccttaaaatagcgtggtgtatccagtgccatgcagacgtaaaataacctcgcatcaggcggcacctgtgtcggcacctgtgtcggcacctgtgccgctatggccctcccaatcaaaaaataacgaaagtaacaaaattcagggaaacctctcattatacatcaaccagcagacacactactgatttacgaaactgaaatcacacacacgcaacgccgcggatggtagatgcaggcagggagggagcaaattggttggtggggtggttactgatatggggacacagacggttgaacggtttacaaaagaggctactcggaatatcttcgagaacctcttcaacccgctgcaccccccaacgttgcccaaaagcaacgatctgcagtctggatgattataaggtgtgtcccactttatttgagaactactgtataacagaagaagaggagaatacatggaaacggaaaacaaaaacaagatgaaacctacaaaaaaattgacagtatctttacctattgggtttcacatgggactcgaagaatggatagattcgcaaacacaacacagggacgaggcaatatacgcactgctcgcacacgggctacacgcagtgcggacgataccaaaaacattattaaaaaaaaaggagggtcgtcgttcaggcagatcgtcggatacttataatgatccaaatgacataagtgaggcggcgcacatccaggcgagcgcatacagaggaacacggtatgcagccttctttgataaggatatcggatcgttgagagtggtgtcaaggtagccgacacatattggcaatacgagaagatcctctcacgggacccaccacctatcggatagatgaaggatgctgctgctgcttctagaaatgaggaagagagaacaaaacaaaaggaaattatgatgttacggggtccttcatcatgaccctccctcatctcatcaaggacggcgactttcgcatcaggcggcacatgcatcggcggcgacgagtagtcactcacagggagactttcgcatcaggcggaacctgtgtcgagtcacatcacagagcgaccgaccactctcatcacggcggcacaggtgccactatggccctccccatcaaaaaaataacgaaagtaacaaaataccaccgtaccacattaaaaaagtggcggagcccctttcacctcttctccccagcagagcgaccgggggcgaccggaggggagcccccacaaaggagtccgcgaggaaccgagtgggtgggcgaccggaggggagcccacagtttaacatcaaccagcagacacactactgatttacggaacggaaatcacacacacacgagacgccgccgcctccatctcggatatggacatcatcagcaaacttggtttcttcgccttatcatcatcgtgaccatcagcaacgtctcttccccccagcggagcgaccgggggcgaccggaggggagcccaaagttcacatcaaccagcagacacactactgggtgcacaagcaaacacacgcacgtgaagaagagtgataggcaaacggaggaaacatgtcgcatactcgcactttatcaggacacatgccgcatactcacacacgtgttgcggaggatgctgtcgagatgatgcccaccaaccactctcactcattctcacacatgcactctatcaagacacaaacggcggtttcgcatcctcctcggtgtccatcctgagtagaacgactgatattcgtaaacacagaagtttttaacacacccaagtcagcgaccattattaacgccaattttctaacggcgatgtccctaaaggtaccatttatttccatctgacatatgtttcatttaactgttccgccgactgtaggggaatcgcgggccccacggaatttagttgcatacacgtacacacgcaaacggcggaaaactgtcgcatccacacagtccatccgtccattcatgagacacggatgcgatggcggattctcgccactcatcgtctcgtcttgtcgtccacattacagattcctttgtattcgaataaaaaatatatgcattgaaagtacaaacccctacataaaatgatccgattgtctgaaatctatgcgaaatcacagtcgacatcaaacatcttatatagcgataatgcacccattaaaggagtgcgatcgcgaccaggtgttaaagaagcaccatcgatgtcatttgaacaagatacagacacaggattgttcaatgcatcaagtaatgtcttaggatttgctgcaggagcatatactacgctcattgcatcatcttccaatttacaagccaatacgcaaatcacaacatcttcaaatatcgtgcctctcaacgacaatgtctcacaattaggaacagtaacaaagaagttcgcaaaactgtatgcaacagatatacatggaacatctgctacatttaacacactcggaggaacggccatctcaagtatcgtcacttccacaagtagcaatgtcgcagccagttctgcagcggtcaaatcagcatacgatagtgccgtatcagcttccaatcagacgtacggcatcggcgcgctcgatagtaatggtgatatccttctcaggggcaacttgcgcatctccgaaactggattcatttctttcggtaacggaatgaacatcgacggatactcttggaattatttggccaataacgtcgttccccagcgtgccgtggaaaatactgtttccaagaaaacgttgtgggggggaagtactacacatttatccgcctacgttgattcggatggagtgttgttcattacaggttataataataatggtcaactcggtgatgaaacaacaatcaacaaaagcacgttcagacccgtttcacgactgatgaaggaaggaagacggatcgtggccattgcgggcggcaacagtcacacgcttgccctggactcgacgggacgcgtgcacgcatggggatggaacagagaaggccagctcggaaataatactaccactgattcatcagtcccgatcgatgtattcggatctctgaacggtaaaacgatcgtggctatttcgggcggccaccaacacacgcttgcccttgactcgacgggacgcgtgcacgcatggggaagaaacgactaaggccagctcggaaataatactactggcactcgatcattagttccgatcgttgtctcgagcttctgatctcttgtcggtaaaacaatcgtggtgattgcgtgcggctcctatcacacgcttgcccttgactcgacgggacgcgtgcacgcatggggatacaacaacaatggccagctaggaagaaacaataccactgattcatcagtcccgatcgatgtatcgagtttcggatctctgaatggtaaaacgatcgtggccattgcgggcggcacgcaaacgcttgccattgactcgacgggacgtgtgcacgcatggggatggaaccactacggccagc

SEQ ID NO: 307 - DNA, 21650 bp, Chlamydomonas sp.
  source 1..21650: mol_type = other DNA
gcctgcactaagcttctcgaacccggactcgtcctcatcgtcatccgcttcgtcttctgctccggcagcgcccttcttaccctttttgcccttcagaggtgcggagagcattgcaccgcacttcgcctgcaggccttgccggttgaagctcctggtaaaggcgctcttaatctttgtagggacatccttcatggggtcctctccccaatcggccttggtcttgaacttggtcacatcaatcacgtagtcaaacatttcccgggagacgcagtagtcctgcatcagggtaacactctgctggatgccaccactctctccatcagtcactagtggacgcgtcagtagggtgcgcatggctgataggtactctaaccgcacgggagatctgctagaagccatgtggccgctggaagccatggtggtggtgagttctcccagcaagcgcttgtttgaggttgagaagttgcccagccatgaggtgaagcgagagtagttgtcgcctggccagaatgcgtccctcccgccgcgcatgtacgcccccggcacaaggcatgcaagcgtgttgaaggcaggcataaggctccagttcatgtagcgccgcacagacgtgttgatcacatctcatgcagatatgccctcagctgacttcgccactgccctcatccgctgctcctcagttcctgcgatgactgggcggtggttaaggtagttctcctggatcaacagggggacgatgtcgtccaccatagctaggttcagccgatcttgaatgctcatgcttgagctggaaggctctagcaactttcttgcacactcgaaaggagacaggtcactgtccttgtcgcatgcctggctgcccttaacgtcatcgtaggacagggtggtgcgactaagacggaccatttgcagctgtcctaggatagagcgtaggtcgaaattggctcccttggccagggcctccatggtggcatcattgacagtcagcccctccttgcggcagatctccatcatccttatcttgacttgatgtggggtgggtgtcctgaagtcaagctccacacagtagttccgcaagcttttcaacttctggttccacttgtcgttacagatgcagataatgggcacctttgaggacttgatcgtctggatcaggtcttgcacaccaccacggtcaccaccagacatcccatcaacctcagccatgatcagcagctgcttcttcatcttcccatcagctcccaccaacagagatcgattggttgccatctccttgatcatgttggccgacttccctcccatgccagctgagatcttttaatccgacttgttacgggtgtcacaggcattcatctccacaatctcaaagttacactccttggtcaagatatgggcggcagaggttttgccgattcccggaggaccactgagcagcaccgccttcttggacaggtccttaggattcttccggctgccaggaggggcctgtggttgctggccacgcagatttacaccctcccagttgctgagccacatcctgagggtggcaatcagcgtgttgttgcccaccagctctctagtgtctgttggcttgtacttgtccacccacagttggtagccggcattacccgaaggagcctggacaccaaatactactttgtcatgatcgttcagggaattccattgctcggcagtcatgcttgacagttcgtacctcagttgcttctcaagtgcttctgcgcgctcagtatcaatcttcatgtatgccttatttctgcgcgctgtcccccccccccaacgttgccccaaagcaacgatctgcagtctggataattataaggtgtgtcccactttatttgagaactactgtatcaattaagaaatggatgcaatccttagtactacgacattcaaaagccgcatcatgggcacttcagtcaacgtcagcttgacaataaggaatacccatgaggccaccatggagttcaccctcttcggtgccgcttacacattcactgttacgaggtggagcagaaagggtttgtcgtcctttctgattctcttctttacttacaagtgccgagaagcagctgacttcggttctctcacggtggatgacaacggtgttcctaccttcaatatgaccactgcccagaaggtcaatgctgtgatccaaggtgccaaggatgtcatggcatgcgtagacgagattggtactcggcaccagcggtcagtgctcgactatgccgtctggtaccgggagaagcacacctgctgggacacttacgagaactacatcaccatgctggcatgcaactgcatcgtccacacagatttcttggctccgggtgtcacatgggagttggtgacatttggcatggcttgaaggttgcaacagttgactcgtttgctttccgaaaataagtaaacctaacagtgtatacggaatttgcatgtactagataaggtgtgtcccactttatttgagaacaactgtaagagcgagcgacttctacagtattcatgcaagtgttgggtgatttcaattgaaaactcataaattgtaattcattgagtacataaattgtgagcgaattacatggcctgcgttcgacgtaaatacggaatcccttgccaaccatattccaataaatgtccaagccatcttgctcacattccaacctgtgcagttgacagcatcgcttacttggaaatactggttaaggcggaaaaaaaattggaggcccaggtcgacgtcatgtcaacccaagctgtacaggatgcagccaggatggaccatctggcatctcactccaatgtcatggcatcttactccaatgtcatgtcagcccaagctgtacaggatgcagccaggatggaccatctggcatctcactccaatgtcatggcagcccaagctgtacaggatgcagccaggatggatcatctggcatctcactccaatgtcatggcatcttactccaatgtcatgtcagcccaagctgtacaggatgcagccaggatggaccatctggcatttaactccaatgtcatgtcagccaaagctgtacaggatgcagccaagacaaactgtctggaggcccgggtcagccagttggcatcgcagctagctaggtttccgcacaacccgtgtatgcatttctacggcgatggcaacatcacccctccttgagattatctcccttgggggcatgccacggtgacttgcgcatactcattctcacacgtgaattcaagcagagcagactcctgctcgacaacctacccatacaaatacaaatactgaacaacgcacacatgaagtccgcatttcgaaaaaaaaaattatacgcagcaatttaatccaaagtcggcgtggagggaagctcaggcgtggagggaagctcattattgagcaagtagatgatgtcgtacatctcacggggaatctcgggaatctcgggactcgacacgtcgagtgcaccattcagattctgggacagtttgtccatccacctgtgatcatcataggtcatgcgcgcatcgcgcaaggccttggccttgtcgggatgtagccgcatgatcatcatcctctgttcattcctcgtccaaacgccttttaaccaggtgtcaatggcttcgttagacaaccagtacttccaccaggtggtggacatggtcgccagggtaggcccgcttgcgaggaacgtttctaagatcccggtcctcaccagtagcccgtatacgtcttcaaacgtgtgggccggctgatatatatcggcctcgggatcgtactgggcctcgggctcgggctcggtctcgggctcgggcacgggctcggtctcgggcttggtctcggacatgggctcgggctggtcctcttcgtcagactcggacatggactcgggctgggtctcgtcgtcggactcatcatcagacgataccaaggatacaatgcacggatcatgggcgttcagaacgcggttgaagattggtgtcacgaagtctcgaacaatgtcttcatcgtcccttgataggtcgatgatgcacggttgttctgacacgttaacgaaagtacaagacatgattgattgagttgagaaatgataaatagcggcaaagtggaagtataatatgtgtgtgtctttacagatcgagcgaaacatttcaatttttttcacaagcactccgaggagaaatacatgaaggaacgcgcgatcgatgataactacaaggacgggcgcattaatatcgcgccccgccaagggaacgcggcggcttgcgcatcctactcgtccatcctcacactctgatgcatggcatgcagcccctctttcacatggatttgcatacttttgtgtgtaaattgcagccttgggctattattgtgtgtgctacagtcggagacgatatttgtgggacgccctaccggtgacccttgaacccaatgggtagatcagctaaaggcgagtacatatttttgcccttcatctctgtatttcagcatttaagctggcccaaaggataacaaggcaagctgctgacaaacccaggtgggtaggtcggtttagcgctcaccgtcggtatttaggcagacctttgaaatcgtttgaatcaactggtttgaatcaatgaacccctatcaagcggttttccccttgaatcagggtaccttgaaaacagtttgaatcagtgattcaattcaagcagcttattcattgaatcagacggaagtcaatcaagacaatatcaaacggaattcaaggtggtcgaagatattgcacttcgaaatgtagctaagctcccatatgtaggctgccgagaggtaggaagctttgaatccgaggcgggcgagcgcctagcgataaccggcacaaatccgtaccttgtagtacattagttgtgcgttcattggctagacaaaaatctagggtggggtgtaggtgctagcaagatgatggctgtaatctcaagtgtcacaactggctatgtaaccaagttgaagtctggctatgtaaccaagttgaagtctggctacgtaaccaagttgaagtctggctatgtaaccaagttgaagtctggctatgtaaccaagttgaagttgaatgtaggagtttggaaacagcccaagtagggtgtgtgtgcgtgtttaagtactcgcactttggacaatggtaggaaagaaacttttacaagaaaggaaacaaatataatgccagaaaacaaattggtatcatatatttaattttcctgctgaggacggcttagctggctcgaagctacacaacaacctaatatacagagagacagcctaatggacctgcctggaagctatacaacctggcacacaaagtgaaagtcttatggagctggctggaagctgtacaacctaatggagctgggtggaagctttacaacctgccacacaagtgaaagtctaatggagctggctggaagctctacaacctaatggagctggctagaagctgtacaacctaatgcagctggctggaagctgtacaacctaatggatctggctagaagctgtacaacctgtcacacaaagtaaaagtctattgaagctggctggaagttctacaacctaaggagctagctggaagctgtacaacccatggctggaagctgtacaacctaatggagctggctggaagttaggtctaattcaggagtcgggaaagtattcatcgttgtgggtatcgcacaattgatgaatacaatacaatgctctcgtgggtatcgcacaagaaggctgtatattgtcaactaccaggcccggctattgtccaaggtggtggaagggataataggcctatctactgctgtgcttgaaatttcaaattaaattttggggttttttgtatgagggtttaaagatactgcctgtcctggtcaacaaggacaggcagtatctttaaaccctcataaacaaaacccaaactaaagtcaccctatgattactgctccatgctactatatattcagggcactaacatgccttaatatcccattggctaagcttggcaccacatgatggcagcttccaggcagctccactactgcatattcgtcctttacttgctcccaacagccagcattcatgaatgacctgcaagggaaaaacattagaatgagtaagataatgctgcttagaatgtgctgcacttatcatgttggtgacttaagtgtgtgcagagggtggtggatgcatacatggctaaacgcattgaccacccattttgtagcaagcagcctcaagggcgcttatgcggctacataatgggcaggtgcagctaagccatattttttattactgacatgcattaattaagttgttacatgagggtggttcaggcataccatacaaggcaaatcgcatctcccgcccattctgtagcaagcagcctcaagggcgcttatcgggctacagtatgggtaggttcagctaagccatattatgatattattcataagtaacatgcattaattaagttgttacatgagggtggttaaggcataccatacaaggcaaatcgcatctcccgcccattctgtagcaagcagcctcaagggcgcttatcgggctacagtatgggtaggttcagctaagccatattatgatattattgataagtaacgtgcattaattaagttgttacatgagggtggttaaggcataccatacaaggcaaatcgcatctcccgcccattctgtagcaagcagcctcaagggcgcttatcgggctacagtatgggtaggttcagctaagccatattctgatattattgataagtaacatgcattaattaagttgttacatgagggtggttaaggcataccatacaaggcaattgcatctcccgcccattctgtagcaagcagcctcaagggcgcttatcgggctacagtatgggtaggttcagctaagccatattatgatattattgataagtaacatgcattcattaagttgttacatgagggtggttcaggcatgaaaacataactcaccacaacttcttgccaagtcctagtttcgctcccctcgaatcctctgagcgagctgcaagtggaaacagacatcaaagttagtgaatgagtgagtgtttcaagtagctcagtcccccccccccccccccccccccccccccccccatccccctcccaacccccttgttctatagtgttgtgtagtgttgtgtagtgttgtgtagtgttgtatagtgttgtgtactgttgtgtagtgtagtgtagtgtactgttgtgttttgtcgtgtacgggtcccagcagctgcagcatattttcaccaaaggccaactgcccacctagggatctgcccagaagctgcagcatattttgtgtggatccaactcttaccccccaccccgcccacccaccccccaccccacccccaacccctgtagatagcgcacctgcatatccttgggcataatggttacccgcttggcatgtatagccgccagattagtgttctcgaagaggcccaccaagtaggcctctgtcgcttcctgaagggccaaatttgcccctgcttggattctgtaatttccgaaatcttgtacaatttgtcgaactagcctcgtgtaactacgaggagcagcttgcactaacgaggcaacgatcacaaggctctgttgtttgttttccagaatcggaataatcatatttgggtacatgagaagtttcgggatcattatcccccattgttcatcaggtttgattagcatgacccccatcagggttgtctaggtcctgcgacgcagatcccgcatgcaccgcaggcgcaggccccgagaatccgattcaaatatggcgacctgcttctccgcccatgcgcgtgaggttacggcggtactgcatgctgtacagttcaaactggtcagcgcaatgggttagcgcttcaacttagcggctgtgctagctttcactgttcactgcgcgtcaattggttctcgactcagcgatattcctgcagaatagcgcaccatgctgcctgctttccttgaattaacttggactgatctattcatagcttcagccattcccgaattgcttcctagatccgtcaatacctacgtgcgcgagcactttgcttccgcggcactttgctttgggaatggttgtgcttcaactcaagactgtagcgaccttcttctccgcccacgccggcgcgtgcggttaaggtactgcatttttcgtttcgtcaagtggtgccttacttgaccagagttgtgtcgcaggcattaaggcagctgcagcaaaatgacctatcatggagccgcaagagttccaatgctcgaggtgtgaaacaggtgcgcagtcagatagcgacatgctgcctgctttccttgaattaacttggactgagcttgctttcatagcttcagccattcccgaattacttctgagatccgtcaatacctacacgcgcgagcactttgcttccgcggtactttgctttgggaattgttgtgcttcaacccaagactgtagcgacctgcttctccgcccccgccatgcggttaaggtactgcgttttgcgtctcgtcaagtggtgccttacttgaccagaatttgtctcgactttgactgacttgctttttcgagttgttccgcaggcattaaggcagctgcagcaagtcgacctatcgtccagctcatcatggagccgcaagagttccaatgctcgaggtgcaaaacaggtgcgcattcagatagcgaatttggtttgaaccatggctgctatttgaaagtcggaagaatgcgcattgctgccaatgtatctcaactaacgctcaccaacgaacatttgtctgcaggtctcactcttgcgactggtctcgcgtcagaacgcctggatgctgatgaccttgaggctgaagacgatgtcgttgatgaacaagaagcacagcatgctggagtttcgtcaattcgtacctgaggaactacttcgtggccaactgcacttccttagtagcatatatatctagctcttcaatcactaattactatcatgtttaactatctaaggattcattcattatggtgctttcaatttctgtaacaaagatcgaagagtcctgctgtccaaatatgcgccctcagtcttcagtgcttgcattgctttacgaaaaaacagatctatttgaacatcatttgagtcatgtttgaaacaaccaaccttgtttcaaacctttttcaaggggcacgttgatgacggcttgattaagatctatttgaacatggtttgagtcatgtttgaaacaaccaaccttgtttcaaacctttttcaaggggcacgttgatgacggcttgattaagatctatttgaacatggtttgagtcatgtttgaaacaaccaaccttgtttcaaacggatctcaatcggtaggtttgatggccgactgattcaaaaaggaaacaaagatcgattgaatcaaggttatctccgattgaatctaagaatgaatcaaacgaacaattcaaacaggattttctttgtttcaaacgaccctcaaagaagtactaaataccgacgaatactccttacaaaagcggtcgacagaagatttgtggtcattcttgtgccgaactgttttgtatgcgcgcttgcgggtgtaaccaagtttgcgtgtgtagcgtccacaagtttttggagacatcttggagacatcttcgagacagagaagtcacaccctctgcaagctgagacattgtcaagaagggattggagtcaatcagttgttttatagcagccgccttgatatcttctgtaatgacactcacccttttcttccgatgatgttttatattggctttggtgacccaacgttggagtgatgattttgatactttgtacagcaaactaactttcctcaaactacgattatagtatttgtagtgaacaaccgcgcggtgtcttatctcagcatcaatcatgataacgtaggaaatgtgtataaggaaatgtgggtgcaatattatatcaccaaaagaaaaagaatactcaccccctcttaatgggggtagtgcaagacaaaggagatgacgatattaacatcagcgtcgtcaagaagacgcttaattctctgtgcatggatgtatcgaggcatcagatctcctcaaggatacaaagcatggtactcttaatcaaccacgcagttgcagaggcaaacttattcgcaaactttcatatcacaagatgcctcgatgatggatactttgacgtcaagcagttaccacacctggatcggaacttttattacaggtgcctccttgcggtatcgacctccaatgttcgaaaggatactctgggccagagcttcaatgataccatggttgctttcgacgccctaagacctgcaggctacgtgaaggtggacattcgtccttggggacaagtaattgcagacgtctcaatacaaatggcgacgatggcgtgcaacagcgtctgggcaaacgtggacagggtcgttatcaagtacctgcgcttgaaacatccctctctgaagaaacatttcaagaagattgtcaaagcggtggtccagtacccagaatcgaaaatcgacacaatcatcccagagggcctcgttcatgcgatccatatcacagaggttgtcagtcacttgagggctctctttccgctgccaaaagggaagcagttcaacactagagcgcacctgacaatgcgattgttccatcacgtgcttacagagttgggagaggtcggacgagtggatccgaaagataaaaaaacaaaaaaaagtcacccccgtctgttcagtatccttcctcgcaagaacggcttcacaatttcgtacttcccgatatcgtccatgactttcatgaagcttctcagcatgggtgattcgccactcgagagcgtctctggcaatggacgttacgagaaccatacaatgctgtggcgaaagtactttaatatccaaggtcttgagacgaaaaggtctcgctttgacaaccgaatcctcagcgacggtaaaggggtatccgtccaaatgaagcagaagggtaaagaagaggtcgttgaagaaggagaaaacgcaggctatcccaaggacgcaaatatcgtagagtgcaaggacgcagtgggtgcgctgcgtgtcggagtagaccctggaatgacagatatcgtcacggtagcatcttctgcaggtcgcatcgagtctttcagctcggctcgctttagcgaagttgctgggtacaatacaagcaagcgtcgcacctacaaatggaatgacgagactcaagacctcgtgaagtccattccatcgcctaatacgagcaacatggtcgacctgcaggaccatgtcagagcttatctcaaagcgctcccgatcctcctacaacacagagccaacaaaggctaccgatctatgcgattctttcgatacgttggtaaacagaagacgattgaaaaggtatgcgatgtgattgcaccaagggcacagacgaccgttgttggcttcggcaactggtccaaccaagggtatggtatcagtcgttcatgttctgggcccatcaaagagatcaggaggtgcctctcacgtcgtaataatgttttgttcaaaaacgtcgacgaacgcaacaccttgtaaatgtcacggctgcttccagaggcttgtcaacatgaaggcagacagcgtagtctggcgcggagtttgcaaagagtccccaatcgacgggtctataacttttgagaagcagaagatggtggtgaagaacgtcaaggtccacaaagtactgcactgtagagacagtgtcaaaagcgcatcatccaatgtgcgctgtggtgcaacctggaaccgagacgtgaacgctgccaagaaccttcttctgcttctgacaacgtggatggacgggagagagcgacctgaggcattctgtgttccctcgcctccccccaaaaccacagtttccatcgaggcgagtgtgagcgctaaaccgaccgacccacctgggtttgtcagcagcttgccttgttatcctttgggccagcttaaatgctgaaatacagatatgaagggcaaaaatatgtactcgcctttagctgatctacccatttggttcaagggtcaccggtagggtgtcccacaaattgcgtctccgactgtaggttagaggatataagggtagcttaaattcaacggataacacgatggccaacaacattttaagacaaatagctttctggatcgggtgcataggaatcaggacagctttcgtgattcttgcctttctcgcgacacctaggtatctaaggggtatgggcgtcttggcccttgtgccagcaatagggttctttgtcctatactttggaggccttcgtaaaacggggatagaggtggcgccagatggcgggaagatctggtggtcgaaacttcgccctgttcatggcacgttatacctattgtttgcaatccttgcgctctcccgctggcaaagacatgcatgggtcgccttggctgttgatgtattcatcggtgtcctcgctaaactgtgtttccctatgtttttgccaggggtctcgactcgactcgactcgacacatgtgccgccgtgatgcgagtggtctcgacatgatgcgagtgtgactcgacagtatccgccgtccgttcgtggcctaagccccccctcacccaaatcctgtgtagtgctggcggtacgatcgatcgccggacaacgccttgcagcaggtcacagcctcgccgtcgcttagcggattcagataaatgcagcccctgcctcaacaatcaccagcacatccctttcggggaatatcgcatcgcttcgatattgcgtcccatgctttggtcgccttgccatatttcacgccttccttcgagcaatggacggcaccgcatcgcgcggtgcttgcgtgtttatcgaacgagctcatggcggttttggaattattggtcagcctcgccatgagttcataacgactatgacatttgctctcgatacaagatttgaggggctttgaagttttctcaatgacttcacctgcagccgatagtttatcgttgcattttgttacttttctgcacttcgatgctttcatgcggagcgcgcctgcccactctatccattcatcaagcgtccgttattttttgtcagagaccagacggacagcctcaatcttcataaacgcgacgaactcttcggccgtgtacgagtcgtccttctttccgagctgacggggacctgtgtagcacacgacatcagatcgactcttcgtttctttttttgcttgaaatgggcgttcctgcctcccggccgattttgactggttgcgaaacatggtatggagcggatttgtgattccttggtgctgatgtctcaagctagcgagtcgttcaggaggctctaaatcctgattagaaatttaaaaaaatctgccgggaggcaggaacgcccattttgaggtagttttgccactcgtggcattcaatgaatgaatgaaagtgtatatatttgaaatgaaaatccgacaaatatcttggatgcgaaagtcgcctgggtgtcatgtgtgataatgaatgaatggacggacggatggggggcatgcgaaagccgccgtggcgtctgtgctgtgtttcggtcgctctgtgatgtgactcgacacaagttccgcctgatgagagtggtcgctctatgactcgactcgactcgacaggtgccgcctgatgagagtgttcggtcgctctgtgagtcgacacaggtgttgcagcaggaaaactggcctgcataaggattgatgagttgagacagttataattaaacgctttgaatacatgagtcacatgacaggcacatgcaggtgttgtcattcatctttcttgcttgatcatgatcccaagtcgtgcgattggtgtgacatcgaggcgagcaaatgggagctgattgcgaatgtagcagcacttcatggtaaattagagtgtctcgtcaatgcatggcatcatggacaatgtttcatcaatacataccgggtcgcccttcatgcagcttcatgtggacaaatggcttgtctttcattcttgtttgatcagtgcggagcagcccatgctatgcatattcatgaacatgaacatgtggagaatgatgagctcatggggctgagcaatgttgcagcattggggggaaatgttgaatgtctcatcctggttaatagaaaaggatcccctatgcatccttctctgtcaacctgggctttacacatttgtgccaattgcgattgcacatgcaagggtggacatgctgcatgctcacggtacattcggagacgcaatttgtgggacgccctaccggtgacccttgaacccaatgggtatatcagctaaaggtgagtacatatttttgcccttcatctctgtattccctcatggcacgttcccttgggggtacatgcagcagcaactcaagtaaactaatcccaacatgtgccgccgtgatgcgaaagtcgctctgtgatgtgactcgacacaggtgccgccgtgatgcgagaggtcggtcgctctgtgactcgacacatgttccgttacgtcatgatgcaagaggtcggtcggtctgtgactcaacacacgtgccgccgtgatgcgagaggtcgccatgtgactcgactcgactcgagtcgacacagatgccgacgtccttgatgagagtggtcgccgttcctctaaaaacgagtgtaacgtagtggcctaagccccccctcacccaaatcctgtgtagtgctggcggcggtatgccaacctggatggtgctcctcaagcgtatgccatcatccgggcatggttcacattagatggttacaacttagtccctgtagaatggtccaatcacttccccatcagggtatctgttgaatccatacaaaaaagcacgtggctcttcgttgaccaaggtttgaattgcaatgtgtgtgtggaaccgatgctgattatctaactctaagtggattataagcacttcatgtgcaaatggaagccttagtgtaatggcgttggaagttgacgtaatatcttggacaaacttggaggcccagtcttggtccataacatgcatagaccggtccataatgttacagtttgaatctctatgtagtttggccataatatgtgttttctcattgaaccgcatggggcttgaggagtggcacatccaagatgaagaggcaatccccatcgatgctttcgggagtagtgtgtagtgtgtctaatgcttgatgtgaactcccctccggtcgcccacccgctcagttcctcgcggactcctttgtgggggctccgctccggtcgcccccggtcgctccgctggggggaagaggtgaaaggggctccgccacttgcgtggtgtgtgcatcttattcctcttcacttgcgtcatcatgtcatgcattatcatcatgtcgtagccgcaatcccatatatccctgttgtggtcgttcattttgaggcgctctatttgaacgatatgatcatggataataccaccatcactgtccttgacaaagacgcagatcatatccactttgcggacacaatctgatgcgagcggcatgatggcaaccctaaacattttacattttagaaattcaggccaaaaagtttaagttgtcgtcgaccgtgatgtagtgtttggctgtcttcacactatttagtgcacctgcgcgcgtgctgctgtactttctccgatttctccgttgagttgatgacccacctgggtgcaatcacaatcacaagcgttgtgtgttatactaatgatgttgtctaggttgttcaaatggctatagagacaacaaagcaaatcacacctgttgttgtttcgcagcagggctacggccacatgccatggccgcagaacaacaacacttcacacgatttggcacacacggcaagaatcaacaagggcattttgtttatgggaaaagatctgttccgcaatatgtctttgtcgacagctcgcagcatgctaagcacataagcaatgactaatatgggaaggttgcaacagttgactcgtttgctttccaaaaataagtaaacctaacagtgtataaggaatttgcatgtaatgggcgttcctgcctcccggccgatttttttaaatttctaatcaggatttagagcctacggaacgactcactagcttgagacatcagcaccaatgaatcacaattccgctccataccatgtttcgcaaccagtcaaaatcggccgggaggcaggaacgcccattatgtactaaatatcagaatgccatgtatggcaaccaacgcttctgtaaaattggcaaggcctccgatgcccttggtgtctccaggactgtcctccgtcgatgggcggataatggcacgatcagaacgatccggactccaggcaaccaacgtctctttgacccaagcagcatccaaggctacctcatcgagcaggaaaaaaaacccagcagtcgtcaagtcattctctacgcacgtgtgtcctcacacaaacaacaacccgacctgctcagacagcaattgttcttgcaaacccatatttctgacaaacattccggatgcgagcaagtcattgaagtcaaggacgtcggatcagggctcaacttcaagcgcccaggacttttacgagtattgggacttgtcacggcaggacttgtatcgtcaattgttgtggcttccaaagacaggctcgcaaggtttggtttcgagctcattgaatggatttgctcgcagcactcctgctcgatcatcgttctcgatcaccaagacggagcccctgaagacgagcttggaaaagacctcatgtccatcattcaagtatattgttgccgatggaacggtcgaagacgctacaaagtcaaatgccaaacccaagttgaggaacttaaagctgaagctgaacccaaccaaggctcagaaatcgatgctggcagagtttgcagggtgcagccggttcatgtacaacaaggcggtggcaacacggttgggcgtcggaagcactcacaagtctgtcttccgaattcgagacaggtatgtgacgaacaaggtgaggggggaggggaagatgccaaacccgtacttcaagaatcgccaatggttgcttcagtgccccaaaagcgtacgccaaagtgcaatcaaggctgccttggcaaacatcaaggcttgcttttcgaatctgaaagcaggtaacatcaagcagttttcagctccgttcagacggaagaagacagagcttgagaggggttgggccattgagatggatcagaagaacgtttccaaggatggcgacaaactcttcatcttcaaagacatattgggcaacatgcgctacttcggtagcaaacaactccataagttgatgcctgaggaaaacccgacccacgatccaaaggtccaaaaatcccgcttcggcgaatatttcctcgtcttgtctgtcgctgccagggacaggagggcagagcggaagcctgtccatccagacaaggttgcaactgcatccatcgacaaaacaatggtcacgtactcaccagagaatgaggaatccttcatgcttggtcagggacaggcatccgaccttgtcaaactcctgctggttcatgacaagctgcagtcaaggttggatactgagaaaaacttacgatcaaaagagaggatgaagataaagatgcagatgattcgcattcggaagagaattttttacctcaagaaagagtttagggaccagacaacaaatttcttggccgctcgctacgatgtgttgtttgtacctcaattggagacggcgaagatgacaatcagggctgaacgggagctgacaaccaaggttgcccgtcagatgctgactttgagccactctgtgctgttcaatcggctgaaggagaagtgtgaagagtacgggacagtgttcttgcatgtgcttgagcattacacaagtcagacatgccctatgtgcggtttcttaaacaagtgtggagagacatacacctgcaagaactgtcaattcacctgcgacagagacattgtgggggcagttggcatcttcctgaaggcagttcgaacagaaaatccctgttcgtaaaggacagcatccccgggggagttgacccctatgatacccctatggagaattcattgtctatcttactacatgtcccccggacccccggatgtgtaataagaaattcataggttcgaggatatacgggtagcttaaattcaacggctaagcgaacggcgaacaagataagtaaacgtgaacccttggttgagcttgagcccttcatgtcagcgccacaagtatacctcgattcatatgaattctggggtgtatacaacacttgtttccgacctgaggatggatattcatgccacgaagtgttcgtgcctgatgttgactgtgcgattggtgcgggcggcacaatggaggaggcttttgcagctgccaaagaaaagctgactgacgtggtcagtgatttcatgtatcgcggcgaggccatcccgccgccatcactccccgccgacatcatcaaccgcagacagcaggacaacgatcaatttgccggcttcgtggtcaccttcgtcggagtcgtcattgtttccaccctgccaagtttatgtgacaaggcaggccaaccacgtgaactgctgccgtgccatgacgggtcgccgtgtgactcgacatgatccgccgtgacgagagtggtcgccgtttgacgtgagtcgacatgatccgccttgacgagagtggtcgctgtttgacgcgagtcagcagctcaattccactgccccactccgtggggcccgcgatttccccttaacaatgcaatatatttgtcgaacaggagtctgcttggcatgtgatcaccatttgcgacaccctgccaattgcaagtcatggactgaattggctaacacgttcactaaactgtgatatacagtttgatctggtcgtttacagggttgaactgctcaatttgttatcttccataacctcatgttgccatgcagacaacataaggagtaaaaagctgtgcatatataatcaagtatgcctttcaaggtgggttttaaaccgttgaaaattggagtgcaatgtgcaaggtatgccgatgtgcgtcaattgtttggattttctgaccgtttgcaggttgtgtttctacaacgcaatgcgttcgaggcgtacgtcaaggacgatagcatacccttagaccctcaagaagtgtggcatgagaatattcatatccgcaaatgcaatctcaaaggactcgcctgtacgcttatgaggagactgacactgttggagcacatgcgagcatgggagaacaataaggatggacctagacggggggcatgcattgttgagatttatgtggagtggaatgtattagaaaggagactaacccgcctcattgcatccgacgctgttgtgggcgattccgtgatccgcttctgccaaaacggaagcacttgtctttccagacagttggacccaaccctattctcatcaattccacctaacgtgatagagaacataataagtatggtaggggagccagacgcgaatgcgctacgcgcagcatctcctaccatcgacgctcagtatgtgccgacgaagattaggaagatgttcgtcgttctggaccagattgctgtttagttttgtagtaagcgtagtagctgaagagtcaggagagtgggggcgtgccgaatccgggtttaatatttaggagttcttgacacggttatcttggttgttcgggcgaaagtaatggcacagagttccgcattttttgtgagtagatctgttcccttttggtctgctctgcggcccgcgattcccctatcgataaactagatcgattactagcagagtcctgcttggcatgcgatcaccattgcgactactttaccgtgtgtttcctggatctgtgagtgctcccccaagagtatcgacatcgtcccgccgtttgatatacgatgattttgtgcgcggtgatcgtctgaatactattacggggaacgcccattacgtgcataatcgtccgcactgcgtgtagaccgtgggcgagcagggagtattcactttatcattgtatttcatgataaagtgtgcttaaggaaatgtggtgcatgattttatcaccaaaagaataagaaaggtaaccataattctaaaagaaaaactaagatgaacgcttgtcgcttggttattcaggcatccactcaccccgtgtctgatatagatagagttgtttcgcgtcaagactgctacatacatgtcgatctgaacagggagatacagtcggagacgcaatttgtgggacgccctaccggtgacccttgaacccaatgggtagatcagctaaaggcgagtacatatttttgcccttcatctctgtatttcagcatttaagctggcccaaatgataacaaggcaagctgctgacaaacccaggtttagcgctcacactcgcctcgatggaaactgtggttttggggggagtccggccagcgaacctcctcaagacactaagctccgggctgtgagcatgtgttgagaggaacattacattacattacattacattacattacattacatgttaaagtctacttgacaccgcgagggtgtatgagactctgtgctttaaacaaaaagaaaaagcacccacaaagcaaaaaaacccattacatcaggggtgtgtcgaggacaaacaaaccaaactcccaaccaccgttttggtggcgtaggtattaaaccccttagagccggacccagatctcaaccacttacagtggcggaggtaagaagctaacaaatgagaagtcacaagaagaagaaaaaaagggatgataaattacggtgccactaagcagtccagggcttcctgtcttgctcttctacaagtagaaagatagtcggctaggttgctccaaaaagacttagtgccatttccattcataaaggttctgaatgtggaatcgcagaattccacattccatacggttaagttggtatcctcatggacatgcctataaatatctgtaaacagcttctggtagcggaggcgaatatcattataaaaagggcactcaaacatatgcatttcatcctcaggtttttggaacccacacattcgacagtgtctcattgagcgagggatgtgtgctctatccaccaccctcattctttctgtgttcagccaatgggaacccattctaaactgtgctatagaacgaatctgatcctgcttatgtaaggcggatgtaaagggaatcaagccattctcatcattgctgttggctgcgaaccatttttggtatcggaggcgtttaaagccaatccttctctcatcagggatgtctctaactgcattggtgtcacttgggtacttaaacctccatgactcaaaaacttcagacataataccttcgacatcgacagcctccaaaatgttgatgtttttactggatcctagcttgtggagagcacaacgcaagtcatgaacccagccagtgttggagtcaaaagattcctcaagagccattctaatgagatcctcaggttctttatgtatggtcttgttccagaagcgcaa

SEQ ID NO: 308 - DNA, 21059 bp, unidentified
  misc_feature 1..21059: note = Fanzor polypeptide
  source 1..21059: mol_type = other DNA
gacaagtcaacgtgttggcttacatcgtgcgcatcaataatcattttcaaagcgttcctgtaatcaaataattctgctacatctggaattattgggcacgcgcagcgatattttcgcttgagcaaactgaacacattctcaatagcgttgaactctggactgtaaggaggtacaaagagcgggcgtattcctacagaatcgaacgcagagatcgtctcctttgaatgatggaactggatattgtcaaggacagcggcagtaccctgctttacatgtaactctgatacaaactgtacaaagtcgactttcttgcaattgtgatcaaggatcttgtaatgaacgatacctttgacagaaacggcagcgattagcgtcaatttggacattcgcaatgtccgagaaatttggatatttaaacgtttgccgcgttggcagtaccctctgcgacaagtgtcaccgatgtaaaaacccgcctcatcaatgcttatcaaatccgatgtcagaacggccagatactctttacaaaaacttttgacagaagatttgtggtcattcttgtgtcgaacggttttgtatgcgcgcttgcgtgtgtagcgtccaaacgtttttggagacatcttgatagaggacagagacgtcacaccctctgcaagctgagacattgtcaagaatggattggagtcgatcagtttttttatagcaaccttgatatcttcggtaatgacgctcgcccgtttcttccgatgatgttttatattggctttggtgacccaacgttggagtgacgattttgatactttgtacaacagactaactttcctcaagctacgattatagtatttgtagtgaacaaccgcgcgatgtcttacctctgcatcaatcatgataacgtgcgcgtattagggtataaggaaattgtcagttagtatggtatcaccaaaataataatcactccctctcgatgggggtggtgacaaacaacggagatgacgacgatctggacatcatggtggtcaagaagacgcttaattctttgtgcatggatgtatcgaggcagcagatctgctcaaggatccaaagcatggtactcgtaatcaaccacgcagttgcagaggcatacttattcgcaaattttcacataaccagatgcctagatgatggagactttgatgtcaagcagttgccgcacctggattggaacttctactacaggtgcatacttgcggtctcgatatccaatgtccgaaatgatacgctggaccagagcttgaaagatagcatggttgctttcgacgctctcaggcctgcaggatacgtgaaggtggacgttcgtccttggggacaagtaatcgcagacgtctcaatacaaatggcaacgatggcgtgcaacagcgtctgggcaaacgtggacagggtcgttatcaagtacctgcgcttgaaacatccctctctgaagaaacatttcaagaagattgtcaaagcggtggtccagtatcctgactcggatatcgacaaaatcatcccagcgggtctcgtgcatgcgaacctcatcaaagacgttgtcagacgcctgagagatctcttgccgctgccaagggggaagcagttcaacactcaagcacacctgacaatgagactgtttcatcacgtgcttacagagttgggagcggatctaaaagagaaaacaacaaaaaaacgcccccgtctgttcagtatccttccacgcaagagcggcttcaccatttcttacgtccctatatcgtccatgacactcatgaagcttctcagcatgggcgattcgccgctcgagagcgtccgtggcgatggacgtcacgagaatcattccatgttgtggagaaagtacttcaatgtccaaggacttgagacgaaagggtctcgttttgacaaccgaatcctcagcgacggcaaaggggtctccgtccaaatggagcatcaggtgggtaaagatatcgctggagaaggaggaggagataatgcggggtatcccaaagacgcaagtatcgaagactgccaggacgcttctttgcgccagggtgcgctgcgtgtcggtatcgacccgggtatgacagatatcgtcactatagcatcttttgacggtcgagtcgagtctttcagctctgcccgctttagcgaagcagctgggtacaataccagcaatcgtcgcacaaacaaatggaatgccgatacgcaagacctcgtgaagtccattccatcgccgactacaagcagtatgcgcgacatgcaggaccatgtcagaggttacctcagcgctctcccgacactccttcaacaccgagccaacagaggttaccgatcgatgcgattctttcgatatgtgggcaaacagaagacgattgaaaaggtatgcgatttgattgctccaaaagcacagaagaaaacgattgaagaaaaggtatgcgatgtgattgctccaaaagcaaaaaagaccgttgttggcttcggcaactggtccaaccagggctatggcatctgtcgttcgtgttctggaccagtgaaagtgatcaggaagtgaaagagatcaggaagttcacgtcgtcagaatgttctgttcaaaaacgtcgacgaacgcaacacttcttgtacttgccacggctgcttccagaagctcgtcaacatgaaggcagacagcgtcgtctggcgcagagttaaaaacgagccctccgccctcatcgacggggctcctacaacaacaacaacaacaacgtttgagaagcagaagacggttgtgaagaacgttaaggtccacaaagtactgcactgtcgcaacagtgtcaaaagcgcatcatccaatgtgcgctgtggtgcaacctggaaccgagacgtgaacgctgccaagaaccttcttctgcttctgacgacgtggatggacgggaaagagcgaccagcggcattttgtgtgccctcctcatcgcccaccaaaaaccacagtttccggagaggcaaatgtgggcgctcaaccaaccgacccacctgggtcagttagcagcttacaattgttatcctctgggccagcttaaatgctgaaatacgggatgaaggacacgaaggattgggaccttgatacaaaacctttagctgacctacccattgggttcaagggtcaccggtaagggtgtcccataaattctgtctctgactgtactcagaattaagagcctccggaacgactcgatagcctgagatatcagcaccgaggaatcacaattccgctccagaccatttttgcaaccagtaaaaatcggccgggagactggaacgcccattacgattgtgtttcatacagctccttcataacgtttcgaaccatgtctggcaacacgggacaagatgcagtgtccctcccatttcatagttctttggagagctcgtccatccacaagtgctcctcatagtccatgtcatctccgcgcatggtctcactcttgtcagggtggatgtgaacgatcacgcgcatgatgtctcggtgagtccatgatcgctccttccaattatggcgggcctctggagacaaccagtacttccaccacataatctgcaacggcgtgaccaagccctgggaatcgccataggacaggtaagccgcacatatctcgcttcggttcaacgttgataaggacatcgatggcgacattcctagatcagtgtcatggcaccgctcctcccggtcatggtaccgctcctcccggtcatggtaccgctcctccctgtcatggcaccgctcctccctgtcatggaaccgatcctccctgtcatggtaccgctcctcccggtcatggcaccgatcctcccggtcatggcaccgatcctcctggtcatggcaccgatcctccctgtcatggtaccgctcctcctggtcatggcaccgatcctggtcatggtgccgctcctcccggtcatggaaccgctcctcccggtcatggaaccgatcctcctggtcatggcaccgatcctggtcatggtaccgctcctcccggtcatggaaccgctcctcccggtcatggaaccgctcctcctggtcatggaaccgatcctggtcatggtaccgctcctcccggtcatggaaccgatccgcccggtcatggaaccgatcatttaggtgctcgttctcgcaaactgatgatgagtgatgcgaacgttcacgcctcctactagtaccagttgattcttgtcgcctggtgctagtagtgctgcttcggtgaccaccgaatccctgcgcaatacaaacaaatgttgtggtgagagatattacagggattcatccagctcttcggaacaatccagctcttaggtacccacccggtgggttggatagagtttcatagggatgctgcccactctatttacgttgcgcgctctgtacatgggaccgaatgggagccgagaccccggcttcgaaggactactggttgtgcagttgaatcgcatgttgtaagctcttgattgaggattcgttgtctatcttttgcctaggttcatgcatttatctaatttttgcatgtacttcacattgtagtgctgggaatgcggtgtgtgtacattgtggtcgcgttcatggctcatgtacactcttggaaatgccgttgaattttagtgtacccgttttatgtattgtaagaatctgccttgttgtgctctgacaggttgagttgttccccaattccaccgttactgttggcatacttagtcggttttcctttggagtatactgatgagacatcctcttgattgagagcgcggttgtagtaaatcatgtttccgatgcggttgttcgagataggatgcttccctgggaagaggtgtagtcggttcttgttaggtcgcatggcactggcgatcttctttgtcgcatacaacgtgtcgttgatgtatgcacggatgatgatgccctcctcgtgagtgctgatagcgacgtggtcttcgaatgtaaacgtcacaagcatccacttgtcctgtcccaatttcatgacgtttctgcggaggctgctgttagacgtgtttgatacggaccggataacgaagcgctcgtctgggtcatgaattgtgttcaactcgacctggaaagaatcgtaggttggtccgaaaagaatacgtggacacttcgtagttaccgtccttttattctctacacgctcattcacaccggtggctacactgaaatctttgtcggtaaagcgaaccattatgtaatcgaagacggtagggtcccccttcaaaataatgtccctgaacttgacgttatgggaatcggtgttgcgcatgttgatccaaaattggtacgtaaactggatgcctcccttgcggttgtaggaaggacgaataggcatgtaattggacgcgtattcgttacttgtcgtgaagaaacggttgtgaagctctgccatcgagatccagccgttcatcatcaacacttctactttgtggtcaacctgctttggtttcggcatcaacccgtccttgttcgttgcaaacaacgaaatcaggtatattaagtacactacaaatactccggcgacaatctgtaacgcatctttcaactttttgttcatcttacaaggacgaagttcccatacagttgttttcatatttttttggagatcaccgtgagggaaaaatgttgtgagggacgaacgagtcgatgcacctgaaaggttgttgcgactcgattggacggcgtttgatagacaatatcaaatcgttatctccatgcacaacagatggaatgggacggacatccctcgatgaagtgtctctgaattgtttctgagtagtagacgatggaagattaactgtggttggtcggatctcgtgccggaaagaggccttcgacttgtcatgtggtagccaactgatgtccattgttttcgtggcgttgacgcctgacacttcgaaaccgttcatcacgaggtgcctcatagaaaatcggatgcatctctcgatgtcaaacatcgggtaaccaaaaacaacctctggaatttcgaagtgacacgtatacattcctacagatgcgcaccgcttgatccgggaataaacacgttctagaactaccacgaagacttcacgttgtttccgttcacgctccttgctaatggtggtcaaatcccttgcagacacctggttcattacaatgatatcctgcattccgctttatttttatggaacaatacattgaaacacttttttttttatgattaacgaattcacgatgcacagaacgcgtggcttccattgcttgtaaaaaaatcgtgattcattttaaactacttggagccgcagtttaggtagcactctacaagtccctctatatcatgtctataacatcaactgttggcaccgcgctcaaaaattcaatcctcgctggactatctgtcgtcatcattcactttgtttttaagaacatcgcgacttcccgttcgtcagaacaacaacgcctcatcattccgcaacactactatcccgaacgcaacgacaccaattacaatagaagctacatcaccaattacaacagcgacattggagaaaggtcagatgaggaggaggacgtggacatgataaattacatatacggtgacaacaacaaagaacaattcatggaatcgaccccaccatcatcacatgaaacaacaacacaaataccttccaaaacactgtctgccacaacaaaagcggactcaaaagaatcttcttctccactagggcatgttaatgcgtttgaaggtttcttcgacgatggaatcttggcatcagtgtcttccaccccatgtaaagatatcgcgaccgcatcactagacgcattgttcgctcctctgaattaaatcaaatgaagtccttaaacagttgttcaagtacttcatggttgtatcacctgtaacctcgacttccacgcattcttcttagtttggatgagtgccgcgatgtgacttcttctggcgcataagtacgttttgtcatcgctaatactaatactactaacgttactactattagtagcagtaccggttgtatcattagtagcgaaaccggttgtgagaagaatgcggctttcaagggtggctatagaaacgaacgcttggtcttcttgaacgaccggattgcaagaatcacgcgcaatgataatatcccgttgggtaccgatgatgtcctcacggatgatcttatcaagtgtattggcgatatctccccatgcgaagtctctgacgaggcgtttgcgggcactcgccccgtgcctgcacatgaggtctctgtccccgtagtacctcatgatggcatcggcgaagtcgacaggcgcggagagttcggcctcgccgcccacgccatcgcgagcggtgtccacgtaaatggagatcttgggcttgaccatgagagcgcatgtctcatcgaagaaatgcaggaagccacccaaggcaggcacgacttgagggattcctatggccgcctgctcaaagttgcagagaccgaatccctccccgtcgcacgtgttgattccgatgtttgcgacgttgtacaggaagttagtctccatgtccgttaacatctgcgggtgcccgggaacgaccaatcgatcgcgaacaacctggggggcgtcttttactccccgcttgagtagctctcgctcgaagagttcaggtatgttccaagcaccggtcagcgccgtaccgactacgagtcggatgggtgcattggggaggcgggcgacgacctcggcgaacgcctggagacatatgtcccaccgcttccgcggctggttgcggtaaaggttcaggatgaggaatgagtcccctggcagtccgaaaaaacggcgcgcgaggtctttgggtacgggaaagtatgtattggggttgaagccgtgggggagggagaagcatggaagccgcatcccctgtccgatgatgcagtctcgccatccgggagtgaaggctagcaccgcattcgcgttatcattcacgtatgcgaggagatcgcggcgctgtgataggtacacctggtctatatacgcgatcactttgaactcggagcggttgggtgcggcgcacacctctctcaatatggtggtcaggacaatgaggtcgttaaaaatgatgacaacgtccgggcggatgcgtgttacataatcgcgtgcgcaattgaccccgaacccttgcgctcgtgggatttcgtttgctaatgcatcgaacacgatcacgttcgcaggcacgtccttccgatggcctgggtggttgtgcatgttctggaacccgaagatgtgaagctccatatccggagcattccacaccttgctaatctcatagacgaccttgctgtatccgttgaactgattcggatgggttccgaagatgactaccttcatctgtaggtgcgttgttgttgttgtaaatgcccaacaaacaaatatctttgtttcctccgcagtctttacaacaaacaaaccgaaataaccccctaaacttcagaccaatgtaccatgatgtctttgtgtaagaatcaaatgtactcgagccacgctttgtgctccacctcagggacgcatgcgtcttcgagggcttgccacacaagcggcaccgtctctgcaaggtacgtatcggtgtcattgccgtaaacggacgcgcttcggttacgcaaaaccaaaatggtgttggacaactcctcgttcttgcttagccctacgtgcacgccttccacgaatccgttaagggcgttgaccatgcgagacacgcgcccggccctgcaggtgcacaagccatccttgatttcctcatgcaaaatatcacgaatcgcatctcggaacatgtggtttagcacgattgccaagacgcatctggcgagcatgtggtattgttcatcctcttgaaaatggcgggtcatggcttcctcatacagctagggacatttgattgtgggacaccttttatttgggggattcgaccaattcaagctttgtaaccgatcttgtcaatacagatactgtcttcaggagattgatacaaaacattcaaggcctgtacagacacagaagttacatgatcaaagtagcatgacaagtcaacgtgttggcttacattgtgcgcatcaataatcattttcaaagcgttcctgtaatcaaataattctgctacatctggaattattgggcacgcgcagcgatattttcgcttgagcaaactgaacacattctcaatagcgttgaactctggactgtaaggaggtacaaagagcgggcgtattcctacagaatcgaacgcagagatcgtctcctttgaatgatggaactggatattgtcaaggacagcggcagtaccctgctttacatgtaactctgatacaaactgtacaaagtcgactttcttgcaattgtgatcaaggatcttgtaatgaacgatacctttgacagaaacggcagcgattagcgtcaatttggacattcgcaatgtccgagaaatttggatatttaaacgtttgccgcgttggcagtaccctctgcgacaagtgtcaccgatgtaaaaacccgcctcatcaatgcttatcaaatccgatgtcggaacggccagatactctttacaaaaactttcgacagaagatttgtggtcattcttgtgtcgaacggttttgtatgcgcgcttgcgtgtgtagccaagtctgcgtgtgtagcgtccaaacgtttttggagacatcttgatagaggacagagacgtcacaccctctgcaagctgagacattgtcaagaatggattggagtcaatcagtttttttatagcaaccttgatatcttcggtaatgacgctcgcccgtttcttccgatgatgttttatattggctttggtgacccaacgttggagtgacgattttgatactttgtacaacagactaactttcctcaagctacgattatagtatttgtagtgaacaaccgcgcgatgtcttacctctgcatcaatcatgataacgtgcgcgtattagggtataaggaaattgtcagttagtatggtatcaccaaaataataatcactccctctcgatgggggtggtgacaaacaacggagatgacgacgatctggacatcatggtggtcaagaagacgcttaattctttgtgcatggatgtatcgaggcagcagatctgctcaaggatccaaagcatggtactcgtaatcaaccacgcagttgcagaggcatacttattcgcaaattttcacataaccagatgcctagatgatggagactttgatgtcaagcagttgccgcacctggatcggaacttctactacaggtgcatacttgcggtctcgatatccaatgtccgaaatgatacgctggaccagagcttgaaagatagcatggttgctttcgacgctctcaggcctgctggatacgtgaaggtggacgttcgtccttggggacaagtaatcgcagacgtctcaatacaaatggcgacgatggcgtgcaacagcgtctgggcaaacgtggacagggtcgttatcaagtacctgcgcttgaaacatccctctctgaagaaacatttcaagaagattgtcaaagcggtggtccagtatcctgactcggatatcgacaaaatcatcccagcgggtctcgtgcatgcgaacctcatcaaagacgttgtcagacgcctgagagatctcttgccgctgccaagggggaagcagttcaacactcaagcacacctgacaatgagactgtttcatcacgtgcttacagagttgggagcggatctaaaagagaaaacaacaaaaaaacgcccccgtctgttcagtatccttccacgcaagagcggcttcaccatttcttacgtccctatatcgtccatgacactcatgaagcttctcagcatgggcgattctccgctcgagagcttccgtggcgatggacgtcacgagaatcattccatgttgtggagaaagtacttcaatgtccaaggacttgagacgaaagggtctcgttttgacaaccgaatcctcagcgacggcaaaggggtcgagggtctccgtccaaatgaagcatcaggtgggtaaagatattgctggagaaggaggaggagataatgcggggtatcccaaagacgcaagtatcgaagactgccaggacgcttctttgcgccagggtgcgctgcgtgtcggtatcgacccgggtatgacagatatcgtcactatagcatcttctgacggtcgagtcgagtctttcagctctgcccgctttagcgaagcagctgggtacaataccagcaatcgtcgcacaaacaaatggaatgtcgatacgcaagacctcgtgaagtccattccatcgccgacttcgagcagtatgcacgacatgcaggaccatgtcagaggttacctcagcgcgctcctgaccctccttcaacaccgagccaacagaggttaccgatcgatgcgattttttcgatatgtgggcaaacagaagacgattgaaaaggtatgcgatttgattgctccaaaagcacagaagaaaacgattgaagaaaaggtatgcgatgtgattgctccaaaagcaaagaagaccgttgttggcttcggcaactggtccaaccagggctatggcatcagtcgatcgtgttctggaccagtgaaagagatcaggaagtgcctgtcacgtcgtcagaatgttctgttcaaaaacgtcgacgaacgcaacacttcttgtacttgccacggctgcttccagaagctcgtcaacatgaaggcagacagcgtcgtctggcgcagagttaaaaacgagccctccgccctcatcgacggggctcctacaacaacaacaacaacaacgtttgagaagcagaagacggtggtgaagaacgttaaggtccacaaagtactgcactgtcgcaacagtgtcaaaagcgcatcatccaatgtgcgctgtggtgcaacctggaaccgagacatgaacgctgccaagaaccttcttctgcttctgacgacgtggatggacgggaaagagcgaccggcgacattttgtgtgccctcatcatcgcccaccccaaaaaccacagtttccggagaggcaaatgtgggcgctcaaccaaccaacccacctgggtcagttagcagcttacaattgttatcctctgggccagcttaaatgctgaaatacgggatgaaggacacgaaggattgggactttgatacaaaacctttagctgacctacccaatcaattgggttcaagggtcaccggtaagggtgtcccataaattctgtctctgactgtattcatgcgaattgagaaacgttgaatattccctgccagtggcctcgggtgttaaatgcgtgagacccaaggagccccccccaatactgaggatgagagcgaccgcggcgtcggtcgtttgcgtcaccccatggccgtgcgtattctcgttgtttttccacgtatatcccccatcttgtgtgcgcaacgagagctgcttctcaactgcatcggagtcgtaatcatgcccgcgtttattcaactctgagatggccgagttcagcttggtggtgctcaccaggttgagtcggtgcgcgcaaagcagctcatggatggtgtccttgttgaccatgctcacggggatgttcgataagtccgcgaaccagaggttgtcgttcctaaggaggatccggttgaccacccttgtgaagcacgggaatcgtaaagattgtagacgctgtgtgggatctccttgagtctattgaaagaaagatcaacatatcccagacacagcggcagccccccgcatggctcgaagtgctcaaggcaactgtacgaaatgaccagatgcacaaggcatggcggcaataagtcacgcacggtgcggatggtgcagtgtaccacccaaatatccgtcacgttgctctgaagggcatctggcgggagcttcgtgattgtgacgtctcgcaaagaaacggtcgtacagtccatgcaatcgatgcactccatgcattcctcatgaggacaaggcagctcatcggtgcatgatgtgtaatcgcttggatgaatattggattgggatagcaactcttcgatggtgattccaactcttggatggggattccaaatcttgaccaggcagcaccccatgtttctctaactcttacaaagtgcagtacaggaatacatgacgtgtttttatacatgaatgcaaaacatggaaacctgcccaattgacccaatcatgttccactgccccgtgggtttctacaccaggtgtgccggtttcattttcgtcgactgtaaggattcggttgtcaaagcttttcgtctcaagatctgaccatcacgttcgattataatgtggctcaatttattttataacaactgtattataacatagtgacgagccaaaaaaatgcaagagactactatcgtgtttattacattattgctacttctaataatcacctgcattttcggagggtcaatgcgccaaacaccggtcgttgtttccaagtacccccccaccaatatgggcggcagctatggattgcccatggaggagttcgacgaagaggaggaggaggtctacgaagatgaaattcccaacaatgaagatattatgggtggaggagaccccatggaagtacaaatggatgaaaccgtcgagggtatggagaataatgaagaagaagaagaggattcccgcgaattggtagcccacccccagccatacatctctgaggagtttgcttcttattaattaatcatctgacaactcttgaaacgaagcatcaaccatattccacggatgcaaaaggtcaccccgtagtcttccatgtcgccgcccactcgcaacacattggtatccttaatggagtccagaggtgcgacataaatcgattgtgtagggaggagggatgatgtgacgcaacaactctcgatctcagggtagacgtccaacattgcgcgcatgcgatttgtgatgcagcgttcaaattccgcatcttctatatcgctaatgttcaccgcagatgctccaccaccgaagacacgcaacaaccctttgaggagaacgtccagacaagtcaagaaacactctcgtccgtcaattgcgcggttgcaaagcgtgatacgcaatgaaggagattcatggttgttgttctcttgaaacactagctcggaaatatgagaagaagttaacgtcatgttcatgtggatggtgctctgttgcccacacccaaccattgttctctttacttcgaaggacctaaaaagttttcgtattcgaaagtcgtggaaaaacggaagctgaaaaatggtcgtgcaagtaatggttcaataccatgtcggcacgggaatcaccacccccatcatcgtcgtcgtcgtcgtcgtcgtcgtcctcattatcaccatcgtcgtcgtccccgttgtcgatttcggcttcgttcctgagagtgaacgcgagaaaattagggtcgtaatctggattgagttccgttcggaaccggacccccgtgtcgcgtttcgaggggacgtagtacttgatgtttatcagaatctggtgatttacacccttgaagtcatagagcaccccgtcgaacaactcaaaacggaagctgagtcgactcagtttccctatcgggtggaatggcttcctcacgagcgacacgaagtcgaaacgaaggtgcgcgagttcgctcccgctcgcgagtttgaacactcccagcccggtcgaatagcgacttgatcttccagagctgcacatgtgctcctctatctcggggcatctaagggtgatgaagcgaggccctgcgaggttgacgatgccggggggaccaagtgtgttcatgtacgcctgcgtgtccttgtctagcgtgaggatgctcatgcagcacggaagccccccgcccaacccactccctaggaatatgggctgaaatgtgcattcgtgtatgcatgggactgggcgtgtgtcgtcaaagcctaaaagtgacgcggcggaagagatgaacgcctccgttgacgggtcgtagtttgtgcatgtaacgaaaattatattagtcgacgctttaaatatgattttgttttgtctatccgcagccgccctgttgctggcaaccacgtcaattgagattggtgcgagcaactcttgcatgtacgtgatgagggatgaaatgttataatttccgacgatcatattgaagaagtgaacaccacaagacatgcgcgccgccccattggaaatgatgctatcgaattcggacgacgtcacatgcaaacagacgtaatacacaatgtcgtacagaggcgtgtccggtcctactccactgaataccgactgcaaccatatggtactcgacgggatgatggagaagttcagtgacgtggagtgcgtcgcaagccactctgctagttctcggttggcgggcgagcccgatggattcaccaactcgacgacatcgtccgtgaccgcgcctcccacgtttgctacgttgaacacgttcgtgttattcactgtctcgcgactgggcctaaacgggacgcctgagaaggagtacctaacaaacacggcgtgtgtgggtgcaaactgagctgtgtaatcagaggcgacaccttgttgttcatcaaccttatgttgcagcaaaggatgcgcagatagattgttgccatctactgtagctaaataatgagaggggtactcgtcttgcacggctttatcgaataggggatgctgtgataaggtctcaagctccttacgtacatcgttgtgctttttcaacgatccctgtaacacatcgaccgtgacaatcctcaactcattgttgtgcgaatctacattgtacatcgtgcttggaatagcagcatcgagtatgtccagtccgaagacatacttgacgggttcctcaaacttcacaacataatccgacggtgtgcgattgtacatacggttgcgtttgcttgaatctttgaacaacgtgagcgagtcggaaacagaattctgaacaaggtagtcaacatcctcaatgggtatcgttgggtcagaggtgctttttacacaaacaaacttaagaaatcatgttgcgaattctttaaccgataaaaagttgtagatcctgttgttcttcaatacatcaactccgaacaggaacactaccacattcagcaaccgcgcacgtccaccctccatataggcacatttaatgatatcattcacaatcaatccgcacggcgtgctgtatacaagggtatcttcggacattgcgactaacttgcccagtctatcgtatgtctgaatcaaggatcggtcacacatctcagtgtagagacgcatcaaactcaactcaacattatatgaggcgtaaccgccatcatcatcatcatcatcatcataatccatgttgccataaaactaaaaacggaagtcctgatcacttactctatccacaacctgtatgacttggaatgtctttacaccatttttttgaaacaaatgtgaaggatgtggtacacacgacgcgaacatcggactgctcaagcatcctttgtcttgagtgtggggcagaaggatacggcatcacgagtgctaccgacaatgtccatcgtgtcaggagactgaatgtctggtaacaaattcccccaagtatttgaaattcctatgaatgctacaagcgatgggaagcatgtgtggtatgggaaatccgaatcaaaaactctacgagacgaacgggtgttcagcacggtcagcaatggcatatggaactctcctacggatgtggagcaatctgtgttgtgtatgtccagaattgcaggctctctatccctgcaatggacatcaaatgcatgtctgcgcagtacagatcctgaagcgtgttcctgcacacaccggtcctaaacggaacgagggaatcgactgacgtccccgatatgtttaacctcttcagattggggagtgcggcgaacatctcgatgtcctcaacatcattgctattagagcaggacacatgcgccaaattcgcaaaggacatatgggaaagactccactgggtgccggctcgaaacgaaggtatcttcaccgatagatccgacatgtttgacaccactgccttgaactgcttgctcacgcacatcaggcgcaccaggtaccccatgtgcatctcatcacccttgcatgtagaccatgatgacacgatcttttccaagatttcgtccgggaagaaaaattccgccgagaccctctcatgtacatccacgtctatagcatccgcagtgtccagatccatggagaaagactcttgagtgtacgggacatctgttgtcataggtgatactaccacagatggtactaccaaaggcgatgacgacgatgtagtgttgtctcctcctaccacaacattggatggttgttgtcctgctagctcaatcacgagctcatcatcatcctcagaactgctactatcggtgtcttctagttggccttctatcgccgcaattgtggctctcaacttgcgcatccctccgtgttctgatggcagaatcgggcgctcgcctccagagagtatctgtagaatgggtatatcatcaagcttgatgcaaaacaccgacacacttgttgcttgtccatccatggcgctggtagcaaaaccattgcgtaaccgcgaatgtatctctgctttcgacaacgggagttctcctatgcgtacagacatcacctccgatccttcgactagtacggacaatacgtgtgcattaatcgagtcattgtttgacgaagagttttcataggttagcacctccttcaaccggttaaggctggtcgctaaagcgtcgggtatcgacatagggaggagtgtggttcaatgcgtgaaatcagtattttatcgttccagaataacaaacatcgcttcgaagtgagtgtattatactacaaaaattagggttagggcaatgatatcatgcggcttttggcgaagccgctttctgtatatcaggctacactcggcggaacatataaattaaaccgctttctggagtgtacgcattgcacatcaacaaagaccccgtgttattttgggccacggtaccggcgatcgcttaaatgcgattgtgtaccgaattgtttcccggagatgccccactgcacttgcggtcgatgcacccgtgcagtttatcttatttctcgctcatttgtttatcgaaccggatatctttctcgatcgtcatgttgtgtattatacgcttgttctgacattcacaaacgcaaagttcaatgaaatgattcctgtcaacatgaaaatgatgagtaagcccattatgctcaagtacgactcagtcgatttatgagagaggtgaatcgaatcttcaatgttgtacaataacataataatgtcttcgacgtcgtcgctctcgctttttattgctgacacccgccgtcgtttgcgatttttgtggatacccattctcttacccaatagcacaccagcttcttctccttcatcttcatcttcagatacaacaggatcggcagatgggtcagtgataccagatgagtcagtgataccagatgggtcagtgataccagatgggtcagtgataccagatgggtcagtgataccagatggatcttcctttgtatgagagagagtaacatcaacgtcatcgctatcagaatctgtaccaaccatttgttttgtaccggaatgcaacctcatcattacaggtaaagtgggacaaacctttactgtggtatcaaataaagtgggacacaccttatactcgggagtatcgagaacctcttaaactcccacaaataagaatcaggtggtggtggagctattttttttcccacattctatatctccaaggcatatgagcatttcctcatgatcgttcactcttgagctcaacgatactaatgagattccaatggctgcgagtatcgatatcgctacgatgaatagcacgacgtttccaaccaggtgcatcttttttacatcatctaaacatttaatttataatcgcactcctcaggtatctgcgcattccagacgcgtaaaaaaaggttcacaatcagaagaaagtcgcaacaggtcaaggcgcaggcaggcacatggaacatcagcttgatttaacaaattgcatcgacaagacagatgtttcgggatgttattgggaaggcaatgacgagtcatgtgtaaccaacgtttcacaacacatgaaaaccctttgctcgtcgcacactcatctcatggcatgcaaaaataagatatcctcatatttcctgtcccacaaatgggatatgttcaaaaagttcgcaaatgcctacgagagcatctattctcccacgttccacgggagcagctacggcgtttccctctacagaccgataagtcggtctttcttcaagctctgggagattttgcacgactttgaaccagacctcaggttcgggagaatggctcaatgtaaaaaacacccggtgcgcgccgcatttcttgctgagggcccaggaggcttcatggaggcgttcaccaagtatcgctacgattacggaacatgcgaaggtgacgagtaccatgggataacactcgtagaccggtcaagtcgctctatcccaggatggagaatcgcacctattcgccggttggcaaggtcaggcaacgcatgcggagtatggctgcacaacggggaggatggaacaggcaacctgtacaacatttgcaacgtcgataatttcgttgatgccgtaggtgggaaaggcaccgtagacttcgtgacagcagatggaggcttcgacttcagtggaaacttcaaccaccaagaagaaagagccatgcaactcgtggtggcacagctgtatacagctatgtgtctgcaaaaacataacggggtgctagtcataaaaatatacgacatacacggtgaagttgggtcagaggatgtgtgcgacgcggatgcttgggcctaatttgcaggagcgtcccgaacgttcctgcttcgtgcatttgcacaatgatgatgtcatcattgcgtttgtagaacgacgactcaacaccgacagttgttctcaaataaagtgggacacaccttataatcaatcatccagactgcagatcgttgcttttgggaaacgtaggggggtgcagcaagttgaagaagttctcgaaaatattccgtgtcgtctctttggtaaaccgttcaaccgtctgagtgtgtccccaaatcagtatcaggtgttggttgttctgttctgttgtgaaaataaattgtaaaacttatttaaacaaacatggcagcattttcgattcgagaggcatcggctattcctggagaaaacttttttttgaatgcgaaccagtctgatattatcatggctgccagtgactcctctagtcgtatcctcatgggcaactagtcgaaccatcttccgaccatggagttatactctaacgtggccaacgtcaacggtaacattctagcgacgcacttaagcacgaacacaatgaattgcacatcattcgacatctacatgccgtccgctggcgttggagagtactccaactacactatgcctggtactatcgctgacgcttactatgccagcaacattctcagtggaaacgccacaatcccgtccattcatatattgtccaacgtcactgtgggtgccgactgggagacatgggatcctgtgtatcccgtgcatgtcaagtcacaggtcaacggcatttctatttttgcgcgttacgagctcgcgcaagtctccgacatgcgcgtaaagaccaatctcgaagtgatcggggacgctttggcgaaggtcaagagcatatccggttatacgttcgaccgcacagacagcgtgatcagcatgcgccagtgcggactgattgcacaggagctgcaggcggttctccctgaagccgtgcacgagcaccctgtgacgggtatgctcactgtagcttacggcaacgtcgtgtccatcctagtgaacgccatcaaagaattgagcgacaaggtggacgcattgggatcttaaatatttgaacatcaacatcaacttttgcgtttcaacttatttgaaaac
